United States Patent Application Publication US 2011/0183924 A1 - sequence listing, part 186

SEQ ID NO: 450738 - DNA, 1054 bp, Homo sapiens
gggacgttgcgccgggtcaaaggccagcggcgcaaaatggcggcggcgatgaccttctgccggctgctgaaccggtgtggcgaggcggcgcggagcctgcccctgggcgccaggtgtttcggggtgcgggtctcgccgaccggggagaaggtcacgcacactggccaggtttatgatgataaagactacaggagaattcggtttgtaggtcgtcagaaagaggtgaatgaaaactttgccattgatttgatagcagagcagcccgtgagcgaggtggagactcgggtgatagcgtgcgatggcggcgggggagctcttggccacccaaaagtgtatataaacttggacaaagaaacaaaaaccggcacatgcggttactgtgggctccagttcagacagcaccaccactagagcgtgtggcacgccgggggtcccgcagcatcctgtgagcatttccgcggggaagctgagcacgtgaagctcgctggttctgtgcgaagggtattcctggtgctgaataaagggtgttgctgtcaaggctgaaaatttatatctgtgtgaggctggattttctttgcctactccaaccaaagcgacacatcacagcagactggatgcagaagcgtgcgtgggaatgcagctgttttccatggaaccagacgctacagagactgcaacgtgtaaaacactgccattcttttcattcctttgaataatttttttaaaatttgctatttaacacgtaatagttttttattttaaaatgaattaatacttttttttttttgaaaaggaatctagctctgtcacccaggctggagtgcagtggccccatttcagttcactgcaacctccacctccaagtttcaagtgatcctcctgctccagcctctcaagtagctgggattacagggcaccaccgtgcccacctaatttttgtatttttagtagagacagcgttgaccatgttggtcaggctggtcccgaactcctgacctcgtgatccacctgcctcggtctcccagagtgctgagattacaggcgtgagccaccg

SEQ ID NO: 450739 - DNA, 671 bp, Homo sapiens
  misc_feature (593)..(593): n is a, c, g, or t
  misc_feature (637)..(637): n is a, c, g, or t
  misc_feature (639)..(639): n is a, c, g, or t
  misc_feature (642)..(642): n is a, c, g, or t
  misc_feature (653)..(654): n is a, c, g, or t
  misc_feature (659)..(659): n is a, c, g, or t
  misc_feature (665)..(665): n is a, c, g, or t
gggacgttgcgccgggtcaaaggccagcggcgcaaaatggcggcggcgatgaccttctgccggctgctgaaccggtgtggcgaggcggcgcggagcctgcccctgggcgccaggtgtttcggggtgcgggtctcgccgaccggggagaaggtcacgcacactggccaggtttatgatgataaagactacaggagaattcggtttgtaggtcgtcagaaagaggtgaatgaaaactttgccattgatttgatagcagagcagcccgtgagcgaggtggagactcgggtgatagcgtgcgatggcggcgggggagctcttggccacccaaaagtgtatataaacttggacaaagaaacaaaaaccggcacatgcggttactgtgggctccagttcagacagcaccaccactagagcgtgtggcacgccgggggtcccgcagcatcctgtgagcatttccgcggggaagctgagcacgtgaagctcgctggttctgtgcgaagggtattcctggtgctgaataaagggtgttgctgtcaaggctgaaaaaaaaaaaaaaaaaaaaaaaaaaaaaaaaaaaaaaaaaaaaaaaaaanaaaaaaaaaaaaaaaaaaaaaaaggggggggggggcaaaaaaantnccncgggggggccnnaagtntagagncacccg

SEQ ID NO: 450740 - DNA, 638 bp, Homo sapiens
  misc_feature (560)..(560): n is a, c, g, or t
  misc_feature (604)..(604): n is a, c, g, or t
  misc_feature (606)..(606): n is a, c, g, or t
  misc_feature (609)..(609): n is a, c, g, or t
  misc_feature (620)..(621): n is a, c, g, or t
  misc_feature (626)..(626): n is a, c, g, or t
  misc_feature (632)..(632): n is a, c, g, or t
gggacgttgcgccgggtcaaaggccagcggcgcaaaatggcggcggcgatgaccttctgccggctgctgaaccggtgtggcgaggcggcgcggagcctgcccctgggcgccaggtgtttcggggtgcgggtctcgccgaccggggagaaggtcacgcacactggccaggtttatgatgataaagactacaggagaattcggtttgtaggtcgtcagaaagaggtgaatgaaaactttgccattgatttgatagcagagcagcccgtgagcgaggtggagactcgggtgatagcgtgcgatggcggcgggggagctcttggccacccaaaagtgtatataaacttggacaaagaaacaaaaaccggcacatgcggttactgtgggctccagttcagacagcaccaccactagagcgtgtggcacgccgggggtcccgcagcatcctgtgagcatttccgcggggaagctgagcacgtgaagctcgctggttctgtgcgaagggtattcctggtgctgaataaagggtgttgctgtcaaggctgaaaaaaaaaaaaaaaaanaaaaaaaaaaaaaaaaaaaaaaaggggggggggggcaaaaaaantnccncgggggggccnnaagtntagagncacccg

SEQ ID NO: 450741 - DNA, 641 bp, Homo sapiens
gggacgttgcgccgggtcaaaggccagcggcgcaaaatggcggcggcgatgaccttctgccggctgctgaaccggtgtggcgaggcggcgcggagcctgcccctgggcgccaggtgtttcggggtgcgggtctcgccgaccggggagaaggtcacgcacactggccaggtttatgatgataaagactacaggagaattcggtttgtaggtcgtcagaaagaggtgaatgaaaactttgccattgatttgatagcagagaagcctaaaaaggcccctgcaaagaagggagagaaggtacccaaagggaaaaagggaaaagctgatgctggcaaggaggggaataaccctgcagaaaatggagatgccaaaacagaccaggcacagaaagctgaaggtgctggagatgccaagtgaagtgtgtgcatttttgataactgtgtacttctggtgactgtacagtttgaaatactattttttatcaagttttataaaaatgcagaattttgttttacttttttttttttttaaaagctatgttgttagcacacagaacacttcattgttgtttttgggggaaggggcatatgtcactaatagaatgtctccaaagctggattgatgtggagaaaacacctttccct

SEQ ID NO: 450742 - DNA, 5567 bp, Homo sapiens
  misc_feature (5388)..(5388): n is a, c, g, or t
gcagctgggagtagtactgccggctccagtgcgttcggggccccgcccggccgggccaggccggcgggcggcggcggtagctgctgcagccgcaggataacctcgcagggtgggccggagggcgggcgccgccgctgcctgtgctgcggcgatggcccagtgtgtacaatcagtgcaggagctaatcccggactccttcgtcccctgtgtcgctgcgctgtgcagcgacgaagccgagcggctcactcgtctcaatcacctcagcttcgcggagctgcttaagcccttctcccgcctcacttccgaggttcacatgagagatcctaataatcaacttcacgtaattaaaaatttgaagatagcagtaagcaacattgtcacccagccacctcagcctggagccatccggaagcttttgaatgatgttgtttctggcagtcagcctgcagaaggattagtagctaatgtgattacagcaggagattatgaccttaacatcagtgccactactccatggtttgagtcttacagagaaacctttcttcagtcgatgccagcatcggatcatgaatttctgaaccactatttagcatgtatgttggtagcgtcatctagtgaagctgaacctgtggaacagttttcaaagttgtcacaagaacagcatcgaattcagcacaacagtgattattcctaccccaagtggtttataccaaatacacttaaatactatgtacttttacatgatgtaagtgcaggagatgaacagagagctgaatcaatttatgaagaaatgaaacagaaatatggaactcagggttgctatttacttaaaattaattctcgaacatctaatcgagcatcagatgaacagataccagatccttggagtcagtatctccagaaaaatagtattcaaaaccaggaatcatatgaagatggcccttgtactataacttcaaataagaattctgataataacttgctttcattggatggattagataacgaagtcaaagatggcttaccaaataactttagagctcacccacttcagttggagcaatccagtgacccttctaacagtattgatggcccagatcatctaagatctgcttcatcgttacatgaaacaaagaaaggaaatactggaataattcatggtgcatgtttaacacttactgatcatgatagaattcgacagtttatacaagagttcacatttcggggccttttgccacatatagagaaaacaattaggcaattaaacgatcagctaatatcaagaaaaggtttgagtcgatctctattttctgcaactaaaaaatggtttagtggcagtaaagttccagaaaagagcattaatgacctgaaaaatacatctggcttgctgtatccgccggaagcaccagaacttcaaatcaggaaaatggctgacttatgttttttggtgcagcattatgatttggcttacagttgctatcatactgcaaagaaagattttcttaatgatcaagcaatgctttatgcagctggtgccttggaaatggcagcagtgtctgcttttcttcaaccaggagcacctaggccatatcctgctcattacatggatacagcaattcagacatacagagatatctgcaagaatatggtgttggctgaaagatgtgtgttgcttagtgctgaacttttaaaaagccaaagcaaatattcagaggctgcagctctcctaatacggttgaccagtgaggattctgatcttcgaagtgcacttcttttggaacaggcagcacattgctttataaacatgaaaagtcccatggttagaaaatatgcatttcatatgatattggcaggccatcgatttagtaaagcagggcagaaaaagcatgctttacgctgttattgtcaagccatgcaagtttacaaaggaaaaggctggtctcttgcagaggatcacattaatttcactattgggcgccagtcctatactcttagacagctggataatgctgtgtctgcttttaggcatattctaattaatgaaagtaaacaatctgctgctcaacagggggctttcctcagagaatatctttatgtttacaagaatgtaagtcagctgtcaccagatggtcctttgccacagcttcctttaccgtatattaacagttcagcaacacgggttttttttggccatgacagacgaccagcggatggtgaaaaacaagcagctactcatgtaagtcttgatcaagaatatgattctgaatcctctcagcagtggcgagaacttgaggaacaagttgtttctgtggttaacaaaggagtaattccatccaattttcatcccacacaatactgtttgaacagttactcagataattcaagatttccacttgcagttgtagaagaaccaattacagtggaagtggcttttagaaaccctttgaaagttctacttttgttgactgatttgtcattgctttggaagtttcatcctaaagatttcagtggaaaggataatgaagaagttaaacaactagttacaagtgaacctgaaatgattggagctgaagttatttcagagttcttaattaatggcgaagaatcaaaagtggcaagactaaagctctttccccatcacataggggagctgcatattctgggagttgtttataatcttggcactattcagggctctatgacagtagatggcattggtgctcttcccggatgtcacacaggaaaatattccttgagtatgtcagtccgagggaagcaggatttagaaattcaaggtcctcgacttaacaacacaaaagaagagaaaacatctgttaaatatggccctgatcgacgtttagatcccataatcacagaagaaatgccactgttggaggtgttctttatacattttcctacagggcttctctgtggagaaatccgaaaagcatatgtagaatttgtcaatgtcagcaaatgtccacttactggattgaaggttgtttctaaacgtccagagttctttactttcggtggtaatactgctgttctaacaccactaagtccctcagcttctgagaattgtagtgcttacaagactgttgtgacagatgctacctctgtgtgtacagcactcatatcatcagcttcttctgtagactttggcattggcacaggaagtcaaccagaggtgattcctgttccccttcctgacactgttcttctacccggagcctcagtgcagctgccaatgtggttacgtgggcctgatgaagaaggtgtccatgaaattaactttttgttttactatgaaagtgtcaaaaagcagccaaaaatacggcacagaatattaagacacactgcaattatttgtaccagtcggtctttaaatgtacgggccactgtctgcagaagtaattctcttgaaaatgaagaaggcagaggaggcaatatgctagtctttgtggatgtggaaaataccaatactagtgaagcaggcgttaaggaattccacatagtgcaagtatcaagtagtagcaaacactggaagttacagaaatctgtaaatctttctgaaaacaaagataccaaacttgccagtagggagaagggaaagttttgctttaaggcaataagatgtgagaaagaagaagcggccacacagtcctctgaaaaatatacctttgcagatatcatctttggaaatgaacagataataagttcagcaagcccatgtgcagacttcttttatcgaagtttatcttctgaattgaaaaaaccacaagctcacttgcctgtgcatacagaaaaacagtcaacagaggatgctgtgagattgattcaaaaatgcagtgaggtagatttgaatattgtcatattatggaaggcatacgttgtggaagacagtaaacagcttattttggaaggtcaacatcatgttattcttcgcactataggaaaagaagccttttcatatcctcagaaacaggagccaccagaaatggaactattgaaatttttcaggccagaaaacattacagtttcctcaaggccatcagtagagcagctttctagtctcattaaaacgagtcttcactacccagaatcatttaatcatccatttcatcaaaaaagcctttgtttagtaccagtcactcttttactttccaattgttctaaggctgatgtagatgtcatagttgatcttcggcataaaacaacaagtccagaagcactggaaatccatggatcattcacatggcttggacaaacacagtataaacttcaacttaaaagccaggagattcacagtctgcagctgaaagcatgctttgttcatacaggtgtttataaccttggaactcctagggtatttgccaagttatcggaccaagttacagtgtttgaaacaagtcagcagaattccatgcctgccctgatcatcatcagtaatgtgtgacaacttggaaatttgtactgaaatccacaataatcagtttttgctggatgggttttacagcagtatttgatatacctaacttgttatggaggttgattgatatctgatccctgcaaaatactttgacttgtcattttgttgatgatgcaaagcacgttggactgagaatacttaacattctttttctgtatttctttaaaccctgagaataatttacatgctcataatacaggatatcagcatatttgtgcaccttattaagccccatcttaagaaaacacaaagtctaagtctgctgttacaacttgtcaatggtatacgaatattaggagatgattctgagaaaggaaaggccttgttggcagtactcctgttaagccattagtctctaaattccagctttactgtgaagttctatagagtgttaaatacaaattttcctgtcttgcttcacacagttccttaaaatcagttttgaactttggtcatagagtcttcatatttcagtatttggtggtccctatgacttatacataactttgtaaaaagaaaaaaaaattttttctgatgctttgaatatagttttgaaaggagttttgacttttttcccctcattcatctcagtatagagtgcgctatttcacaatacgatttttgtcattaaaattaccatattctttattatataacgttaactattgagttgatctgtttaaaatataaatctcaagttaattaaaaataagcttttcaaaaatgtattatatttataacaaatatactgtaaatagaataaagacatgctattcactgtaaaaaaaaaaaaaaaaaaaccaaaaaaactttgggggccgcctgggcctcgaaaaggtttttaaaacccttcggtggggggcgggggcccacagaggtacactgtgaccctgggnccacaaggcgtgtcccacaagagaacaccggggacaagagcaaggccgcgggatttttctcaccagtaaaaaaaaacggcgggggggaccccaggggttcctgaacaaattcacaaaggggccaggaggacataaggggactctacaccaggagcgccaaaggaagcggatataagtcc

SEQ ID NO: 450743 - DNA, 6041 bp, Homo sapiens
gcagctgggagtagtactgccggctccagtgcgttcggggccccgcccggccgggccaggccggcgggcggcggcggtagctgctgcagccgcaggataacctcgcagggtgggccggagggcgggcgccgccgctgcctgtgctgcggcgatggcccagtgtgtacaatcagtgcaggagctaatcccggactccttcgtcccctgtgtcgctgcgctgtgcagcgacgaagccgagcggctcactcgtctcaatcacctcagcttcgcggagctgcttaagcccttctcccgcctcacttccgaggttcacatgagagatcctaataatcaacttcacgtaattaaaaatttgaagatagcagtaagcaacattgtcacccagccacctcagcctggagccatccggaagcttttgaatgatgttgtttctggcagtcagcctgcagaaggattagtagctaatgtgattacagcaggagattatgaccttaacatcagtgccactactccatggtttgagtcttacagagaaacctttcttcagtcgatgccagcatcggatcatgaatttctgaaccactatttagcatgtatgttggtagcgtcatctagtgaagctgaacctgtggaacagttttcaaagttgtcacaagaacagcatcgaattcagcacaacagtgattattcctaccccaagtggtttataccaaatacacttaaatactatgtacttttacatgatgtaagtgcaggagatgaacagagagctgaatcaatttatgaagaaatgaaacagaaatatggaactcagggttgctatttacttaaaattaattctcgaacatctaatcgagcatcagatgaacagataccagatccttggagtcagtatctccagaaaaatagtattcaaaaccaggaatcatatgaagatggcccttgtactataacttcaaataagaattctgataataacttgctttcattggatggattagataacgaagtcaaagatggcttaccaaataactttagagctcacccacttcagttggagcaatccagtgacccttctaacagtattgatggcccagatcatctaagatctgcttcatcgttacatgaaacaaagaaaggaaatactggaataattcatggtgcatgtttaacacttactgatcatgatagaattcgacagtttatacaagagttcacatttcggggccttttgccacatatagagaaaacaattaggcaattaaacgatcagctaatatcaagaaaaggtttgagtcgatctctattttctgcaactaaaaaatggtttagtggcagtaaagttccagaaaagagcattaatgacctgaaaaatacatctggcttgctgtatccgccggaagcaccagaacttcaaatcaggaaaatggctgacttatgttttttggtgcagcattatgatttggcttacagttgctatcatactgcaaagaaagattttcttaatgatcaagcaatgctttatgcagctggtgccttggaaatggcagcagtgtctgcttttcttcaaccaggagcacctaggccatatcctgctcattacatggatacagcaattcagacatacagagatatctgcaagaatatggtgttggctgaaagatgtgtgttgcttagtgctgaacttttaaaaagccaaagcaaatattcagaggctgcagctctcctaatacggttgaccagtgaggattctgatcttcgaagtgcacttcttttggaacaggcagcacattgctttataaacatgaaaagtcccatggttagaaaatatgcatttcatatgatattggcaggccatcgatttagtaaagcagggcagaaaaagcatgctttacgctgttattgtcaagccatgcaagtttacaaaggaaaaggctggtctcttgcagaggatcacattaatttcactattgggcgccagtcctatactcttagacagctggataatgctgtgtctgcttttaggcatattctaattaatgaaagtaaacaatctgctgctcaacagggggctttcctcagagaatatctttatgtttacaagaatgtaagtcagctgtcaccagatggtcctttgccacagcttcctttaccgtatattaacagttcagcaacacgggttttttttggccatgacagacgaccagcggatggtgaaaaacaagcagctactcatgtaagtcttgatcaagaatatgattctgaatcctctcagcagtggcgagaacttgaggaacaagttgtttctgtggttaacaaaggagtaattccatccaattttcatcccacacaatactgtttgaacagttactcagataattcaagatttccacttgcagttgtagaagaaccaattacagtggaagtggcttttagaaaccctttgaaagttctacttttgttgactgatttgtcattgctttggaagtttcatcctaaagatttcagtggaaaggataatgaagaagttaaacaactagttacaagtgaacctgaaatgattggagctgaagttatttcagagttcttaattaatggcgaagaatcaaaagtggcaagactaaagctctttccccatcacataggggagctgcatattctgggagttgtttataatcttggcactattcagggctctatgacagtagatggcattggtgctcttcccggatgtcacacaggaaaatattccttgagtatgtcagtccgagggaagcaggatttagaaattcaaggtcctcgacttaacaacacaaaagaagagaaaacatctgttaaatatggccctgatcgacgtttagatcccataatcacagaagaaatgccactgttggaggtgttctttatacattttcctacagggcttctctgtggagaaatccgaaaagcatatgtagaatttgtcaatgtcagcaaatgtccacttactggattgaaggttgtttctaaacgtccagagttctttactttcggtggtaatactgctgttctaacaccactaagtccctcagcttctgagaattgtagtgcttacaagactgttgtgacagatgctacctctgtgtgtacagcactcatatcatcagcttcttctgtagactttggcattggcacaggaagtcaaccagaggtgattcctgttccccttcctgacactgttcttctacccggagcctcagtgcagctgccaatgtggttacgtgggcctgatgaagaaggtgtccatgaaattaactttttgttttactatgaaagtgtcaaaaagcagccaaaaatacggcacagaatattaagacacactgcaattatttgtaccagtcggtctttaaatgtacgggccactgtctgcagaagtaattctcttgaaaatgaagaaggcagaggaggcaatatgctagtctttgtggatgtggaaaataccaatactagtgaagcaggcgttaaggaattccacatagtgcaagtatcaagtagtagcaaacactggaagttacagaaatctgtaaatctttctgaaaacaaagataccaaacttgccagtagggagaagggaaagttttgctttaaggcaataagatgtgagaaagaagaagcggccacacagtcctctgaaaaatatacctttgcagatatcatctttggaaatgaacagataataagttcagcaagcccatgtgcagacttcttttatcgaagtttatcttctgaattgaaaaaaccacaagctcacttgcctgtgcatacagaaaaacagtcaacagaggatgctgtgagattgattcaaaaatgcagtgaggtagatttgaatattgtcatattatggaaggcatacgttgtggaagacagtaaacagcttattttggaaggtcaacatcatgttattcttcgcactataggaaaagaagccttttcatatcctcagaaacaggagccaccagaaatggaactattgaaatttttcaggccagaaaacattacagtttcctcaaggccatcagtagagcagctttctagtctcattaaaacgagtcttcactacccagaatcatttaatcatccatttcatcaaaaaagcctttgtttagtaccagtcactcttttactttccaattgttctaaggctgatgtagatgtcatagttgatcttcggcataaaacaacaagtccagaagcactggaaatccatggatcattcacatggcttggacaaacacagtataaacttcaacttaaaagccaggagattcacagtctgcagctgaaagcatgctttgttcatacaggtgtttataaccttggaactcctagggtatttgccaagttatcggaccaagttacagtgtttgaaacaagtcagcagaattccatgcctgccctgatcatcatcagtaatgtgtgacaacttggaaatttgtactgaaatccacaataatcagtttttgctggatgggttttacagcagtatttgatatacctaacttgttatggaggttgattgatatctgatccctgcaaaatactttgacttgtcattttgttgatgatgcaaagcacgttggactgagaatacttaacattctttttctgtatttctttaaaccctgagaataatttacatgctcataatacaggatatcagcatatttgtgcaccttattaagccccatcttaagaaaacacaaagtctaagtctgctgttacaacttgtcaatggtatacgaatattaggagatgattctgagaaaggaaaggccttgttggcagtactcctgttaagccattagtctctaaattccagctttactgtgaagttctatagagtgttaaatacaaattttcctgtcttgcttcacacagttccttaaaatcagttttgaactttggtcatagagtcttcatatttcagtatttggtggtccctatgacttatacataactttgtaaaaagaaaaaaaaattttttctgatgctttgaatatagttttgaaaggagttttgacttttttcccctcattcatctcagtatagagtgcgctatttcacaatacgatttttgtcattaaaattaccatattctttattatataacgttaactattgagttgatctgtttaaaatataaatctcaagttaattaaaaataagcttttcaaaaatgtattatatttataacaaatatactgtaaatagaataaagacatgctattcactgtatagcgtattagtatctgttgattagaaagtctggtttcaaaatatttttttattcagagaatgggcatttggacataagaaatttcaattcagccctgctgcagatagagaaatgggagcaaggttgtttcaatgaatatctcttgtcattggagaaggagggaagacagggtgtaggagtgggtggcagggagtacaagagccagggtcagtcaagtctggagcagatggggtccttgtgccattgacagctaccatggtttgttccagtctcaatctcggcactaatcggagcagactgcaccaaagtggggagagatcaaaagaccccgttttcagactgaagattccaaacctgtacttggaacaactcttcttgagagatgggtggctagtctgtgtgcctctctgcaactgctgcttatgcttctggatcttaagtgggtctctggcttttcagctccttccactctgtgtcttagcaggtgtgggacaagttggagaggaaggtcacattctaaggacactcatttccttcttgagagtttagggccatgggcttataaaaagtctgaggaggaaagacaagaatgaggaggcataatcacagtggtatctcatatttaaaccactcagctgaatattaaattgaaccgattgttaaacagacactaataaaaaaattaaactatataaacctacaactgaatatattaaaaataaaggtaataaagcactcaaaattacttcctgaatattactcagga

SEQ ID NO: 450744 - DNA, 5204 bp, Homo sapiens
  misc_feature (5118)..(5119): n is a, c, g, or t
  misc_feature (5204)..(5204): n is a, c, g, or t
gcagctgggagtagtactgccggctccagtgcgttcggggccccgcccggccgggccaggccggcgggcggcggcggtagctgctgcagccgcaggataacctcgcagggtgggccggagggcgggcgccgccgctgcctgtgctgcggcgatggcccagtgtgtacaatcagtgcaggagctaatcccggactccttcgtcccctgtgtcgctgcgctgtgcagcgacgaagccgagcggctcactcgtctcaatcacctcagcttcgcggagctgcttaagcccttctcccgcctcacttccgaggttcacatgagagatcctaataatcaacttcacgtaattaaaaatttgaagatagcagtaagcaacattgtcacccagccacctcagcctggagccatccggaagcttttgaatgatgttgtttctggcagtcagcctgcagaaggattagtagctaatgtgattacagcaggagattatgaccttaacatcagtgccactactccatggtttgagtcttacagagaaacctttcttcagtcgatgccagcatcggatcatgaatttctgaaccactatttagcatgtatgttggtagcgtcatctagtgaagctgaacctgtggaacagttttcaaagttgtcacaagaacagcatcgaattcagcacaacagtgattattcctaccccaagtggtttataccaaatacacttaaatactatgtacttttacatgatgtaagtgcaggagatgaacagagagctgaatcaatttatgaagaaatgaaacagaaatatggaactcagggttgctatttacttaaaattaattctcgaacatctaatcgagcatcagatgaacagataccagatccttggagtcagtatctccagaaaaatagtattcaaaaccaggaatcatatgaagatggcccttgtactataacttcaaataagaattctgataataacttgctttcattggatggattagataacgaagtcaaagatggcttaccaaataactttagagctcacccacttcagttggagcaatccagtgacccttctaacagtattgatggcccagatcatctaagatctgcttcatcgttacatgaaacaaagaaaggaaatactggaataattcatggtgcatgtttaacacttactgatcatgatagaattcgacagtttatacaagagttcacatttcggggccttttgccacatatagagaaaacaattaggcaattaaacgatcagctaatatcaagaaaaggtttgagtcgatctctattttctgcaactaaaaaatggtttagtggcagtaaagttccagaaaagagcattaatgacctgaaaaatacatctggcttgctgtatccgccggaagcaccagaacttcaaatcaggaaaatggctgacttatgttttttggtgcagcattatgatttggcttacagttgctatcatactgcaaagaaagattttcttaatgatcaagcaatgctttatgcagctggtgccttggaaatggcagcagtgtctgcttttcttcaaccaggagcacctaggccatatcctgctcattacatggatacagcaattcagacatacagagatatctgcaagaatatggtgttggctgaaagatgtgtgttgcttagtgctgaacttttaaaaagccaaagcaaatattcagaggctgcagctctcctaatacggttgaccagtgaggattctgatcttcgaagtgcacttcttttggaacaggcagcacattgctttataaacatgaaaagtcccatggttagaaaatatgcatttcatatgatattggcaggccatcgatttagtaaagcagggcagaaaaagcatgctttacgctgttattgtcaagccatgcaagtttacaaaggaaaaggctggtctcttgcagaggatcacattaatttcactattgggcgccagtcctatactcttagacagctggataatgctgtgtctgcttttaggcatattctaattaatgaaagtaaacaatctgctgctcaacagggggctttcctcagagaatatctttatgtttacaagaatgtaagtcagctgtcaccagatggtcctttgccacagcttcctttaccgtatattaacagttcagcaacacgggttttttttggccatgacagacgaccagcggatggtgaaaaacaagcagctactcatgtaagtcttgatcaagaatatgattctgaatcctctcagcagtggcgagaacttgaggaacaagttgtttctgtggttaacaaaggagtaattccatccaattttcatcccacacaatactgtttgaacagttactcagataattcaagatttccacttgcagttgtagaagaaccaattacagtggaagtggcttttagaaaccctttgaaagttctacttttgttgactgatttgtcattgctttggaagtttcatcctaaagatttcagtggaaaggataatgaagaagttaaacaactagttacaagtgaacctgaaatgattggagctgaagttatttcagagttcttaattaatggcgaagaatcaaaagtggcaagactaaagctctttccccatcacataggggagctgcatattctgggagttgtttataatcttggcactattcagggctctatgacagtagatggcattggtgctcttcccggatgtcacacaggaaaatattccttgagtatgtcagtccgagggaagcaggatttagaaattcaaggtcctcgacttaacaacacaaaagaagagaaaacatctgttaaatatggccctgatcgacgtttagatcccataatcacagaagaaatgccactgttggaggtgttctttatacattttcctacagggcttctctgtggagaaatccgaaaagcatatgtagaatttgtcaatgtcagcaaatgtccacttactggattgaaggttgtttctaaacgtccagagttctttactttcggtggtaatactgctgttctaacaccactaagtccctcagcttctgagaattgtagtgcttacaagactgttgtgacagatgctacctctgtgtgtacagcactcatatcatcagcttcttctgtagactttggcattggcacaggaagtcaaccagaggtgattcctgttccccttcctgacactgttcttctacccggagcctcagtgcagctgccaatgtggttacgtgggcctgatgaagaaggtgtccatgaaattaactttttgttttactatgaaagtgtcaaaaagcagccaaaaatacggcacagaatattaagacacactgcaattatttgtaccagtcggtctttaaatgtacgggccactgtctgcagaagtaattctcttgaaaatgaagaaggcagaggaggcaatatgctagtctttgtggatgtggaaaataccaatactagtgaagcaggcgttaaggaattccacatagtgcaagtatcaagtagtagcaaacactggaagttacagaaatctgtaaatctttctgaaaacaaagataccaaacttgccagtagggagaagggaaagttttgctttaaggcaataagatgtgagaaagaagaagcggccacacagtcctctgaaaaatatacctttgcagatatcatctttggaaatgaacagataataagttcagcaagcccatgtgcagacttcttttatcgaagtttatcttctgaattgaaaaaaccacaagctcacttgcctgtgcatacagaaaaacagtcaacagaggatgctgtgagattgattcaaaaatgcagtgaggtagatttgaatattgtcatattatggaaggcatacgttgtggaagacagtaaacagcttattttggaaggtcaacatcatgttattcttcgcactataggaaaagaagccttttcatatcctcagaaacaggagccaccagaaatggaactattgaaatttttcaggccagaaaacattacagtttcctcaaggccatcagtagagcagctttctagtctcattaaaacgagtcttcactacccagaatcatttaatcatccatttcatcaaaaaagcctttgtttagtaccagtcactcttttactttccaattgttctaaggctgatgtagatgtcatagttgatcttcggcataaaacaacaagtccagaagcactggaaatccatggatcattcacatggcttggacaaacacagtataaacttcaacttaaaagccaggagattcacagtctgcagctgaaagcatgctttgttcatacaggtgtttataaccttggaactcctagggtatttgccaagttatcggaccaagttacagtgtttgaaacaagtcagcagaattccatgcctgccctgatcatcatcagtaatgtgtgacaacttggaaatttgtactgaaatccacaataatcagtttttgctggatgggttttacagcagtatttgatatacctaacttgttatggaggttgattgatatctgatccctgcaaaatactttgacttgtcattttgttgatgatgcaaagcacgttggactgagaatacttaacattctttttctgtatttctttaaaccctgagaataatttacatgctcataatacaggatatcagcatatttgtgcaccttattaagccccatcttaagaaaacacaaagtctaagtctgctgttacaacttgtcaatggtatacgaatattaggagatgattctgagaaaggaaaggccttgttggcagtactcctgttaagccattagtctctaaattccagctttactgtgaagttctatagagtgttaaatacaaattttcctgtcttgcttcacacagttccttaaaatcagttttgaactttggtcatagagtcttcatatttcagtatttggtggtccctatgacttatacataactttgtaaaaagaaaaaaaaaaaacttgagactagctcgtgccgatattttttagcagttctaatggtgcccatttatcctgacctaaccagttatttaaataattttttaaaccaccacgnntaataaatggcatgtgaactgatctgttggtaactggaagaaaactcagcatctgtatttatacaataaaattgattagtttttn

SEQ ID NO: 450745 - DNA, 1870 bp, Homo sapiens
  misc_feature (1691)..(1691): n is a, c, g, or t
tttgatagaaaaacaaatgtcagtctaggccaagttctcaaaattaagtaatttttaataagcacaaagacaacagtattagttgttggcattttcatggtttactttttcttcattgatctaagttgagattttgtttttcattttgtgaaatatctagaaacattttagttgtttttagaagattaataaatgaaaataaaatagttctgtgaatgtatatattctgatatttaatattgtcattgtattaatatattttttatttacaatataatttgtcttgagtgattttggaacttgagctttttccttcttgaatctgattgtttttaaggagcttatgctctgttacatagtcttaagtgttattttcaggaaaattgcttttaagaagaaaaaaatatataacttttttgtttatttttcttccatagcctttgtttagtaccagtcactcttttactttccaattgttctaaggctgatgtagatgtcatagttgatcttcggcataaaacaacaagtccagaagcactggaaatccatggatcattcacatggcttggacaaacacagtataaacttcaacttaaaagccaggagattcacagtctgcagctgaaagcatgctttgttcatacaggtgtttataaccttggaactcctagggtatttgccaagttatcggaccaagttacagtgtttgaaacaagtcagcagaattccatgcctgccctgatcatcatcagtaatgtgtgacaacttggaaatttgtactgaaatccacaataatcagtttttgctggatgggttttacagcagtatttgatatacctaacttgttatggaggttgattgatatctgatccctgcaaaatactttgacttgtcattttgttgatgatgcaaagcacgttggactgagaatacttaacattctttttctgtatttctttaaaccctgagaataatttacatgctcataatacaggatatcagcatatttgtgcaccttattaagccccatcttaagaaaacacaaagtctaagtctgctgttacaacttgtcaatggtatacgaatattaggagatgattctgagaaaggaaaggccttgttggcagtactcctgttaagccattagtctctaaattccagctttactgtgaagttctatagagtgttaaatacaaattttcctgtcttgcttcacacagttccttaaaatcagttttgaactttggtcatagagtcttcatatttcagtatttggtggtccctatgacttatacataactttgtaaaaagaaaaaaaaattttttctgatgctttgaatatagttttgaaaggagttttgacttttttcccctcattcatctcagtatagagtgcgctatttcacaatacgatttttgtcattaaaattaccatattctttattatataacgttaactattgagttgatctgtttaaaatataaatctcaagttaattaaaaataagcttttcaaaaatgtattatatttataacaaatatactgtaaatagaataaagacatgctattcactgtaaaaaaaaaaaaaaaaaaaccaaaaaaactttgggggccgcctgggcctcgaaaaggtttttaaaacccttcggtggggggcgggggcccacagaggtacactgtgaccctgggnccacaaggcgtgtcccacaagagaacaccggggacaagagcaaggccgcgggatttttctcaccagtaaaaaaaaacggcgggggggaccccaggggttcctgaacaaattcacaaaggggccaggaggacataaggggactctacaccaggagcgccaaaggaagcggatataagtcc

SEQ ID NO: 450746 - DNA, 1409 bp, Homo sapiens
  misc_feature (1230)..(1230): n is a, c, g, or t
caaatttccaagttgtcacacattactgatgatgatcagggcaggcatggaattctgctgacttgttccagaagcactggaaatccatggatcattcacatggcttggacaaacacagtataaacttcaacttaaaagccaggagattcacagtctgcagctgaaagcatgctttgttcatacaggtgtttataaccttggaactcctagggtatttgccaagttatcggaccaagttacagtgtttgaaacaagtcagcagaattccatgcctgccctgatcatcatcagtaatgtgtgacaacttggaaatttgtactgaaatccacaataatcagtttttgctggatgggttttacagcagtatttgatatacctaacttgttatggaggttgattgatatctgatccctgcaaaatactttgacttgtcattttgttgatgatgcaaagcacgttggactgagaatacttaacattctttttctgtatttctttaaaccctgagaataatttacatgctcataatacaggatatcagcatatttgtgcaccttattaagccccatcttaagaaaacacaaagtctaagtctgctgttacaacttgtcaatggtatacgaatattaggagatgattctgagaaaggaaaggccttgttggcagtactcctgttaagccattagtctctaaattccagctttactgtgaagttctatagagtgttaaatacaaattttcctgtcttgcttcacacagttccttaaaatcagttttgaactttggtcatagagtcttcatatttcagtatttggtggtccctatgacttatacataactttgtaaaaagaaaaaaaaattttttctgatgctttgaatatagttttgaaaggagttttgacttttttcccctcattcatctcagtatagagtgcgctatttcacaatacgatttttgtcattaaaattaccatattctttattatataacgttaactattgagttgatctgtttaaaatataaatctcaagttaattaaaaataagcttttcaaaaatgtattatatttataacaaatatactgtaaatagaataaagacatgctattcactgtaaaaaaaaaaaaaaaaaaaccaaaaaaactttgggggccgcctgggcctcgaaaaggtttttaaaacccttcggtggggggcgggggcccacagaggtacactgtgaccctgggnccacaaggcgtgtcccacaagagaacaccggggacaagagcaaggccgcgggatttttctcaccagtaaaaaaaaacggcgggggggaccccaggggttcctgaacaaattcacaaaggggccaggaggacataaggggactctacaccaggagcgccaaaggaagcggatataagtcc

SEQ ID NO: 450747 - DNA, 1081 bp, Homo sapiens
  misc_feature (902)..(902): n is a, c, g, or t
gacccacgcgtccgtaggagatgattctgagaaaggaaaggccttgttggcagtactcctgttaagccattagtctctgatccctgcaaaatactttgacttgtcattttgttgatgatgcaaagcacgttggactgagaatacttaacattctttttctgtatttctttaaaccctgagaataatttacatgctcataatacaggatatcagcatatttgtgcaccttattaagccccatcttaagaaaacacaaagtctaagtctgctgttacaacttgtcaatggtatacgaatattaggagatgattctgagaaaggaaaggccttgttggcagtactcctgttaagccattagtctctaaattccagctttactgtgaagttctatagagtgttaaatacaaattttcctgtcttgcttcacacagttccttaaaatcagttttgaactttggtcatagagtcttcatatttcagtatttggtggtccctatgacttatacataactttgtaaaaagaaaaaaaaattttttctgatgctttgaatatagttttgaaaggagttttgacttttttcccctcattcatctcagtatagagtgcgctatttcacaatacgatttttgtcattaaaattaccatattctttattatataacgttaactattgagttgatctgtttaaaatataaatctcaagttaattaaaaataagcttttcaaaaatgtattatatttataacaaatatactgtaaatagaataaagacatgctattcactgtaaaaaaaaaaaaaaaaaaaccaaaaaaactttgggggccgcctgggcctcgaaaaggtttttaaaacccttcggtggggggcgggggcccacagaggtacactgtgaccctgggnccacaaggcgtgtcccacaagagaacaccggggacaagagcaaggccgcgggatttttctcaccagtaaaaaaaaacggcgggggggaccccaggggttcctgaacaaattcacaaaggggccaggaggacataaggggactctacaccaggagcgccaaaggaagcggatataagtcc

SEQ ID NO: 450748 - DNA, 2897 bp, Homo sapiens
gcagctgggagtagtactgccggctccagtgcgttcggggccccgcccggccgggccaggccggcgggcggcggcggtagctgctgcagccgcaggataacctcgcagggtgggccggagggcgggcgccgccgctgcctgtgctgcggcgatggcccagtgtgtacaatcagtgcaggagctaatcccggactccttcgtcccctgtgtcgctgcgctgtgcagcgacgaagccgagcggctcactcgtctcaatcacctcagcttcgcggagctgcttaagcccttctcccgcctcacttccgaggttcacatgagagatcctaataatcaacttcacgtaattaaaaatttgaagatagcagtaagcaacattgtcacccagccacctcagcctggagccatccggaagcttttgaatgatgttgtttctggcagtcagcctgcagaaggattagtagctaatgtgattacagcaggagattatgaccttaacatcagtgccactactccatggtttgagtcttacagagaaacctttcttcagtcgatgccagcatcggatcatgaatttctgaaccactatttagcatgtatgttggtagcgtcatctagtgaagctgaacctgtggaacagttttcaaagttgtcacaagaacagcatcgaattcagcacaacagtgattattcctaccccaagtggtttataccaaatacacttaaatactatgtacttttacatgatgtaagtgcaggagatgaacagagagctgaatcaatttatgaagaaatgaaacagaaatatggaactcagggttgctatttacttaaaattaattctcgaacatctaatcgagcatcagatgaacagataccagatccttggagtcagtatctccagaaaaatagtattcaaaaccaggaatcatatgaagatggcccttgtactataacttcaaataagaattctgataataacttgctttcattggatggattagataacgaagtcaaagatggcttaccaaataactttagagctcacccacttcagttggagcaatccagtgacccttctaacagtattgatggcccagatcatctaagatctgcttcatcgttacatgaaacaaagaaaggaaatactggaataattcatggtgcatgtttaacacttactgatcatgatagaattcgacagtttatacaagagttcacatttcggggccttttgccacatatagagaaaacaattaggcaattaaacgatcagctaatatcaagaaaaggtttgagtcgatctctattttctgcaactaaaaaatggtttagtggcagtaaagttccagaaaagagcattaatgacctgaaaaatacatctggcttgctgtatccgccggaagcaccagaacttcaaatcaggaaaatggctgacttatgttttttggtgcagcattatgatttggcttacagttgctatcatactgcaaagaaagattttcttaatgatcaagcaatgctttatgcagctggtgccttggaaatggcagcagtgtctgcttttcttcaaccaggagcacctaggccatatcctgctcattacatggatacagcaattcagacatacagagatatctgcaagaatatggtgttggctgaaagatgtgtgttgcttagtgctgaacttttaaaaagccaaagcaaatattcagaggctgcagctctcctaatacggttgaccagtgaggattctgatcttcgaagtgcacttcttttggaacaggcagcacattgctttataaacatgaaaagtcccatggttagaaaatatgcatttcatatgatattggcaggccatcgatttagtaaagcagggcagaaaaagcatgctttacgctgttattgtcaagccatgcaagtttacaaaggaaaaggctggtctcttgcagaggatcacattaatttcactattgggcgccagtcctatactcttagacagctggataatgctgtgtctgcttttaggcatattctaattaatgaaagtaaacaatctgctgctcaacagggggctttcctcagagaatatctttatgtttacaagaatgtaagtcagctgtcaccagatggtcctttgccacagcttcctttaccgtatattaacagttcagcaacacgggttttttttggccatgacagacgaccagcggatggtgaaaaacaagcagctactcatgtaagtcttgatcaagaatatgattctgaatcctctcagcagtggcgagaacttgaggaacaagttgtttctgtggttaacaaaggagtaattccatccaattttcatcccacacaatactgtttgaacagttactcagataattcaagatttccacttgcagttgtagaagaaccaattacagtggaagtggcttttagaaaccctttgaaagttctacttttgttgactgatttgtcattgctttggaagtttcatcctaaagatttcagtggaaaggataatgaagaagttaaacaactagtaagttattaaaaggtatttgtaattatgtttcagctacagcctaacaaatgctgtagtaacatttcaatgtactctgttcagtgagctatacttctttttggtttatttttccttagttataaaaattatgatatgtacttatttttgaaaattgaaaatacataaaaacataaggaatagaagtgaaaccatctgtcttcataatatttagaaataaccactttaacattttgctgtgtatctttccagtcattttgtttttattttttttttttttgagacagagtctcacgctgttgcccaggctggagtgcagtggcgccatctcggctcactgcaacctctgcctcccagg

SEQ ID NO: 450749 - DNA, 511 bp, Homo sapiens
acagggggctttcctcagagaatatctttatgtttacaaggtgactgcttattttcattcaggaatagatattaaaactgtattttagtgtgaaagtatttatttattaccatatcttacgatagttttattagaatatatgtagttatcagtcataaaaaagctgtggcaggctaggctttttggctatagatcttggttacattgccccttccacagttcttgaaaagagaattttaatattacaatgaacacttgatttgtggctgttcttagaatcttaaaaaaaaaaaagattccacaggttttctggattctttattcatcatgcttttatagactcacaactgattttacagttggttttaagtgggttctctttaccatcctttggagatggacattctatgttcttttccttgtgaaagatgagggggtatggatctgtggaaagtagacaggctattatggtgcaatggagaaaaattaacaggaagaaggactgtttcac

SEQ ID NO: 450750 - DNA, 444 bp, Homo sapiens
aacacgggttttttttggccatgacagacgaccagcggatggttagtaaagttttatttagcctaattacctaatgacaatttaaaaaaaacttcttttcctttctccatttaaaaaacgatgtatagttgaatatttgaaaattaatagctcagccgggtacgattggctcatgcctgtaatcccagcactttgggaggctgaggccggcagatcatgaggtcaggagatcgagaccatcctggctaacatggtgaaaccccatctctactaaaaatacaaaaaattagctgggcgtggtggcacatgcttgtagtcccatcaactcaagaggctgaggtaggagaatggcgtgaacccgggaggcggaggttgcagtgagctgagatcacgacactgcactccagcctgggcgacagagtgaaactttgtctcaaaaaaaaa

SEQ ID NO: 450751 - DNA, 367 bp, Homo sapiens
ttacattgtagtaggtattataagtaatatagagattatttaaattatataagaggatgtgtatgggttaataggcaaatgctatacaattttatataaggaacttgacaaaccttggattttagtatcctggagggtcctggaaccatctccctgcaactatcctctaaaactgtaattggaatcttttgctgaacacatttactttgatgtgctaaggtattattgtgctattttatcttcttgtccttttttctataggaatatggtgttggctgaaagatgtgtgttgcttagtgctgaacttttaaaaagccaaagcaaatattcagaggctgcagctctcctaatacggttgaccagtgag

SEQ ID NO: 450752 - DNA, 5012 bp, Homo sapiens
gcagctgggagtagtactgccggctccagtgcgttcggggccccgcccggccgggccaggccggcgggcggcggcggtagctgctgcagccgcaggataacctcgcagggtgggccggagggcgggcgccgccgctgcctgtgctgcggcgatggcccagtgtgtacaatcagtgcaggagctaatcccggactccttcgtcccctgtgtcgctgcgctgtgcagcgacgaagccgagcggctcactcgtctcaatcacctcagcttcgcggagctgcttaagcccttctcccgcctcacttccgaggttcacatgagagatcctaataatcaacttcacgtaattaaaaatttgaagatagcagtaagcaacattgtcacccagccacctcagcctggagccatccggaagcttttgaatgatgttgtttctggcagtcagcctgcagaaggattagtagctaatgtgattacagcaggagattatgaccttaacatcagtgccactactccatggtttgagtcttacagagaaacctttcttcagtcgatgccagcatcggatcatgaatttctgaaccactatttagcatgtatgttggtagcgtcatctagtgaagctgaacctgtggaacagttttcaaagttgtcacaagaacagcatcgaattcagcacaacagtgattattcctaccccaagtggtttataccaaatacacttaaatactatgtacttttacatgatgtaagtgcaggagatgaacagagagctgaatcaatttatgaagaaatgaaacagaaatatggaactcagggttgctatttacttaaaattaattctcgaacatctaatcgagcatcagatgaacagataccagatccttggagtcagtatctccagaaaaatagtattcaaaaccaggaatcatatgaagatggcccttgtactataacttcaaataagaattctgataataacttgctttcattggatggattagataacgaagtcaaagatggcttaccaaataactttagagctcacccacttcagttggagcaatccagtgacccttctaacagtattgatggcccagatcatctaagatctgcttcatcgttacatgaaacaaagaaaggaaatactggaataattcatggtgcatgtttaacacttactgatcatgatagaattcgacagtttatacaagagttcacatttcggggccttttgccacatatagagaaaacaattaggcaattaaacgatcagctaatatcaagaaaaggtttgagtcgatctctattttctgcaactaaaaaatggtttagtggcagtaaagttccagaaaagagcattaatgacctgaaaaatacatctggcttgctgtatccgccggaagcaccagaacttcaaatcaggaaaatggctgacttatgttttttggtgcagcattatgatttggcttacagttgctatcatactgcaaagaaagattttcttaatgatcaagcaatgctttatgcagctggtgccttggaaatggcagcagtgtctgcttttcttcaaccaggagcacctaggccatatcctgctcattacatggatacagcaattcagacatacagagatatctgcaagaatatggtgttggctgaaagatgtgtgttgcttagtgctgaacttttaaaaagccaaagcaaatattcagaggctgcagctctcctaatacggttgaccagtgaggattctgatcttcgaagtgcacttcttttggaacaggcagcacattgctttataaacatgaaaagtcccatggttagaaaatatgcatttcatatgatattggcaggccatcgatttagtaaagcagggcagaaaaagcatgctttacgctgttattgtcaagccatgcaagtttacaaaggaaaaggctggtctcttgcagaggatcacattaatttcactattgggcgccagtcctatactcttagacagctggataatgctgtgtctgcttttaggcatattctaattaatgaaagtaaacaatctgctgctcaacagggggctttcctcagagaatatctttatgtttacaagaatgtaagtcagctgtcaccagatggtcctttgccacagcttcctttaccgtatattaacagttcagcaacacgggttttttttggccatgacagacgaccagcggatggtgaaaaacaagcagctactcatgtaagtcttgatcaagaatatgattctgaatcctctcagcagtggcgagaacttgaggaacaagttgtttctgtggttaacaaaggagtaattccatccaattttcatcccacacaatactgtttgaacagttactcagataattcaagatttccacttgcagttgtagaagaaccaattacagtggaagtggcttttagaaaccctttgaaagttctacttttgttgactgatttgtcattgctttggaagtttcatcctaaagatttcagtggaaaggataatgaagaagttaaacaactagttacaagtgaacctgaaatgattggagctgaagttatttcagagttcttaattaatggcgaagaatcaaaagtggcaagactaaagctctttccccatcacataggggagctgcatattctgggagttgtttataatcttggcactattcagggctctatgacagtagatggcattggtgctcttcccggatgtcacacaggaaaatattccttgagtatgtcagtccgagggaagcaggatttagaaattcaaggtcctcgacttaacaacacaaaagaagagaaaacatctgttaaatatggccctgatcgacgtttagatcccataatcacagaagaaatgccactgttggagactttggcattggcacaggaagtcaaccagaggtgattcctgttccccttcctgacactgttcttctacccggagcctcagtgcagctgccaatgtggttacgtgggcctgatgaagaaggtgtccatgaaattaactttttgttttactatgaaagtgtcaaaaagcagccaaaaatacggcacagaatattaagacacactgcaattatttgtaccagtcggtctttaaatgtacgggccactgtctgcagaagtaattctcttgaaaatgaagaaggcagaggaggcaatatgctagtctttgtggatgtggaaaataccaatactagtgaagcaggcgttaaggaattccacatagtgcaagtatcaagtagtagcaaacactggaagttacagaaatctgtaaatctttctgaaaacaaagataccaaacttgccagtagggagaagggaaagttttgctttaaggcaataagatgtgagaaagaagaagcggccacacagtcctctgaaaaatatacctttgcagatatcatctttggaaatgaacagataataagttcagcaagcccatgtgcagacttcttttatcgaagtttatcttctgaattgaaaaaaccacaagctcacttgcctgtgcatacagaaaaacagtcaacagaggatgctgtgagattgattcaaaaatgcagtgaggtagatttgaatattgtcatattatggaaggcatacgttgtggaagacagtaaacagcttattttggaaggtcaacatcatgttattcttcgcactataggaaaagaagccttttcatatcctcagaaacaggagccaccagaaatggaactattgaaatttttcaggccagaaaacattacagtttcctcaaggccatcagtagagcagctttctagtctcattaaaacgagtcttcactacccagaatcatttaatcatccatttcatcaaaaaagcctttgtttagtaccagtcactcttttactttccaattgttctaaggctgatgtagatgtcatagttgatcttcggcataaaacaacaagtccagaagcactggaaatccatggatcattcacatggcttggacaaacacagtataaacttcaacttaaaagccaggagattcacagtctgcagctgaaagcatgctttgttcatacaggtgtttataaccttggaactcctagggtatttgccaagttatcggaccaagttacagtgtttgaaacaagtcagcagaattccatgcctgccctgatcatcatcagtaatgtgtgacaacttggaaatttgtactgaaatccacaataatcagtttttgctggatgggttttacagcagtatttgatatacctaacttgttatggaggttgattgatatctgatccctgcaaaatactttgacttgtcattttgttgatgatgcaaagcacgttggactgagaatacttaacattctttttctgtatttctttaaaccctgagaataatttacatgctcataatacaggatatcagcatatttgtgcaccttattaagccccatcttaagaaaacacaaagtctaagtctgctgttacaacttgtcaatggtatacgaatattaggagatgattctgagaaaggaaaggccttgttggcagtactcctgttaagccattagtctctaaattccagctttactgtgaagttctatagagtgttaaatacaaattttcctgtcttgcttcacacagttccttaaaatcagttttgaactttggtcatagagtcttcatatttcagtatttggtggtccctatgacttatacataactttgtaaaaagaaaaaaaaattttttctgatgctttgaatatagttttgaaaggagttttgacttttttcccctcattcatctcagtatagagtgcgctatttcacaatacgatttttgtcattaaaattaccatattctttattatataacgttaactattgagttgatctgtttaaaatataaatctcaagttaattaaaaataagcttttcaaaaatgtattatatttataacaaatatactgtaaatagaataaagacatgctattcactgta

SEQ ID NO: 450753 - DNA, 5274 bp, Homo sapiens
gcagctgggagtagtactgccggctccagtgcgttcggggccccgcccggccgggccaggccggcgggcggcggcggtagctgctgcagccgcaggataacctcgcagggtgggccggagggcgggcgccgccgctgcctgtgctgcggcgatggcccagtgtgtacaatcagtgcaggagctaatcccggactccttcgtcccctgtgtcgctgcgctgtgcagcgacgaagccgagcggctcactcgtctcaatcacctcagcttcgcggagctgcttaagcccttctcccgcctcacttccgaggttcacatgagagatcctaataatcaacttcacgtaattaaaaatttgaagatagcagtaagcaacattgtcacccagccacctcagcctggagccatccggaagcttttgaatgatgttgtttctggcagtcagcctgcagaaggattagtagctaatgtgattacagcaggagattatgaccttaacatcagtgccactactccatggtttgagtcttacagagaaacctttcttcagtcgatgccagcatcggatcatgaatttctgaaccactatttagcatgtatgttggtagcgtcatctagtgaagctgaacctgtggaacagttttcaaagttgtcacaagaacagcatcgaattcagcacaacagtgattattcctaccccaagtggtttataccaaatacacttaaatactatgtacttttacatgatgtaagtgcaggagatgaacagagagctgaatcaatttatgaagaaatgaaacagaaatatggaactcagggttgctatttacttaaaattaattctcgaacatctaatcgagcatcagatgaacagataccagatccttggagtcagtatctccagaaaaatagtattcaaaaccaggaatcatatgaagatggcccttgtactataacttcaaataagaattctgataataacttgctttcattggatggattagataacgaagtcaaagatggcttaccaaataactttagagctcacccacttcagttggagcaatccagtgacccttctaacagtattgatggcccagatcatctaagatctgcttcatcgttacatgaaacaaagaaaggaaatactggaataattcatggtgcatgtttaacacttactgatcatgatagaattcgacagtttatacaagagttcacatttcggggccttttgccacatatagagaaaacaattaggcaattaaacgatcagctaatatcaagaaaaggtttgagtcgatctctattttctgcaactaaaaaatggtttagtggcagtaaagttccagaaaagagcattaatgacctgaaaaatacatctggcttgctgtatccgccggaagcaccagaacttcaaatcaggaaaatggctgacttatgttttttggtgcagcattatgatttggcttacagttgctatcatactgcaaagaaagattttcttaatgatcaagcaatgctttatgcagctggtgccttggaaatggcagcagtgtctgcttttcttcaaccaggagcacctaggccatatcctgctcattacatggatacagcaattcagacatacagagatatctgcaagaatatggtgttggctgaaagatgtgtgttgcttagtgctgaacttttaaaaagccaaagcaaatattcagaggctgcagctctcctaatacggttgaccagtgaggattctgatcttcgaagtgcacttcttttggaacaggcagcacattgctttataaacatgaaaagtcccatggttagaaaatatgcatttcatatgatattggcaggccatcgatttagtaaagcagggcagaaaaagcatgctttacgctgttattgtcaagccatgcaagtttacaaaggaaaaggctggtctcttgcagaggatcacattaatttcactattgggcgccagtcctatactcttagacagctggataatgctgtgtctgcttttaggcatattctaattaatgaaagtaaacaatctgctgctcaacagggggctttcctcagagaatatctttatgtttacaagaatgtaagtcagctgtcaccagatggtcctttgccacagcttcctttaccgtatattaacagttcagcaacacgggttttttttggccatgacagacgaccagcggatggtgaaaaacaagcagctactcatgtaagtcttgatcaagaatatgattctgaatcctctcagcagtggcgagaacttgaggaacaagttgtttctgtggttaacaaaggagtaattccatccaattttcatcccacacaatactgtttgaacagttactcagataattcaagatttccacttgcagttgtagaagaaccaattacagtggaagtggcttttagaaaccctttgaaagttctacttttgttgactgatttgtcattgctttggaagtttcatcctaaagatttcagtggaaaggataatgaagaagttaaacaactagttacaagtgaacctgaaatgattggagctgaagttatttcagagttcttaattaatggcgaagaatcaaaagtggcaagactaaagctctttccccatcacataggggagctgcatattctgggagttgtttataatcttggcactattcagggctctatgacagtagatggcattggtgctcttcccggatgtcacacaggaaaatattccttgagtatgtcagtccgagggaagcaggatttagaaattcaaggtcctcgacttaacaacacaaaagaagagaaaacatctgttaaatatggccctgatcgacgtttagatcccataatcacagaagaaatgccactgttggaggtgttctttatacattttcctacagggcttctctgtggagaaatccgaaaagcatatgtagaatttgtcaatgtcagcaaatgtccacttactggattgaaggttgtttctaaacgtccagagttctttactttcggtggtaatactgctgttctaacaccactaagtccctcagcttctgagaattgtagtgcttacaagactgttgtgacagatgctacctctgtgtgtacagcactcatatcatcagcttcttctgtagactttggcattggcacaggaagtcaaccagaggtgattcctgttccccttcctgacactgttcttctacccggagcctcagtgcagctgccaatgtggttacgtgggcctgatgaagaaggtgtccatgaaattaactttttgttttactatgaaagtgtcaaaaagcagccaaaaatacggcacagaatattaagacacactgcaattatttgtaccagtcggtctttaaatgtacgggccactgtctgcagaagtaattctcttgaaaatgaagaaggcagaggaggcaatatgctagtctttgtggatgtggaaaataccaatactagtgaagcaggcgttaaggaattccacatagtgcaagtatcaagtagtagcaaacactggaagttacagaaatctgtaaatctttctgaaaacaaagataccaaacttgccagtagggagaagggaaagttttgctttaaggcaataagatgtgagaaagaagaagcggccacacagtcctctgaaaaatatacctttgcagatatcatctttggaaatgaacagataataagttcagcaagcccatgtgcagacttcttttatcgaagtttatcttctgaattgaaaaaaccacaagctcacttgcctgtgcatacagaaaaacagtcaacagaggatgctgtgagattgattcaaaaatgcagtgaggtagatttgaatattgtcatattatggaaggcatacgttgtggaagacagtaaacagcttattttggaaggtcaacatcatgttattcttcgcactataggaaaagaagccttttcatatcctcagaaacaggagccaccagaaatggaactattgaaatttttcaggccagaaaacattacagtttcctcaaggccatcagtagagcagctttctagtctcattaaaacgagtcttcactacccagaatcatttaatcatccatttcatcaaaaaagcctttgtttagtaccagtcactcttttactttccaattgttctaaggctgatgtagatgtcatagttgatcttcggcataaaacaacaagtccagaagcactggaaatccatggatcattcacatggcttggacaaacacagtataaacttcaacttaaaagccaggagattcacagtctgcagctgaaagcatgctttgttcatacaggtgtttataaccttggaactcctagggtatttgccaagttatcggaccaagttacagtgtttgaaacaagtcagcagaattccatgcctgccctgatcatcatcagtaatgtgtgacaacttggaaatttgtactgaaatccacaataatcagtttttgctggatgggttttacagcagtatttgatatacctaacttgttatggaggttgattgatatctgatccctgcaaaatactttgacttgtcattttgttgatgatgcaaagcacgttggactgagaatacttaacattctttttctgtatttctttaaaccctgagaataatttacatgctcataatacaggatatcagcatatttgtgcaccttattaagccccatcttaagaaaacacaaagtctaagtctgctgttacaacttgtcaatggtatacgaatattaggagatgattctgagaaaggaaaggccttgttggcagtactcctgttaagccattagtctctaaattccagctttactgtgaagttctatagagtgttaaatacaaattttcctgtcttgcttcacacagttccttaaaatcagttttgaactttggtcatagagtcttcatatttcagtatttggtggtccctatgacttatacataactttgtaaaaagaaaaaaaaattttttctgatgctttgaatatagttttgaaaggagttttgacttttttcccctcattcatctcagtatagagtgcgctatttcacaatacgatttttgtcattaaaattaccatattctttattatataacgttaactattgagttgatctgtttaaaatataaatctcaagttaattaaaaataagcttttcaaaaatgtattatatttataacaaatatactgtaaatagaataaagacatgctattcactgta

SEQ ID NO: 450754 - DNA, 5513 bp, Homo sapiens
  misc_feature (5334)..(5334): n is a, c, g, or t
gcagctgggagtagtactgccggctccagtgcgttcggggccccgcccggccgggccaggccggcgggcggcggcggtagctgctgcagccgcaggataacctcgcagggtgggccggagggcgggcgccgccgctgcctgtgctgcggcgatggcccagtgtgtacaatcagtgcaggagctaatcccggactccttcgtcccctgtgtcgctgcgctgtgcagcgacgaagccgagcggctcactcgtctcaatcacctcagcttcgcggagctgcttaagcccttctcccgcctcacttccgaggttcacatgagagatcctaataatcaacttcacgtaattaaaaatttgaagatagcagtaagcaacattgtcacccagccacctcagcctggagccatccggaagcttttgaatgatgttgtttctggcagtcagcctgcagaaggattagtagctaatgtgattacagcaggagattatgaccttaacatcagtgccactactccatggtttgagtcttacagagaaacctttcttcagtcgatgccagcatcggatcatgaatttctgaaccactatttagcatgtatgttggtagcgtcatctagtgaagctgaacctgtggaacagttttcaaagttgtcacaagaacagcatcgaattcagcacaacagtgattattcctaccccaagtggtttataccaaatacacttaaatactatgtacttttacatgatgtaagtgcaggagatgaacagagagctgaatcaatttatgaagaaatgaaacagaaatatggaactcagggttgctatttacttaaaattaattctcgaacatctaatcgagcatcagatgaacagataccagatccttggagtcagtatctccagaaaaatagtattcaaaaccaggaatcatatgaagatggcccttgtactataacttcaaataagaattctgataataacttgctttcattggatggattagataacgaagtcaaagatggcttaccaaataactttagagctcacccacttcagttggagcaatccagtgacccttctaacagtattgatggcccagatcatctaagatctgcttcatcgttacatgaaacaaagaaaggaaatactggaataattcatggtgcatgtttaacacttactgatcatgatagaattcgacagtttatacaagagttcacatttcggggccttttgccacatatagagaaaacaattaggcaattaaacgatcagctaatatcaagaaaaggtttgagtcgatctctattttctgcaactaaaaaatggtttagtggcagtaaagttccagaaaagagcattaatgacctgaaaaatacatctggcttgctgtatccgccggaagcaccagaacttcaaatcaggaaaatggctgacttatgttttttggtgcagcattatgatttggcttacagttgctatcatactgcaaagaaagattttcttaatgatcaagcaatgctttatgcagctggtgccttggaaatggcagcagtgtctgcttttcttcaaccaggagcacctaggccatatcctgctcattacatggatacagcaattcagacatacagagatatctgcaagaatatggtgttggctgaaagatgtgtgttgcttagtgctgaacttttaaaaagccaaagcaaatattcagaggctgcagctctcctaatacggttgaccagtgaggattctgatcttcgaagtgcacttcttttggaacaggcagcacattgctttataaacatgaaaagtcccatggttagaaaatatgcatttcatatgatattggcaggccatcgatttagtaaagcagggcagaaaaagcatgctttacgctgttattgtcaagccatgcaagtttacaaaggaaaaggctggtctcttgcagaggatcacattaatttcactattgggcgccagtcctatactcttagacagctggataatgctgtgtctgcttttaggcatattctaattaatgaaagtaaacaatctgctgctcaacagggggctttcctcagagaatatctttatgtttacaagaatgtaagtcagctgtcaccagatggtcctttgccacagcttcctttaccgtatattaacagttcagcaacacgggttttttttggccatgacagacgaccagcggatggtgaaaaacaagcagctactcatgtaagtcttgatcaagaatatgattctgaatcctctcagcagtggcgagaacttgaggaacaagttgtttctgtggttaacaaaggagtaattccatccaattttcatcccacacaatactgtttgaacagttactcagataattcaagatttccacttgcagttgtagaagaaccaattacagtggaagtggcttttagaaaccctttgaaagttctacttttgttgactgatttgtcattgctttggaagtttcatcctaaagatttcagtggaaaggataatgaagaagttaaacaactagttacaagtgaacctgaaatgattggagctgaagttatttcagagttcttaattaatggcgaagaatcaaaagtggcaagactaaagctctttccccatcacataggggagctgcatattctgggagttgtttataatcttggcactattcagggctctatgacagtagatggcattggtgctcttcccggatgtcacacaggaaaatattccttgagtatgtcagtccgagggaagcaggatttagaaattcaaggtcctcgacttaacaacacaaaagaagagaaaacatctgttaaatatggccctgatcgacgtttagatcccataatcacagaagaaatgccactgttggaggtgttctttatacattttcctacagggcttctctgtggagaaatccgaaaagcatatgtagaatttgtcaatgtcagcaaatgtccacttactggattgaaggttgtttctaaacgtccagagttctttactttcggtggtaatactgctgttctaacaccactaagtccctcagcttctgagaattgtagtgcttacaagactgttgtgacagatgctacctctgtgtgtacagcactcatatcatcagcttcttctgtagactttggcattggcacaggaagtcaaccagaggtgattcctgttccccttcctgacactgttcttctacccggagcctcagtgcagctgccaatgtggttacgtgggcctgatgaagaaggtgtccatgaaattaactttttgttttactatgaaagtgtcaaaaagcagccaaaaatacggcacagaatattaagacacactgcaattatttgtaccagtcggtctttaaatgtacgggccactgtctgcagaagtaattctcttgaaaatgaagaaggcagaggaggcaatatgctagtctttgtggatgtggaaaataccaatactagtgaagcaggcgttaaggaattccacatagtgcaagtatcaagtagtagcaaacactggaagttacagaaatctgtaaatctttctgaaaacaaagataccaaacttgccagtagggagaagggaaagttttgctttaaggcaataagatgtgagaaagaagaagcggccacacagtcctctgaaaaatatacctttgcagatatcatctttggaaatgaacagataataagttcagcaagcccatgtgcagacttcttttatcgaagtttatcttctgaattgaaaaaaccacaagctcacttgcctgtgcatacagaaaaacagtcaacagaggatgctgtgagattgattcaaaaatgcagtgaggtagatttgaatattgtcatattatggaaggcatacgttgtggaagacagtaaacagcttattttggaaggtcaacatcatgttattcttcgcactataggaaaagaagccttttcatatcctcagaaacaggagccaccagaaatggaactattgaaatttttcaggccagaaaacattacagtttcctcaaggccatcagtagagcagctttctagtctcattaaaacgagtcttcactacccagaatcatttaatcatccatttcatcaaaaaagcctttgtttagtaccagtcactcttttactttccaattgttctaaggctgatgtagatgtcatagttgatcttcggcataaaacaacaagtccagaagcactggaaatccatggatcattcacatggcttggacaaacacagtataaacttcaacttaaaagccaggagattcacagtctgcagctgaaagcatgctttgttcatacaggtgtttataaccttggaactcctagggtatttgccaagttatcggaccaagttacagtgtttgaaacaagtcagcagaattccatgcctgccctgatcatcatcagtaatgtgtgacaacttggaaatttgtactgaaatccacaataatcagtttttgctggatgggttttacagcagtatttgatatacctaacttgttatggaggttgattgatatctgatccctgcaaaatactttgacttgtcattttgttgatgatgcaaagcacgttggactgagaatacttaacattctttttctgtatttctttaaaccctgagaataatttacatgctcataatacaggatatcagcatatttgtgcaccttattaagccccatcttaagagagatgattctgagaaaggaaaggccttgttggcagtactcctgttaagccattagtctctaaattccagctttactgtgaagttctatagagtgttaaatacaaattttcctgtcttgcttcacacagttccttaaaatcagttttgaactttggtcatagagtcttcatatttcagtatttggtggtccctatgacttatacataactttgtaaaaagaaaaaaaaattttttctgatgctttgaatatagttttgaaaggagttttgacttttttcccctcattcatctcagtatagagtgcgctatttcacaatacgatttttgtcattaaaattaccatattctttattatataacgttaactattgagttgatctgtttaaaatataaatctcaagttaattaaaaataagcttttcaaaaatgtattatatttataacaaatatactgtaaatagaataaagacatgctattcactgtaaaaaaaaaaaaaaaaaaaccaaaaaaactttgggggccgcctgggcctcgaaaaggtttttaaaacccttcggtggggggcgggggcccacagaggtacactgtgaccctgggnccacaaggcgtgtcccacaagagaacaccggggacaagagcaaggccgcgggatttttctcaccagtaaaaaaaaacggcgggggggaccccaggggttcctgaacaaattcacaaaggggccaggaggacataaggggactctacaccaggagcgccaaaggaagcggatataagtcc

SEQ ID NO: 450755 - DNA, 2753 bp, Homo sapiens
gcagctgggagtagtactgccggctccagtgcgttcggggccccgcccggccgggccaggccggcgggcggcggcggtagctgctgcagccgcaggataacctcgcagggtgggccggagggcgggcgccgccgctgcctgtgctgcggcgatggcccagtgtgtacaatcagtgcaggagctaatcccggactccttcgtcccctgtgtcgctgcgctgtgcagcgacgaagccgagcggctcactcgtctcaatcacctcagcttcgcggagctgcttaagcccttctcccgcctcacttccgaggttcacatgagagatcctaataatcaacttcacgtaattaaaaatttgaagatagcagtaagcaacattgtcacccagccacctcagcctggagccatccggaagcttttgaatgatgttgtttctggcagtcagcctgcagaaggattagtagctaatgtgattacagcaggagattatgaccttaacatcagtgccactactccatggtttgagtcttacagagaaacctttcttcagtcgatgccagcatcggatcatgaatttctgaaccactatttagcatgtatgttggtagcgtcatctagtgaagctgaacctgtggaacagttttcaaagttgtcacaagaacagcatcgaattcagcacaacagtgattattcctaccccaagtggtttataccaaatacacttaaatactatgtacttttacatgatgtaagtgcaggagatgaacagagagctgaatcaatttatgaagaaatgaaacagaaatatggaactcagggttgctatttacttaaaattaattctcgaacatctaatcgagcatcagatgaacagataccagatccttggagtcagtatctccagaaaaatagtattcaaaaccaggaatcatatgaagatggcccttgtactataacttcaaataagaattctgataataacttgctttcattggatggattagataacgaagtcaaagatggcttaccaaataactttagagctcacccacttcagttggagcaatccagtgacccttctaacagtattgatggcccagatcatctaagatctgcttcatcgttacatgaaacaaagaaaggaaatactggaataattcatggtgcatgtttaacacttactgatcatgatagaattcgacagtttatacaagagttcacatttcggggccttttgccacatatagagaaaacaattaggcaattaaacgatcagctaatatcaagaaaaggtttgagtcgatctctattttctgcaactaaaaaatggtttagtggcagtaaagttccagaaaagagcattaatgacctgaaaaatacatctggcttgctgtatccgccggaagcaccagaacttcaaatcaggaaaatggctgacttatgttttttggtgcagcattatgatttggcttacagttgctatcatactgcaaagaaagattttcttaatgatcaagcaatgctttatgcagctggtgccttggaaatggcagcagtgtctgcttttcttcaaccaggagcacctaggccatatcctgctcattacatggatacagcaattcagacatacagagatatctgcaagaatatggtgttggctgaaagatgtgtgttgcttagtgctgaacttttaaaaagccaaagcaaatattcagaggctgcagctctcctaatacggttgaccagtgaggattctgatcttcgaagtgcacttcttttggaacaggcagcacattgctttataaacatgaaaagtcccatggttagaaaatatgcatttcatatgatattggcaggccatcgatttagtaaagcagggcagaaaaagcatgctttacgctgttattgtcaagccatgcaagtttacaaaggaaaaggctggtctcttgcagaggatcacattaatttcactattgggcgccagtcctatactcttagacagctggataatgctgtgtctgcttttaggcatattctaattaatgaaagtaaacaatctgctgctcaacagggggctttcctcagagaatatctttatgtttacaagaatgtaagtcagctgtcaccagatggtcctttgccacagcttcctttaccgtatattaacagttcagcaacacgggttttttttggccatgacagacgaccagcggatggttagtaaagttttatttagcctaattacctaatgacaatttaaaaaaaacttcttttcctttctccatttaaaaaacgatgtatagttgaatatttgaaaattaatagctcagccggattacaggcatgagccaccgcgcccggccttccagttattttcatttgtatgtttttcccacatatttgggattccttcatactgtgtatgttgctttttacattctgtgttgttttataggcgtattctgatatcaaagtgtcttaatattttatttttgcataatattccatcatatgagtgattcataagctattttactatctttgatagttttttggcaagtttccatttgttgactatcacggtaatactgtggtgcacttttttgtgtgtggctttttacctttagattatttttgtggggaagattccagggcatgaagtgaagattttagggaaaagtattgtagtgccctgctggtttcataaaagttcataccaatgagcttcttactaagcagcatatgggtttgggtgt

SEQ ID NO: 450756 - DNA, 2621 bp, Homo sapiens
aggccacgagcacgggcgcgtgcttaagtcagcgcgcgcccgctccgacgcgaggaggccccgccctccagccccgccccgctcgctggcctgccctcctcttgctaccctcccggcgcagagaaccccggctgctcagcgcgctccgcggtcatggagatccccgggagcctgtgcaagaaagtcaagctgagcaataacgcgcagaactggggaatgcagagagcaaccaatgtcacctaccaagcccatcatgtcagcaggaacaagagaggtcaggtggtggggaccagaggtggctttcgtggttgcacagtttggctaacaggcttgtctggagcgggaaagactactgtgagcatggccttggaggagtacctggtttgtcatggtattccatgctacactctggatggtgacaatattcgtcaaggtctcaataaaaatcttggctttagtcctgaagacagagaagagaatgttcgacgcatcgcagaagttgctaaactgtttgcagatgctggcttagtgtgcatcacaagtttcatatcaccttacactcaggatcgcaacaatgcaaggcaaattcatgaaggtgcaagtttaccgttttttgaagtatttgttgatgctcctctgcatgtttgtgaacagagggatgtcaaaggactctacaaaaaagcccgggcaggagaaattaaaggtttcactgggatcgattctgaatatgaaaagccagaggcccctgagttggtgctgaaaacagactcctgtgatgtaaatgactgtgtccagcaagttgtggaacttctacaggaacgggatattgtacctgtggatgcatcttatgaagtaaaagaactatatgtgccagaaaataaacttcatttggcaaaaacagatgcggaaacattaccagcactgaaaattaataaagtggatatgcagtgggtgcaggttttggcagaaggttgggcaaccccattgaatggctttatgagagagagggagtacttgcagtgccttcattttgattgtcttctggatggaggtgtcattaacttgtcagtacctatagttctgactgcgactcatgaagataaagagaggctggacggctgtacagcatttgctctgatgtatgagggccgccgtgtggccattcttcgcaatccagagttttttgagcacaggaaagaggagcgctgtgccagacagtggggaacgacatgcaagaaccacccctatattaagatggtgatggaacaaggagattggctgattggaggagatcttcaagtcttggatcgagtttattggaatgatggtcttgatcagtatcgtcttactcctactgagctaaagcagaaatttaaagatatgaatgctgatgctgtctttgcatttcaactacgcaacccagtgcacaatggacatgccctgttaatgcaggatacccataagcaacttctagagaggggctaccggcgccctgtcctcctcctccaccctctgggtggctggacaaaggatgacgatgttcctttgatgtggcgtatgaagcagcatgctgcagtgttggaggaaggagttctgaatcctgagacgacagtggtggccatcttcccatctcccatgatgtatgctggaccaactgaggtccagtggcattgcagagcacggatggttgcaggagccaacttttacattgttggacgagaccctgctggcatgcctcatccagaaacagggaaggatctttatgagccaagtcatggtgccaaagtgctgacgatggcccctggtttaatcactttggaaatagttccctttcgagttgcagcttacaacaagaaaaagaagcgtatggactactatgactctgaacaccatgaagactttgaatttatttcaggaacacgaatgcgcaaacttgctcgagaaggccagaaaccacctgaaggtttcatggctcccaaggcttggaccgtgctgacagaatactacaaatccttggagaaagcttaggctgttaacccagtcactccacctttgacacattactagtaacaagaggggaccacatagtctctgttggcatttctttgtggtgtctgtctggacatgcttcctaaaaacagaccattttccttaacttgcatcagttttggtctgccttatgagttctgttttgaacaagtgtaacacactgatggttttaatgtatcttttccacttattatagttatattcctacaatacaattttaaaattgtctttttatattatatttatgcttctgtgtcatgattttttcaagctgttatattagttgtaaccagtagtattcacattaaatcttgctttttttccccttaaaaaaagaaaaaaattaccaaacaataaacttggctagaccttgttttgaggattttacaagacctttgtagcgattagattttttttctacattgaaaatagaaactgcttcctttcttctttccagtcagctattggtctttccagctgttataatctaaagtattcttatgatctgtgtaagctctgaatgaacttctttactcaataaaattaattttttggcttcttaaaaaaaaaaa

SEQ ID NO: 450757 - DNA, 2383 bp, Homo sapiens
aggccacgagcacgggcgcgtgcttaagtcagcgcgcgcccgctccgacgcgaggaggccccgccctccagccccgccccgctcgctggcctgccctcctcttgctaccctcccggcgcagagaaccccggctgctcagcgcgctccgcggtcatggagatccccgggagcctgtgcaagaaagtcaagctgagcaataacgcgcagaactggggaatgcagagagcaaccaatgtcacctaccaagcccatcatgtcagcaggaacaagagaggtcaggtggtggggaccagaggtggctttcgtggttgcacagtttggctaacaggcttgtctggagcgggaaagactactgtgagcatggccttggaggagtacctggtttgtcatggtattccatgctacactctggatggtgacaatattcgtcaaggtctcaataaaaatcttggctttagtcctgaagacagagaagagaatgttcgacgcatcgcagaagttgctaaactgtttgcagatgctggcttagtgtgcatcacaagtttcatatcaccttacactcaggatcgcaacaatgcaaggcaaattcatgaaggtgcaagtttaccgttttttgaagtatttgttgatgctcctctgcatgtttgtgaacagagggatgtcaaaggactctacaaaaaagcccgggcaggagaaattaaaggtttcactgggatcgattctgaatatgaaaagccagaggcccctgagttggtgctgaaaacagactcctgtgatgtaaatgactgtgtccagcaagttgtggaacttctacaggaacgggatattgtacctgtggatgcatcttatgaagtaaaagaactatatgtgccagaaaataaacttcatttggcaaaaacagatgcggaaacattaccagcactgaaaattaataaagtggatatgcagtgggtgcaggttttggcagaaggttgggcaaccccattgaatggctttatgagagagagggagtacttgcagtgccttcattttgattgtcttctggatggaggtgtcattaacttgtcagtacctatagttctgactgcgactcatgaagataaagagaggctggacggctgtacagcatttgctctgatgtatgagggccgccgtgtggccattcttcgcaatccagagttttttgagcacaggaaagaggagcgctgtgccagacagtggggaacgacatgcaagaaccacccctatattaagatggtgatggaacaaggagattggctgattggaggagatcttcaagtcttggatcgagtttattggaatgatggtcttgatcagtatcgtcttactcctactgagctaaagcagaaatttaaagatatgaatgctgatgctgtctttgcatttcaactacgcaacccagtgcacaatggacatgccctgttaatgcaggatacccataagcaacttctagagaggggctaccggcgccctgtcctcctcctccaccctctgggtggctggacaaaggatgacgatgttcctttgatgtggcgtatgaagcagcatgctgcagtgttggaggaaggagttctgaatcctgagacgacagtggtggccatcttcccatctcccatgatgtatgctggaccaactgaggtccagtggcattgcagagcacggatggttgcaggagccaacttttacattgttggacgagaccctgctggcatgcctcatccagaaacagggaaggatctttatgagccaagtcatggtgccaaagtgctgacgatggcccctggtttaatcactttggaaatagttccctttcgagttgcagcttacaacaagaaaaagaagcgtatggactactatgactctgaacaccatgaagactttgaatttatttcaggaacacgaatgcgcaaacttgctcgagaaggccagaaaccacctgaaggtttcatggctcccaaggcttggaccgtgctgacagaatactacaaatccttggagaaagcttaggctgttaacccagtcactccacctttgacacattactagtaacaagaggggaccacatagtctctgttggcatttctttgtggtgtctgtctggacatgcttcctaaaaacagaccattttccttaacttgcatcagttggggccacctattattatttatgtaacaacattaaaccgagggttagtttttttaatctctccctaagataatagataaccacaagaatctaaagtaactaattttaaaattgtctttttatattatatttatgcttctgtgtcatgattttttcaagctgttatattagttgtaaccagtagtattcacattaaatcttgctttttttcccctta

SEQ ID NO: 450758 - DNA, 2564 bp, Homo sapiens
ttccggggctgcggcgcctcccggctggggccgtgggtggttgcgaggcagaggggcgcggcgcagggtggggatctcgccctagcttggcgcagcgtgcggtccgagccaccgttcgtgggaagaacgccccccctccccagcgcctccgctcagggaatgcagagagcaaccaatgtcacctaccaagcccatcatgtcagcaggaacaagagaggtcaggtggtggggaccagaggtggctttcgtggttgcacagtttggctaacaggcttgtctggagcgggaaagactactgtgagcatggccttggaggagtacctggtttgtcatggtattccatgctacactctggatggtgacaatattcgtcaaggtctcaataaaaatcttggctttagtcctgaagacagagaagagaatgttcgacgcatcgcagaagttgctaaactgtttgcagatgctggcttagtgtgcatcacaagtttcatatcaccttacactcaggatcgcaacaatgcaaggcaaattcatgaaggtgcaagtttaccgttttttgaagtatttgttgatgctcctctgcatgtttgtgaacagagggatgtcaaaggactctacaaaaaagcccgggcaggagaaattaaaggtttcactgggatcgattctgaatatgaaaagccagaggcccctgagttggtgctgaaaacagactcctgtgatgtaaatgactgtgtccagcaagttgtggaacttctacaggaacgggatattgtacctgtggatgcatcttatgaagtaaaagaactatatgtgccagaaaataaacttcatttggcaaaaacagatgcggaaacattaccagcactgaaaattaataaagtggatatgcagtgggtgcaggttttggcagaaggttgggcaaccccattgaatggctttatgagagagagggagtacttgcagtgccttcattttgattgtcttctggatggaggtgtcattaacttgtcagtacctatagttctgactgcgactcatgaagataaagagaggctggacggctgtacagcatttgctctgatgtatgagggccgccgtgtggccattcttcgcaatccagagttttttgagcacaggaaagaggagcgctgtgccagacagtggggaacgacatgcaagaaccacccctatattaagatggtgatggaacaaggagattggctgattggaggagatcttcaagtcttggatcgagtttattggaatgatggtcttgatcagtatcgtcttactcctactgagctaaagcagaaatttaaagatatgaatgctgatgctgtctttgcatttcaactacgcaacccagtgcacaatggacatgccctgttaatgcaggatacccataagcaacttctagagaggggctaccggcgccctgtcctcctcctccaccctctgggtggctggacaaaggatgacgatgttcctttgatgtggcgtatgaagcagcatgctgcagtgttggaggaaggagttctgaatcctgagacgacagtggtggccatcttcccatctcccatgatgtatgctggaccaactgaggtccagtggcattgcagagcacggatggttgcaggagccaacttttacattgttggacgagaccctgctggcatgcctcatccagaaacagggaaggatctttatgagccaagtcatggtgccaaagtgctgacgatggcccctggtttaatcactttggaaatagttccctttcgagttgcagcttacaacaagaaaaagaagcgtatggactactatgactctgaacaccatgaagactttgaatttatttcaggaacacgaatgcgcaaacttgctcgagaaggccagaaaccacctgaaggtttcatggctcccaaggcttggaccgtgctgacagaatactacaaatccttggagaaagcttaggctgttaacccagtcactccacctttgacacattactagtaacaagaggggaccacatagtctctgttggcatttctttgtggtgtctgtctggacatgcttcctaaaaacagaccattttccttaacttgcatcagttttggtctgccttatgagttctgttttgaacaagtgtaacacactgatggttttaatgtatcttttccacttattatagttatattcctacaatacaattttaaaattgtctttttatattatatttatgcttctgtgtcatgattttttcaagctgttatattagttgtaaccagtagtattcacattaaatcttgctttttttccccttaaaaaaagaaaaaaattaccaaacaataaacttggctagaccttgttttgaggattttacaagacctttgtagcgattagattttttttctacattgaaaatagaaactgcttcctttcttctttccagtcagctattggtctttccagctgttataatctaaagtattcttatgatctgtgtaagctctgaatgaacttctttactcaataaaattaattttttggcttcttaaaaaaaaaaa

SEQ ID NO: 450759 - DNA, 2270 bp, Homo sapiens
aggccacgagcacgggcgcgtgcttaagtcagcgcgcgcccgctccgacgcgaggaggccccgccctccagccccgccccgctcgctggcctgccctcctcttgctaccctcccggcgcagagaaccccggctgctcagcgcgctccgcggtcatggagatccccgggagcctgtgcaagaaagtcaagctgagcaataacgcgcagaactgggatcgcaacaatgcaaggcaaattcatgaaggtgcaagtttaccgttttttgaagtatttgttgatgctcctctgcatgtttgtgaacagagggatgtcaaaggactctacaaaaaagcccgggcaggagaaattaaaggtttcactgggatcgattctgaatatgaaaagccagaggcccctgagttggtgctgaaaacagactcctgtgatgtaaatgactgtgtccagcaagttgtggaacttctacaggaacgggatattgtacctgtggatgcatcttatgaagtaaaagaactatatgtgccagaaaataaacttcatttggcaaaaacagatgcggaaacattaccagcactgaaaattaataaagtggatatgcagtgggtgcaggttttggcagaaggttgggcaaccccattgaatggctttatgagagagagggagtacttgcagtgccttcattttgattgtcttctggatggaggtgtcattaacttgtcagtacctatagttctgactgcgactcatgaagataaagagaggctggacggctgtacagcatttgctctgatgtatgagggccgccgtgtggccattcttcgcaatccagagttttttgagcacaggaaagaggagcgctgtgccagacagtggggaacgacatgcaagaaccacccctatattaagatggtgatggaacaaggagattggctgattggaggagatcttcaagtcttggatcgagtttattggaatgatggtcttgatcagtatcgtcttactcctactgagctaaagcagaaatttaaagatatgaatgctgatgctgtctttgcatttcaactacgcaacccagtgcacaatggacatgccctgttaatgcaggatacccataagcaacttctagagaggggctaccggcgccctgtcctcctcctccaccctctgggtggctggacaaaggatgacgatgttcctttgatgtggcgtatgaagcagcatgctgcagtgttggaggaaggagttctgaatcctgagacgacagtggtggccatcttcccatctcccatgatgtatgctggaccaactgaggtccagtggcattgcagagcacggatggttgcaggagccaacttttacattgttggacgagaccctgctggcatgcctcatccagaaacagggaaggatctttatgagccaagtcatggtgccaaagtgctgacgatggcccctggtttaatcactttggaaatagttccctttcgagttgcagcttacaacaagaaaaagaagcgtatggactactatgactctgaacaccatgaagactttgaatttatttcaggaacacgaatgcgcaaacttgctcgagaaggccagaaaccacctgaaggtttcatggctcccaaggcttggaccgtgctgacagaatactacaaatccttggagaaagcttaggctgttaacccagtcactccacctttgacacattactagtaacaagaggggaccacatagtctctgttggcatttctttgtggtgtctgtctggacatgcttcctaaaaacagaccattttccttaacttgcatcagttttggtctgccttatgagttctgttttgaacaagtgtaacacactgatggttttaatgtatcttttccacttattatagttatattcctacaatacaattttaaaattgtctttttatattatatttatgcttctgtgtcatgattttttcaagctgttatattagttgtaaccagtagtattcacattaaatcttgctttttttccccttaaaaaaagaaaaaaattaccaaacaataaacttggctagaccttgttttgaggattttacaagacctttgtagcgattagattttttttctacattgaaaatagaaactgcttcctttcttctttccagtcagctattggtctttccagctgttataatctaaagtattcttatgatctgtgtaagctctgaatgaacttctttactcaataaaattaattttttggcttcttaaaaaaaaaaa

SEQ ID NO: 450760 - DNA, 1600 bp, Homo sapiens
atttgggcatatttcttcttttttttttaaccccaacaatgactacatagggcatatttctttatgtgcacacacactctctctctctctctctctattttctatggaaggcttatatgtgacacatttatttctcacagttctagaggttgggaagtccaagatcaaggtgccagcagatgcggtgtctggtgaggaccctttttcctggttgtggatggctgccttcttgctgtgtccttatgtagaggaaagagcaagaatctcctgtctctttcttttcttataaggggattaatcccatcatagggggcccacccttttggcctcatttaattctaattacttccctaaggttttacctataagttcatagcaatgtttgtatatagttttgtgtcctggttattttatttatcattaatcacatcatgagcatcttatcccatccgtactttaatgactatgtaatattcgactcaggactatactgtaacttatttaggatctttcggcctttaggttatttatagtattttgctgttgtaaaatgactttcatatagctgtcttaggcataatatttgtctgcctctaattatttccttctaggtttgtagaagtgtgattattagttaaaacatacttggcatacctccagaagccagggccacttggtagtttatgattgcaccaggttttcaggttaagtctataaataatgaagagaggaaggaacatagaactgccaactagaagtaaacaggctcgtgatctggtgacctgagcgactctgaatgcttgctgagtcctagttggccatctaggttggttcccatgtttgagagacgaggatggatgaatttaagccatgaagactttgaatttatttcaggaacacgaatgcgcaaacttgctcgagaaggccagaaaccacctgaaggtttcatggctcccaaggcttggaccgtgctgacagaatactacaaatccttggagaaagcttaggctgttaacccagtcactccacctttgacacattactagtaacaagaggggaccacatagtctctgttggcatttctttgtggtgtctgtctggacatgcttcctaaaaacagaccattttccttaacttgcatcagttttggtctgccttatgagttctgttttgaacaagtgtaacacactgatggttttaatgtatcttttccacttattatagttatattcctacaatacaattttaaaattgtctttttatattatatttatgcttctgtgtcatgattttttcaagctgttatattagttgtaaccagtagtattcacattaaatcttgctttttttccccttaaaaaaagaaaaaaattaccaaacaataaacttggctagaccttgttttgaggattttacaagacctttgtagcgattagattttttttctacattgaaaatagaaactgcttcctttcttctttccagtcagctattggtctttccagctgttataatctaaagtattcttatgatctgtgtaagctctgaatgaacttctttactcaataaaattaattttttggcttcttaaaaaaaaaaa

SEQ ID NO: 450761 - DNA, 1174 bp, Homo sapiens
aaagtagtatagtatgtaagtgcataagagaaattagtacaagtaaattaggaaagtctgagtaagattggtagattgtttccacactgataatcctggctgtgatatgctataattttgcaagatgttacctttgggaggaaactggataaagggtacaatggtgactggctatattatttcttacaatttcatgtgactctacaatggtctcaataaaaatttcaaaactaatttttttctggttctaaaaattggtaatattcaatagtggttttttgttcagtgacaaatttgaaatgagatttatattcacaagtactatgttcagtatttttttttcattaagtttgtctaatatgaacagaaggaacaaatgctttttaaaaatctaagtttctaaaattatgaaataattttctttttttcctctcctttagccccatgaagactttgaatttatttcaggaacacgaatgcgcaaacttgctcgagaaggccagaaaccacctgaaggtttcatggctcccaaggcttggaccgtgctgacagaatactacaaatccttggagaaagcttaggctgttaacccagtcactccacctttgacacattactagtaacaagaggggaccacatagtctctgttggcatttctttgtggtgtctgtctggacatgcttcctaaaaacagaccattttccttaacttgcatcagttttggtctgccttatgagttctgttttgaacaagtgtaacacactgatggttttaatgtatcttttccacttattatagttatattcctacaatacaattttaaaattgtctttttatattatatttatgcttctgtgtcatgattttttcaagctgttatattagttgtaaccagtagtattcacattaaatcttgctttttttccccttaaaaaaagaaaaaaattaccaaacaataaacttggctagaccttgttttgaggattttacaagacctttgtagcgattagattttttttctacattgaaaatagaaactgcttcctttcttctttccagtcagctattggtctttccagctgttataatctaaagtattcttatgatctgtgtaagctctgaatgaacttctttactcaataaaattaattttttggcttcttaaaaaaaaaaa

SEQ ID NO: 450762 - DNA, 1260 bp, Homo sapiens
aggggaaaaaaagcaagatttaatgtgaatactactggttacaactaatataacagcttgaaaaaatcatgacacagaagcataaatataatataaaaagacaattttaaaattgtattgtaggaatataactataataagtggaaaagatacattaaaaccatcagtgtgttacacttgttcaaaacagaactcataaggcagaccaaaactgatgcaagttaaggaaactggataaagggtacaatggtgactggctatattatttcttacaatttcatgtgactctacaatggtctcaataaaaatttcaaaactaatttttttctggttctaaaaattggtaatattcaatagtggttttttgttcagtgacaaatttgaaatgagatttatattcacaagtactatgttcagtatttttttttcattaagtttgtctaatatgaacagaaggaacaaatgctttttaaaaatctaagtttctaaaattatgaaataattttctttttttcctctcctttagccccatgaagactttgaatttatttcaggaacacgaatgcgcaaacttgctcgagaaggccagaaaccacctgaaggtttcatggctcccaaggcttggaccgtgctgacagaatactacaaatccttggagaaagcttaggctgttaacccagtcactccacctttgacacattactagtaacaagaggggaccacatagtctctgttggcatttctttgtggtgtctgtctggacatgcttcctaaaaacagaccattttccttaacttgcatcagttttggtctgccttatgagttctgttttgaacaagtgtaacacactgatggttttaatgtatcttttccacttattatagttatattcctacaatacaattttaaaattgtctttttatattatatttatgcttctgtgtcatgattttttcaagctgttatattagttgtaaccagtagtattcacattaaatcttgctttttttccccttaaaaaaagaaaaaaattaccaaacaataaacttggctagaccttgttttgaggattttacaagacctttgtagcgattagattttttttctacattgaaaatagaaactgcttcctttcttctttccagtcagctattggtctttccagctgttataatctaaagtattcttatgatctgtgtaagctctgaatgaacttctttactcaataaaattaattttttggcttcttaaaaaaaaaaa

SEQ ID NO: 450763 - DNA, 785 bp, Homo sapiens
tgatacaatcgagctcggtaccaggaaacagtatgactctgaagcacctaagaccatgaagactttgaatttatttcaggaacacgaatgcgcaaacttgctcgagaaggccagaaaccacctgaaggtttcatggctcccaaggcttggaccgtgctgacagaatactacaaatccttggagaaagcttaggctgttaacccagtcactccacctttgacacattactagtaacaagaggggaccacatagtctctgttggcatttctttgtggtgtctgtctggacatgcttcctaaaaacagaccattttccttaacttgcatcagttttggtctgccttatgagttctgttttgaacaagtgtaacacactgatggttttaatgtatcttttccacttattatagttatattcctacaatacaattttaaaattgtctttttatattatatttatgcttctgtgtcatgattttttcaagctgttatattagttgtaaccagtagtattcacattaaatcttgctttttttccccttaaaaaaagaaaaaaattaccaaacaataaacttggctagaccttgttttgaggattttacaagacctttgtagcgattagattttttttctacattgaaaatagaaactgcttcctttcttctttccagtcagctattggtctttccagctgttataatctaaagtattcttatgatctgtgtaagctctgaatgaacttctttactcaataaaattaattttttggcttcttaaaaaaaaaaa

SEQ ID NO: 450764 - DNA, 1204 bp, Homo sapiens
aggccacgagcacgggcgcgtgcttaagtcagcgcgcgcccgctccgacgcgaggaggccccgccctccagccccgccccgctcgctggcctgccctcctcttgctaccctcccggcgcagagaaccccggctgctcagcgcgctccgcggtcatggagatccccgggagcctgtgcaagaaagtcaagctgagcaataacgcgcagaactggggaatgcagagagcaaccaatgtcacctaccaagcccatcatgtcagcaggaacaagagaggtcaggtggtggggaccagaggtggctttcgtggttgcacagtttggctaacaggcttgtctggagcgggaaagactactgtgagcatggccttggaggagtacctggtttgtcatggtattccatgctacactctggatggtgacaatattcgtcaaggtctcaataaaaatcttggctttagtcctgaagacagagaagagaatgttcgacgcatcgcagaagttgctaaactgtttgcagatgctggcttagtgtgcatcacaagtttcatatcaccttacactcaggatcgcaacaatgcaaggcaaattcatgaaggtgcaagtttaccgttttttgaagtatttgttgatgctcctctgcatgtttgtgaacagagggatgtcaaaggactctacaaaaaagcccgggcaggagaaattaaaggtttcactgggatcgattctgaatatgaaaagccagaggcccctgagttggtgctgaaaacagactcctgtgatgtaaatgactgtgtccagcaagttgtggaacttctacaggaacgggatattgtacctgtggatgcatcttatgaagtaaaagaactatatgtgccagaaaataaacttcatttggcaaaaacagatgcggaaacattaccagcactgaaaattaataaagtggatatgcagtgggtgcaggttttggcagaaggttgggcaaccccattgaatggctttatgagagagagggagtacttgcagtgcctcaattggaaaggcctttggaaatgggggggaataaacctggtaaggcccttaatttttaaatgggaccccttgggtataaaggaaggtttgacggttttcccacatttgggctttaagttttaagggccccccttgtggggcctttttttcaaatcccaaaatttttttggaccccccg

SEQ ID NO: 450765 - DNA, 2378 bp, Homo sapiens
aggccacgagcacgggcgcgtgcttaagtcagcgcgcgcccgctccgacgcgaggaggccccgccctccagccccgccccgctcgctggcctgccctcctcttgctaccctcccggcgcagagaaccccggctgctcagcgcgctccgcggtcatggagatccccgggagcctgtgcaagaaagtcaagctgagcaataacgcgcagaactggggaatgcagagagcaaccaatgtcacctaccaagcccatcatgtcagcaggaacaagagaggtcaggtggtggggaccagaggtggctttcgtggttgcacagtttggctaacaggcttgtctggagcgggaaagactactgtgagcatggccttggaggagtacctggtttgtcatggtattccatgctacactctggatggtgacaatattcgtcaaggtctcaataaaaatcttggctttagtcctgaagacagagaagagaatgttcgacgcatcgcagaagttgctaaactgtttgcagatgctggcttagtgtgcatcacaagtttcatatcaccttacactcaggatcgcaacaatgcaaggcaaattcatgaaggtgcaagtttaccgttttttgaagtatttgttgatgctcctctgcatgtttgtgaacagagggatgtcaaaggactctacaaaaaagcccgggcaggagaaattaaaggtttcactgggatcgattctgaatatgaaaagccagaggcccctgagttggtgctgaaaacagactcctgtgatgtaaatgactgtgtccagcaagttgtggaacttctacaggaacgggatattgtacctgtggatgcatcttatgaagtaaaagaactatatgtgccagaaaataaacttcatttggcaaaaacagatgcggaaacattaccagcactgaaaattaataaagtggatatgcagtgggtgcaggttttggcagaaggttgggcaaccccattgaatggctttatgagagagagggagtacttgcagtgccttcattttgattgtcttctggatggaggtgtcattaacttgtcagtacctatagttctgactgcgactcatgaagataaagagaggctggacggctgtacagcatttgctctgatgtatgagggccgccgtgtggccattcttcgcaatccagagttttttgagcacaggaaagaggagcgctgtgccagacagtggggaacgacatgcaagaaccacccctatattaagatggtgatggaacaaggagattggctgattggaggagatcttcaagtcttggatcgagtttattggaatgatggtcttgatcagtatcgtcttactcctactgagctaaagcagaaatttaaagatatgaatgctgatgctgtctttgcatttcaactacgcaacccagtgcacaatggacatgccctgttaatgcaggatacccataagcaacttctagagaggggctaccggcgccctgtcctcctcctccaccctctgggtggctggacaaaggatgacgatgttcctttgatgtggcgtatgaagcagcatgctgcagtgttggaggaaggagttctgaatcctgagacgacagtggtggccatcttcccatctcccatgatgtatgctggaccaactgaggtccagtggcattgcagagcacggatggttgcaggagccaacttttacattgttggacgagaccctgctggcatgcctcatccagaaacagggaaggatctttatgagccaagtcatggtgccaaagtgctgacgatggcccctggtttaatcactttggaaatagttccctttcgagttgcagcttacaacaagaaaaagaagcgtatggactactatgactctgaacaccatgaagactttgaatttatttcaggaacacgaatgcgcaaacttgctcgagaaggccagaaaccacctgaaggtttcatggctcccaaggcttggaccgtgctgacagaatactacaaatccttggagaaagcttaggctgttaacccagtcactccacctttgacacattactagtaacaagaggggaccacatagtctctgttggcatttctttgtggtgtctgtctggacatgcttcctaaaaacagaccattttccttaacttgcatcagttttggtctgccttatgagttctgttttgaacaagtgtaacacactgatggttttaatgtatcttttccacttattatagttatattcctacaatacaattttaaaattgtctttttatattatatttatgcttctgtgtcatgattttttcaagctgttatattagttgtaaccagtagtattcacattaaatcttgctttttttcccctta

SEQ ID NO: 450766 - DNA, 2498 bp, Homo sapiens
ggacgcgtgggtcgacccacgcgtcggacccacgcgtcggacccacgcgtcggcaagaaagtcaagctgagcaataacgcgcagaactggggaatgcagagagcaaccaatgtcacctaccaagcccatcatgtcagcaggaacaagagaggtcaggtggtggggaccagaggtggctttcgtggttgcacagtttggctaacaggcttgtctggagcgggaaagactactgtgagcatggccttggaggagtacctggtttgtcatggtattccatgctacactctggatggtgacaatattcgtcaaggtctcaataaaaatcttggctttagtcctgaagacagagaagagaatgttcgacgcatcgcagaagttgctaaactgtttgcagatgctggcttagtgtgcatcacaagtttcatatcaccttacactcaggatcgcaacaatgcaaggcaaattcatgaaggtgcaagtttaccgttttttgaagtatttgttgatgctcctctgcatgtttgtgaacagagggatgtcaaaggactctacaaaaaagcccgggcaggagaaattaaaggtttcactgggatcgattctgaatatgaaaagccagaggcccctgagttggtgctgaaaacagactcctgtgatgtaaatgactgtgtccagcaagttgtggaacttctacaggaacgggatattgtacctgtggatgcatcttatgaagtaaaagaactatatgtgccagaaaataaacttcatttggcaaaaacagatgcggaaacattaccagcactgaaaattaataaagtggatatgcagtgggtgcaggttttggcagaaggttgggcaaccccattgaatggctttatgagagagagggagtacttgcagtgccttcattttgattgtcttctggatggaggtgtcattaacttgtcagtacctatagttctgactgcgactcatgaagataaagagaggctggacggctgtacagcatttgctctgatgtatgagggccgccgtgtggccattcttcgcaatccagagttttttgagcacaggaaagaggagcgctgtgccagacagtggggaacgacatgcaagaaccacccctatattaagatggtgatggaacaaggagattggctgattggaggagatcttcaagtcttggatcgagtttattggaatgatggtcttgatcagtatcgtcttactcctactgagctaaagcagaaatttaaagatatgaatgctgatgctgtctttgcatttcaactacgcaacccagtgcacaatggacatgccctgttaatgcaggatacccataagcaacttctagagaggggctaccggcgccctgtcctcctcctccaccctctgggtggctggacaaaggatgacgatgttcctttgatgtggcgtatgaagcagcatgctgcagtgttggaggaaggagttctgaatcctgagacgacagtggtggccatcttcccatctcccatgatgtatgctggaccaactgaggtccagtggcattgcagagcacggatggttgcaggagccaacttttacattgttggacgagaccctgctggcatgcctcatccagaaacagggaaggatctttatgagccaagtcatggtgccaaagtgctgacgatggcccctggtttaatcactttggaaatagttccctttcgagttgcagcttacaacaagaaaaagaagcgtatggactactatgactctgaacaccatgaagactttgaatttatttcaggaacacgaatgcgcaaacttgctcgagaaggccagaaaccacctgaaggtttcatggctcccaaggcttggaccgtgctgacagaatactacaaatccttggagaaagcttaggctgttaacccagtcactccacctttgacacattactagtaacaagaggggaccacatagtctctgttggcatttctttgtggtgtctgtctggacatgcttcctaaaaacagaccattttccttaacttgcatcagttttggtctgccttatgagttctgttttgaacaagtgtaacacactgatggttttaatgtatcttttccacttattatagttatattcctacaatacaattttaaaattgtctttttatattatatttatgcttctgtgtcatgattttttcaagctgttatattagttgtaaccagtagtattcacattaaatcttgctttttttccccttaaaaaaagaaaaaaattaccaaacaataaacttggctagaccttgttttgaggattttacaagacctttgtagcgattagattttttttctacattgaaaatagaaactgcttcctttcttctttccagtcagctattggtctttccagctgttataatctaaagtattcttatgatctgtgtaagctctgaatgaacttctttactcaataaaattaattttttggcttcttaaaaaaaaaaa

SEQ ID NO: 450767 - DNA, 2445 bp, Homo sapiens
aggccacgagcacgggcgcgtgcttaagtcagcgcgcgcccgctccgacgcgaggaggccccgccctccagccccgccccgctcgctggcctgccctcctcttgctaccctcccggcgcagagaaccccggctgctcagcgcgctccgcggtcatggagatccccgggagcctgtgcaagaaagtcaagctgagcaataacgcgcagaactggggaatgcagagagcaaccaatgtcacctaccaagcccatcatgtcagcaggaacaagagaggtcaggtggtggggaccagaggtggctttcgtggttgcacagtttggctaacaggcttgtctggagcgggaaagactactgtgagcatggccttggaggagtacctggtttgtcatggtattccatgctacactctggatggtgacaatattcgtcaaggtctcaataaaaatcttggctttagtcctgaagacagagaagagaatgttcgacgcatcgcagaagttgctaaactgtttgcagatgctggcttagtgtgcatcacaagtttcatatcaccttacactcaggatcgcaacaatgcaaggcaaattcatgaaggtgcaagtttaccgttttttgaagtatttgttgatgctcctctgcatgtttgtgaacagagggatgtcaaaggactctacaaaaaagcccgggcaggagaaattaaaggtttcactgggatcgattctgaatatgaaaagccagaggcccctgagttggtgctgaaaacagactcctgtgatgtaaatgactgtgtccagcaagttgtggaacttctacaggaacgggatattgtacctgtggatgcatcttatgaagtaaaagaactatatgtgccagaaaataaacttcatttggcaaaaacagatgcggaaacattaccagcactgaaaattaataaagtggatatgcagtgggtgcaggttttggcagaaggttgggcaaccccattgaatggctttatgagagagagggagtacttgcagtgccttcattttgattgtcttctggatggaggtgtcattaacttgtcagtacctatagttctgactgcgactcatgaagataaagagaggctggacggctgtacagcatttgctctgatgtatgagggccgccgtgtggccattcttcgcaatccagagttttttgagcacaggaaagaggagcgctgtgccagacagtggggaacgacatgcaagaaccacccctatattaagatggtgatggaacaaggagattggctgattggaggagatcttcaagtcttggatcgagtttattggaatgatggtcttgatcagtatcgtcttactcctactgagctaaagcagaaatttaaagatatgaatgctgatgctgtctttgcatttcaactacgcaacccagtgcacaatggacatgccctgttaatgcaggatacccataagcaacttctagagaggggctaccggcgccctgtcctcctcctccaccctctgggtggctggacaaaggatgacgatgttcctttgatgtggcgtatgaagcagcatgctgcagtgttggaggaaggagttctgaatcctgagacgacagtggtggccatcttcccatctcccatgatgtatgctggaccaactgaggtccagtggcattgcagagcacggatggttgcaggagccaacttttacattgttggacgagaccctgctggcatgcctcatccagaaacagggaaggatctttatgagccaagtcatggtgccaaagtgctgacgatggcccctggtttaatcactttggaaatagttccctttcgagttgcagcttacaacaagaaaaagaagcgtatggactactatgactctgaacagtaagtcttacattctctgtacaaatctttgaagtacttcgtggtctagctgctcccagggatttagcttattgtctaatctttactgatgacaggttttgtggtactcatgtcagagaaaggtaaacccagaaaagtaatttcccaacattctggaaattagaagtagaaataaaacttgaatctagtttcatggtttcaggaattttgttttgaagtctgtaaggacaatattgttatttctctgcctactgtgtctgctatagcttactgagcataactagtttgaggacttagtgatgtttactctggtaagcccagggagtctatgtatggagagagaatttagctaatatttgtgcaatcactatgtgacaggcaatgtcctaattatttacaagtattaaattatttataggttgtgtatcccttgtatgaaatgcttggggccagaagtgtttttgattttggattccttcagattttggaatatttgaatatttgaatgaggtaccttggggatgggactcaattctaaacatgaaattcatttatg

SEQ ID NO: 450768 - DNA, 3231 bp, Homo sapiens
tgacaatatcaggtgagctgtggaggtggggtccttggaagctggatgacagcagctggcaaggggataagagagcagtgagcccctccctcaaggaggtctggctttatccatagacagggccctctgaggtggggctgaggtacaaagggggattgagcagcccaggagaagagagatgggggttcccttcttctcttctctcagatgcatggtggacttaggaccttgctgggctgggggtctcactgcagagatgaagctgcttctggccctagcagggctcctggccattctggccacgccccagccctctgaaggtgctgctccagctgtcctgggggaggtggacacctcgttggtgctgagctccatggaggaggccaagcagctggtggacaaggcctacaaggagcggcgggaaagcatcaagcagcggcttcgcagcggctcagccagccccatggaactcctatcctacttcaagcagccggtggcagccaccaggacggcggtgagggccgctgactacctgcacgtggctctagacctgctggagaggaagctgcggtccctgtggcgaaggccattcaatgtcactgatgtgctgacgcccgcccagctgaatgtgttgtccaagtcaagcggctgcgcctaccaggacgtgggggtgacttgcccggagcaggacaaataccgcaccatcaccgggatgtgcaacaacagacgcagccccacgctgggggcctccaaccgtgcctttgtgcgctggctgccggcggagtatgaggacggcttctctcttccctacggctggacgcccggggtcaagcgcaacggcttcccggtggctctggctcgcgcggtctccaacgagatcgtgcgcttccccactgatcagctgactccggaccaggagcgctcactcatgttcatgcaatggggccagctgttggaccacgacctcgacttcacccctgagccggccgcccgggcctccttcgtcactggcgtcaactgcgagaccagctgcgttcagcagccgccctgcttcccgctcaagatcccgcccaatgacccccgcatcaagaaccaagccgactgcatcccgttcttccgctcctgcccggcttgccccgggagcaacatcaccatccgcaaccagatcaacgcgctcacttccttcgtggacgccagcatggtgtacggcagcgaggagcccctggccaggaacctgcgcaacatgtccaaccagctggggctgctggccgtcaaccagcgcttccaagacaacggccgggccctgctgccctttgacaacctgcacgatgacccctgtctcctcaccaaccgctcagcgcgcatcccctgcttcctggcaggggacacccgttccagtgagatgcccgagctcacctccatgcacaccctcttacttcgggagcacaaccggctggccacagagctcaagagcctgaaccctaggtgggatggggagaggctctaccaggaagcccggaagatcgtgggggccatggtccagatcatcacttaccgggactacctgcccctggtgctggggccaacggccatgaggaagtacctgcccacgtaccgttcctacaatgactcagtggacccacgcatcgccaacgtcttcaccaatgccttccgctacggccacaccctcatccaacccttcatgttccgcctggacaatcggtaccagcccatggaacccaacccccgtgtccccctcagcagggtcttttttgcctcctggagggtcgtgctggaaggtggcattgaccccatcctccggggcctcatggccacccctgccaagctgaatcgtcagaaccaaattgcagtggatgagatccgggagcgattgtttgagcaggtcatgaggattgggctggacctgcctgctctgaacatgcagcgcagcagggaccacggcctcccaggatacaatgcctggaggcgcttctgtgggctcccgcagcctgaaactgtgggccagctgggcacggtgctgaggaacctgaaattggcgaggaaactgatggagcagtatggcacgcccaacaacatcgacatctggatgggcggcgtgtccgagcctctgaagcgcaaaggccgcgtgggcccactcctcgcctgcatcatcggtacccagttcaggaagctccgggatggtgatcggttttggtgggagaacgagggtgtgttcagcatgcagcagcgacaggccctggcccagatctcattgccccggatcatctgcgacaacacaggcatcaccaccgtgtctaagaacaacatcttcatgtccaactcatatccccgggactttgtcaactgcagtacacttcctgcattgaacctggcttcctggagggaagcctcctagaggccaggtaagggggtgcagcagtgaggggtatatctgggctggccagttggaaccacggagatctccttgccctagatgagcccagccctgttctgggtgcagctgagaaaatgagtgactagacgttcatttgtgtgctcatgtatgtgcgaagtatataaattggcttttcatgcgtgtgtgttgtctgaacatggggagtgtttcatgggttatgtgtatgtgccatttatgtgagtgtgtgtttgtgctgatgagaatactgagtatgtggaaggcagcagagcggactggtgaggagcacagctcaggaactagactgcctgggttccaatcctggctctgtggcttgctagctatgtgaccttgagcaaattaccctccttaaacaagagttttcttccttgtaaattacatctgtcatggtttcttggagggcccacttgtatcctctggttcttcatttattgagcacctactacatgcaaggcactgtactaggcgtgagaagcatatagaggcaagaaagagataccaagatgccatctgtgtcctggttagcagagctggaccagtggtgccttggagggataagccagctgcagctgggctgtgtggttgacttatgggcccagccagccaggctcaggccatggctcccctttttcttcctcaccctgatttcttgcttattcactgaagttctcctgaagaggaactgggcctgttgccctttctgtaccatttatttgctcccaatgtttatgataataaaggcaccgctgatggggacctccactctgtctgtgtct

SEQ ID NO: 450769 - DNA, 846 bp, Homo sapiens
atcaccttggctctagggagctagggtggggagcagtctggttttctcccatcttggagatctggtctgactctctagcctcagttcctctgactctgcttccatatctgataataaacagtggggtggggatggccctcagagggaactggctacttcctatgtgttgtggctcgctgtgacccaggaagccagggcctgggagcatcccaatcttgcaagtctgaatggcataatctcctgagacctatatgtccctggggtcatgtagtgaccggtgaggacctgctcactggggccaccaccttggcaccaggcactgcttgtgcccagccctcttctcgaatcctcctgaccctacctggacttgtccctgactccaatctgagctctgatactgagccagatacttcccctgacctggctcctctggtccccaggtggcattgaccccatcctccggggcctcatggccacccctgccaagctgaatcgtcagaaccaaattgcagtggatgagatccgggagcgattgtttgagcaggtcatgaggattgggctggacctgcctgctctgaacatgcagcgcagcagggaccacggcctcccaggtgaggggctgcaggagtctcccctgatgctcacctcccctgagctgcctcctaggtagcccatcaccccccttcccactctagggtccctgccctctccaaagcatattagaggcactttgctctcaggaagtagcctgaggccaggcccctgccttttcccggacccacctgataaatttccagctcctctcaacctcctcttgcatgctgcaattccacaggggggccatcg

SEQ ID NO: 450770 - DNA, 3189 bp, Homo sapiens
  misc_feature (159)..(159): n is a, c, g, or t
  misc_feature (181)..(181): n is a, c, g, or t
  misc_feature (265)..(265): n is a, c, g, or t
tgcatcaacgcgttgggagctctccatattgtctgactgcaggcggctggaattcactagtgattatcccgggtcctgggtaggggacacccgttccagtgagatgcccgagctcacctccatgcacaccctcttacttcgggagcacaaccggctggncacagagctcaagagcctgaancctaggtgggatggggagaggctctaccaggaagcccggaagatcgtgggggccatggtccagatcatcacttaccgggactancagccctctgaaggtgctgctctagctgtcctgggggaggtggacacctcgttggtgctgagctccatggaggaggccaagcagctggtggacaaggcctacaaggagcggcgggaaagcatcaagcagcggcttcgcagcggctcagccagccccatggaactcctatcctacttcaagcagccggtggcagccaccaggacggcggtgagggccgctgactacctgcacgtggctctagacctgctggagaggaagctgcggtccctgtggcgaaggccattcaatgtcactgatgtgctgacgcccgcccagctgaatgtgttgtccaagtcaagcggctgcgcctaccaggacgtgggggtgacttgcccggagcaggacaaataccgcaccatcaccgggatgtgcaacaacagacgcagccccacgctgggggcctccaaccgtgcctttgtgcgctggctgccggcggagtatgaggacggcttctctcttccctacggctggacgcccggggtcaagcgcaacggcttcccggtggctctggctcgcgcggtctccaacgagatcgtgcgcttccccactgatcagctgactccggaccaggagcgctcactcatgttcatgcaatggggccagctgttggaccacgacctcgacttcacccctgagccggccgcccgggcctccttcgtcactggcgtcaactgcgagaccagctgcgttcagcagccgccctgcttcccgctcaagatcccgcccaatgacccccgcatcaagaaccaagccgactgcatcccgttcttccgctcctgcccggcttgccccgggagcaacatcaccatccgcaaccagatcaacgcgctcacttccttcgtggacgccagcatggtgtacggcagcgaggagcccctggccaggaacctgcgcaacatgtccaaccagctggggctgctggccgtcaaccagcgcttccaagacaacggccgggccctgctgccctttgacaacctgcacgatgacccctgtctcctcaccaaccgctcagcgcgcatcccctgcttcctggcaggggacacccgttccagtgagatgcccgagctcacctccatgcacaccctcttacttcgggagcacaaccggctggccacagagctcaagagcctgaaccctaggtgggatggggagaggctctaccaggaagcccggaagatcgtgggggccatggtccagatcatcacttaccgggactacctgcccctggtgctggggccaacggccatgaggaagtacctgcccacgtaccgttcctacaatgactcagtggacccacgcatcgccaacgtcttcaccaatgccttccgctacggccacaccctcatccaacccttcatgttccgcctggacaatcggtaccagcccatggaacccaacccccgtgtccccctcagcagggtcttttttgcctcctggagggtcgtgctggaaggtggcattgaccccatcctccggggcctcatggccacccctgccaagctgaatcgtcagaaccaaattgcagtggatgagatccgggagcgattgtttgagcaggtcatgaggattgggctggacctgcctgctctgaacatgcagcgcagcagggaccacggcctcccaggatacaatgcctggaggcgcttctgtgggctcccgcagcctgaaactgtgggccagctgggcacggtgctgaggaacctgaaattggcgaggaaactgatggagcagtatggcacgcccaacaacatcgacatctggatgggcggcgtgtccgagcctctgaagcgcaaaggccgcgtgggcccactcctcgcctgcatcatcggtacccagttcaggaagctccgggatggtgatcggttttggtgggagaacgagggtgtgttcagcatgcagcagcgacaggccctggcccagatctcattgccccggatcatctgcgacaacacaggcatcaccaccgtgtctaagaacaacatcttcatgtccaactcatatccccgggactttgtcaactgcagtacacttcctgcattgaacctggcttcctggagggaagcctcctagaggccaggtaagggggtgcagcagtgaggggtatatctgggctggccagttggaaccacggagatctccttgccctagatgagcccagccctgttctgggtgcagctgagaaaatgagtgactagacgttcatttgtgtgctcatgtatgtgcgaagtatataaattggcttttcatgcgtgtgtgttgtctgaacatggggagtgtttcatgggttatgtgtatgtgccatttatgtgagtgtgtgtttgtgctgatgagaatactgagtatgtggaaggcagcagagcggactggtgaggagcacagctcaggaactagactgcctgggttccaatcctggctctgtggcttgctagctatgtgaccttgagcaaattaccctccttaaacaagagttttcttccttgtaaattacatctgtcatggtttcttggagggcccacttgtatcctctggttcttcatttattgagcacctactacatgcaaggcactgtactaggcgtgagaagcatatagaggcaagaaagagataccaagatgccatctgtgtcctggttagcagagctggaccagtggtgccttggagggataagccagctgcagctgggctgtgtggttgacttatgggcccagccagccaggctcaggccatggctcccctttttcttcctcaccctgatttcttgcttattcactgaagttctcctgaagaggaactgggcctgttgccctttctgtaccatttatttgctcccaatgtttatgataataaaggcaccgctgatggggacctccactctgtctgtgtct

SEQ ID NO: 450771 - DNA, 3103 bp, Homo sapiens
ttgaatgcagtggattccatgcagcgtgattgaatgcagtggattccatgcagcctggtaaaatgcatcccgattgaatgcagtggattccatacagcgtgattgaatacagtggattccatgcagcctggtaaaatgcatcccgattgaatgcagtggattacgtgcagcatgagatgaccagtcctggtggtgctgctccagctgtcctgggggaggtggacacctcgttggtgctgagctccatggaggaggccaagcagctggtggacaaggcctacaaggagcggcgggaaagcatcaagcagcggcttcgcagcggctcagccagccccatggaactcctatcctacttcaagcagccggtggcagccaccaggacggcggtgagggccgctgactacctgcacgtggctctagacctgctggagaggaagctgcggtccctgtggcgaaggccattcaatgtcactgatgtgctgacgcccgcccagctgaatgtgttgtccaagtcaagcggctgcgcctaccaggacgtgggggtgacttgcccggagcaggacaaataccgcaccatcaccgggatgtgcaacaacagacgcagccccacgctgggggcctccaaccgtgcctttgtgcgctggctgccggcggagtatgaggacggcttctctcttccctacggctggacgcccggggtcaagcgcaacggcttcccggtggctctggctcgcgcggtctccaacgagatcgtgcgcttccccactgatcagctgactccggaccaggagcgctcactcatgttcatgcaatggggccagctgttggaccacgacctcgacttcacccctgagccggccgcccgggcctccttcgtcactggcgtcaactgcgagaccagctgcgttcagcagccgccctgcttcccgctcaagatcccgcccaatgacccccgcatcaagaaccaagccgactgcatcccgttcttccgctcctgcccggcttgccccgggagcaacatcaccatccgcaaccagatcaacgcgctcacttccttcgtggacgccagcatggtgtacggcagcgaggagcccctggccaggaacctgcgcaacatgtccaaccagctggggctgctggccgtcaaccagcgcttccaagacaacggccgggccctgctgccctttgacaacctgcacgatgacccctgtctcctcaccaaccgctcagcgcgcatcccctgcttcctggcaggggacacccgttccagtgagatgcccgagctcacctccatgcacaccctcttacttcgggagcacaaccggctggccacagagctcaagagcctgaaccctaggtgggatggggagaggctctaccaggaagcccggaagatcgtgggggccatggtccagatcatcacttaccgggactacctgcccctggtgctggggccaacggccatgaggaagtacctgcccacgtaccgttcctacaatgactcagtggacccacgcatcgccaacgtcttcaccaatgccttccgctacggccacaccctcatccaacccttcatgttccgcctggacaatcggtaccagcccatggaacccaacccccgtgtccccctcagcagggtcttttttgcctcctggagggtcgtgctggaaggtggcattgaccccatcctccggggcctcatggccacccctgccaagctgaatcgtcagaaccaaattgcagtggatgagatccgggagcgattgtttgagcaggtcatgaggattgggctggacctgcctgctctgaacatgcagcgcagcagggaccacggcctcccaggatacaatgcctggaggcgcttctgtgggctcccgcagcctgaaactgtgggccagctgggcacggtgctgaggaacctgaaattggcgaggaaactgatggagcagtatggcacgcccaacaacatcgacatctggatgggcggcgtgtccgagcctctgaagcgcaaaggccgcgtgggcccactcctcgcctgcatcatcggtacccagttcaggaagctccgggatggtgatcggttttggtgggagaacgagggtgtgttcagcatgcagcagcgacaggccctggcccagatctcattgccccggatcatctgcgacaacacaggcatcaccaccgtgtctaagaacaacatcttcatgtccaactcatatccccgggactttgtcaactgcagtacacttcctgcattgaacctggcttcctggagggaagcctcctagaggccaggtaagggggtgcagcagtgaggggtatatctgggctggccagttggaaccacggagatctccttgccctagatgagcccagccctgttctgggtgcagctgagaaaatgagtgactagacgttcatttgtgtgctcatgtatgtgcgaagtatataaattggcttttcatgcgtgtgtgttgtctgaacatggggagtgtttcatgggttatgtgtatgtgccatttatgtgagtgtgtgtttgtgctgatgagaatactgagtatgtggaaggcagcagagcggactggtgaggagcacagctcaggaactagactgcctgggttccaatcctggctctgtggcttgctagctatgtgaccttgagcaaattaccctccttaaacaagagttttcttccttgtaaattacatctgtcatggtttcttggagggcccacttgtatcctctggttcttcatttattgagcacctactacatgcaaggcactgtactaggcgtgagaagcatatagaggcaagaaagagataccaagatgccatctgtgtcctggttagcagagctggaccagtggtgccttggagggataagccagctgcagctgggctgtgtggttgacttatgggcccagccagccaggctcaggccatggctcccctttttcttcctcaccctgatttcttgcttattcactgaagttctcctgaagaggaactgggcctgttgccctttctgtaccatttatttgctcccaatgtttatgataataaaggcaccgctgatggggacctccactctgtctgtgtct

SEQ ID NO: 450772 - DNA, 4096 bp, Homo sapiens
tgacaatatcaggtgagctgtggaggtggggtccttggaagctggatgacagcagctggcaaggggataagagagcagtgagcccctccctcaaggaggtctggctttatccatagacagggccctctgaggtggggctgaggtacaaagggggattgagcagcccaggagaagagagatgggggttcccttcttctcttctctcagatgcatggtggacttaggaccttgctgggctgggggtctcactgcagagatgaagctgcttctggccctagcagggctcctggccattctggccacgccccagccctctgaaggtgctgctccagctgtcctgggggaggtggacacctcgttggtgctgagctccatggaggaggccaagcagctggtggacaaggcctacaaggagcggcgggaaagcatcaagcagcggcttcgcagcggctcagccagccccatggaactcctatcctacttcaagcagccggtggcagccaccaggacggcggtgagggccgctgactacctgcacgtggctctagacctgctggagaggaagctgcggtccctgtggcgaaggccattcaatgtcactgatgtgctgacgcccgcccagctgaatgtgttgtccaagtcaagcggctgcgcctaccaggacgtgggggtgacttgcccggagcaggacaaataccgcaccatcaccgggatgtgcaacaacagacgcagccccacgctgggggcctccaaccgtgcctttgtgcgctggctgccggcggagtatgaggacggcttctctcttccctacggctggacgcccggggtcaagcgcaacggcttcccggtggctctggctcgcgcggtctccaacgagatcgtgcgcttccccactgatcagctgactccggaccaggagcgctcactcatgttcatgcaatggggccagctgttggaccacgacctcgacttcacccctgagccggccgcccgggcctccttcgtcactggcgtcaactgcgagaccagctgcgttcagcagccgccctgcttcccgctcaagaaggtggccctgcttcccgcccactgcctgggttgggagaggggagattgtttctggaaggggccatctcccttctgtgcccaggtttcctttcccagacgctgaggaaggctggccctgcctcccttgtgtccacagcactggctgctcagctatgacctgtctccttcctgcgcctgggctcagccagctggcagccagggccgtccatttgctcactgcctctggcaggccaagggagagagggttgttcctccttggctgacaggagtcctgttggtggaatcactggctctttgttaggttgggagagggttctgggaggagaccttctcagtgccccccaagcctccatgctcagtcctgtttccgccccactgagagggcagccccaacccccatcacacagaaagagagagcctgggggtctggtgggtgccgtgggacagggctgggagtgggcagggtggtcgaggcactgctgagtagggaaggaggaggagagaaaggagagagcgcctgagagagggagagacagacaggagaatgtcagggccagagggagagcaggcacagcagagagaaggggagagagacgggcgacgctttagtgaggagggatccgaggcctggcggtgcccagacccaggggttgcccaggttcccagttcagtgttctgctcattaaccctgcacctcagaggctgttgctgatggcgccctaggcagcgatccctttcgggcctccggaggcctctctgcaggttgagggtaccagaggtcctgagggcagggggagatccagttctgcctgggcaccttccttgccctcggtgagccagtctagcctctctctgtgcctcagatcccgcccaatgacccccgcatcaagaaccaagccgactgcatcccgttcttccgctcctgcccggcttgccccgggagcaacatcaccatccgcaaccagatcaacgcgctcacttccttcgtggacgccagcatggtgtacggcagcgaggagcccctggccaggaacctgcgcaacatgtccaaccagctggggctgctggccgtcaaccagcgcttccaagacaacggccgggccctgctgccctttgacaacctgcacgatgacccctgtctcctcaccaaccgctcagcgcgcatcccctgcttcctggcaggggacacccgttccagtgagatgcccgagctcacctccatgcacaccctcttacttcgggagcacaaccggctggccacagagctcaagagcctgaaccctaggtgggatggggagaggctctaccaggaagcccggaagatcgtgggggccatggtccagatcatcacttaccgggactacctgcccctggtgctggggccaacggccatgaggaagtacctgcccacgtaccgttcctacaatgactcagtggacccacgcatcgccaacgtcttcaccaatgccttccgctacggccacaccctcatccaacccttcatgttccgcctggacaatcggtaccagcccatggaacccaacccccgtgtccccctcagcagggtcttttttgcctcctggagggtcgtgctggaaggtggcattgaccccatcctccggggcctcatggccacccctgccaagctgaatcgtcagaaccaaattgcagtggatgagatccgggagcgattgtttgagcaggtcatgaggattgggctggacctgcctgctctgaacatgcagcgcagcagggaccacggcctcccaggatacaatgcctggaggcgcttctgtgggctcccgcagcctgaaactgtgggccagctgggcacggtgctgaggaacctgaaattggcgaggaaactgatggagcagtatggcacgcccaacaacatcgacatctggatgggcggcgtgtccgagcctctgaagcgcaaaggccgcgtgggcccactcctcgcctgcatcatcggtacccagttcaggaagctccgggatggtgatcggttttggtgggagaacgagggtgtgttcagcatgcagcagcgacaggccctggcccagatctcattgccccggatcatctgcgacaacacaggcatcaccaccgtgtctaagaacaacatcttcatgtccaactcatatccccgggactttgtcaactgcagtacacttcctgcattgaacctggcttcctggagggaagcctcctagaggccaggtaagggggtgcagcagtgaggggtatatctgggctggccagttggaaccacggagatctccttgccctagatgagcccagccctgttctgggtgcagctgagaaaatgagtgactagacgttcatttgtgtgctcatgtatgtgcgaagtatataaattggcttttcatgcgtgtgtgttgtctgaacatggggagtgtttcatgggttatgtgtatgtgccatttatgtgagtgtgtgtttgtgctgatgagaatactgagtatgtggaaggcagcagagcggactggtgaggagcacagctcaggaactagactgcctgggttccaatcctggctctgtggcttgctagctatgtgaccttgagcaaattaccctccttaaacaagagttttcttccttgtaaattacatctgtcatggtttcttggagggcccacttgtatcctctggttcttcatttattgagcacctactacatgcaaggcactgtactaggcgtgagaagcatatagaggcaagaaagagataccaagatgccatctgtgtcctggttagcagagctggaccagtggtgccttggagggataagccagctgcagctgggctgtgtggttgacttatgggcccagccagccaggctcaggccatggctcccctttttcttcctcaccctgatttcttgcttattcactgaagttctcctgaagaggaactgggcctgttgccctttctgtaccatttatttgctcccaatgtttatgataataaaggcaccgctgatggggacctccactctgtctgtgtct

SEQ ID NO: 450773 - DNA, 3313 bp, Homo sapiens
tgacaatatcaggtgagctgtggaggtggggtccttggaagctggatgacagcagctggcaaggggataagagagcagtgagcccctccctcaaggaggtctggctttatccatagacagggccctctgaggtggggctgaggtacaaagggggattgagcagcccaggagaagagagatgggggttcccttcttctcttctctcagatgcatggtggacttaggaccttgctgggctgggggtctcactgcagagatgaagctgcttctggccctagcagggctcctggccattctggccacgccccagccctctgaaggtgctgctccagctgtcctgggggaggtggacacctcgttggtgctgagctccatggaggaggccaagcagctggtggacaaggcctacaaggagcggcgggaaaggtggggcacgaggcactgcccagctctgggcaaggatgtcccaggcctttcagagaagcagcaggcagcagggagcttgaagcatcaagcagcggcttcgcagcggctcagccagccccatggaactcctatcctacttcaagcagccggtggcagccaccaggacggcggtgagggccgctgactacctgcacgtggctctagacctgctggagaggaagctgcggtccctgtggcgaaggccattcaatgtcactgatgtgctgacgcccgcccagctgaatgtgttgtccaagtcaagcggctgcgcctaccaggacgtgggggtgacttgcccggagcaggacaaataccgcaccatcaccgggatgtgcaacaacagacgcagccccacgctgggggcctccaaccgtgcctttgtgcgctggctgccggcggagtatgaggacggcttctctcttccctacggctggacgcccggggtcaagcgcaacggcttcccggtggctctggctcgcgcggtctccaacgagatcgtgcgcttccccactgatcagctgactccggaccaggagcgctcactcatgttcatgcaatggggccagctgttggaccacgacctcgacttcacccctgagccggccgcccgggcctccttcgtcactggcgtcaactgcgagaccagctgcgttcagcagccgccctgcttcccgctcaagatcccgcccaatgacccccgcatcaagaaccaagccgactgcatcccgttcttccgctcctgcccggcttgccccgggagcaacatcaccatccgcaaccagatcaacgcgctcacttccttcgtggacgccagcatggtgtacggcagcgaggagcccctggccaggaacctgcgcaacatgtccaaccagctggggctgctggccgtcaaccagcgcttccaagacaacggccgggccctgctgccctttgacaacctgcacgatgacccctgtctcctcaccaaccgctcagcgcgcatcccctgcttcctggcaggggacacccgttccagtgagatgcccgagctcacctccatgcacaccctcttacttcgggagcacaaccggctggccacagagctcaagagcctgaaccctaggtgggatggggagaggctctaccaggaagcccggaagatcgtgggggccatggtccagatcatcacttaccgggactacctgcccctggtgctggggccaacggccatgaggaagtacctgcccacgtaccgttcctacaatgactcagtggacccacgcatcgccaacgtcttcaccaatgccttccgctacggccacaccctcatccaacccttcatgttccgcctggacaatcggtaccagcccatggaacccaacccccgtgtccccctcagcagggtcttttttgcctcctggagggtcgtgctggaaggtggcattgaccccatcctccggggcctcatggccacccctgccaagctgaatcgtcagaaccaaattgcagtggatgagatccgggagcgattgtttgagcaggtcatgaggattgggctggacctgcctgctctgaacatgcagcgcagcagggaccacggcctcccaggatacaatgcctggaggcgcttctgtgggctcccgcagcctgaaactgtgggccagctgggcacggtgctgaggaacctgaaattggcgaggaaactgatggagcagtatggcacgcccaacaacatcgacatctggatgggcggcgtgtccgagcctctgaagcgcaaaggccgcgtgggcccactcctcgcctgcatcatcggtacccagttcaggaagctccgggatggtgatcggttttggtgggagaacgagggtgtgttcagcatgcagcagcgacaggccctggcccagatctcattgccccggatcatctgcgacaacacaggcatcaccaccgtgtctaagaacaacatcttcatgtccaactcatatccccgggactttgtcaactgcagtacacttcctgcattgaacctggcttcctggagggaagcctcctagaggccaggtaagggggtgcagcagtgaggggtatatctgggctggccagttggaaccacggagatctccttgccctagatgagcccagccctgttctgggtgcagctgagaaaatgagtgactagacgttcatttgtgtgctcatgtatgtgcgaagtatataaattggcttttcatgcgtgtgtgttgtctgaacatggggagtgtttcatgggttatgtgtatgtgccatttatgtgagtgtgtgtttgtgctgatgagaatactgagtatgtggaaggcagcagagcggactggtgaggagcacagctcaggaactagactgcctgggttccaatcctggctctgtggcttgctagctatgtgaccttgagcaaattaccctccttaaacaagagttttcttccttgtaaattacatctgtcatggtttcttggagggcccacttgtatcctctggttcttcatttattgagcacctactacatgcaaggcactgtactaggcgtgagaagcatatagaggcaagaaagagataccaagatgccatctgtgtcctggttagcagagctggaccagtggtgccttggagggataagccagctgcagctgggctgtgtggttgacttatgggcccagccagccaggctcaggccatggctcccctttttcttcctcaccctgatttcttgcttattcactgaagttctcctgaagaggaactgggcctgttgccctttctgtaccatttatttgctcccaatgtttatgataataaaggcaccgctgatggggacctccactctgtctgtgtct

SEQ ID NO: 450774 - DNA, 3380 bp, Homo sapiens
tgacaatatcaggtgagctgtggaggtggggtccttggaagctggatgacagcagctggcaaggggataagagagcagtgagcccctccctcaaggaggtctggctttatccatagacagggccctctgaggtggggctgaggtacaaagggggattgagcagcccaggagaagagagatgggggttcccttcttctcttctctcagatgcatggtggacttaggaccttgctgggctgggggtctcactgcagagatgaagctgcttctggccctagcagggctcctggccattctggccacgccccagccctctgaaggtgctgctccagctgtcctgggggaggtggacacctcgttggtgctgagctccatggaggaggccaagcagctggtggacaaggcctacaaggagcggcgggaaagcatcaagcagcggcttcgcagcggctcagccagccccatggaactcctatcctacttcaagcagccggtggcagccaccaggacggcggtgagggccgctgactacctgcacgtggctctagacctgctggagaggaagctgcggtccctgtggcgaaggccattcaatgtcactggtactgttgcccatcacaccccaggtccctgctccactagtgactcctcctagggaccccagtcgtctctcagtgatcccctcagcctcaggttgcctgggataggaagtgaggcggctcagctcccccattgttctttcccccggcagatgtgctgacgcccgcccagctgaatgtgttgtccaagtcaagcggctgcgcctaccaggacgtgggggtgacttgcccggagcaggacaaataccgcaccatcaccgggatgtgcaacaacagacgcagccccacgctgggggcctccaaccgtgcctttgtgcgctggctgccggcggagtatgaggacggcttctctcttccctacggctggacgcccggggtcaagcgcaacggcttcccggtggctctggctcgcgcggtctccaacgagatcgtgcgcttccccactgatcagctgactccggaccaggagcgctcactcatgttcatgcaatggggccagctgttggaccacgacctcgacttcacccctgagccggccgcccgggcctccttcgtcactggcgtcaactgcgagaccagctgcgttcagcagccgccctgcttcccgctcaagatcccgcccaatgacccccgcatcaagaaccaagccgactgcatcccgttcttccgctcctgcccggcttgccccgggagcaacatcaccatccgcaaccagatcaacgcgctcacttccttcgtggacgccagcatggtgtacggcagcgaggagcccctggccaggaacctgcgcaacatgtccaaccagctggggctgctggccgtcaaccagcgcttccaagacaacggccgggccctgctgccctttgacaacctgcacgatgacccctgtctcctcaccaaccgctcagcgcgcatcccctgcttcctggcaggggacacccgttccagtgagatgcccgagctcacctccatgcacaccctcttacttcgggagcacaaccggctggccacagagctcaagagcctgaaccctaggtgggatggggagaggctctaccaggaagcccggaagatcgtgggggccatggtccagatcatcacttaccgggactacctgcccctggtgctggggccaacggccatgaggaagtacctgcccacgtaccgttcctacaatgactcagtggacccacgcatcgccaacgtcttcaccaatgccttccgctacggccacaccctcatccaacccttcatgttccgcctggacaatcggtaccagcccatggaacccaacccccgtgtccccctcagcagggtcttttttgcctcctggagggtcgtgctggaaggtggcattgaccccatcctccggggcctcatggccacccctgccaagctgaatcgtcagaaccaaattgcagtggatgagatccgggagcgattgtttgagcaggtcatgaggattgggctggacctgcctgctctgaacatgcagcgcagcagggaccacggcctcccaggatacaatgcctggaggcgcttctgtgggctcccgcagcctgaaactgtgggccagctgggcacggtgctgaggaacctgaaattggcgaggaaactgatggagcagtatggcacgcccaacaacatcgacatctggatgggcggcgtgtccgagcctctgaagcgcaaaggccgcgtgggcccactcctcgcctgcatcatcggtacccagttcaggaagctccgggatggtgatcggttttggtgggagaacgagggtgtgttcagcatgcagcagcgacaggccctggcccagatctcattgccccggatcatctgcgacaacacaggcatcaccaccgtgtctaagaacaacatcttcatgtccaactcatatccccgggactttgtcaactgcagtacacttcctgcattgaacctggcttcctggagggaagcctcctagaggccaggtaagggggtgcagcagtgaggggtatatctgggctggccagttggaaccacggagatctccttgccctagatgagcccagccctgttctgggtgcagctgagaaaatgagtgactagacgttcatttgtgtgctcatgtatgtgcgaagtatataaattggcttttcatgcgtgtgtgttgtctgaacatggggagtgtttcatgggttatgtgtatgtgccatttatgtgagtgtgtgtttgtgctgatgagaatactgagtatgtggaaggcagcagagcggactggtgaggagcacagctcaggaactagactgcctgggttccaatcctggctctgtggcttgctagctatgtgaccttgagcaaattaccctccttaaacaagagttttcttccttgtaaattacatctgtcatggtttcttggagggcccacttgtatcctctggttcttcatttattgagcacctactacatgcaaggcactgtactaggcgtgagaagcatatagaggcaagaaagagataccaagatgccatctgtgtcctggttagcagagctggaccagtggtgccttggagggataagccagctgcagctgggctgtgtggttgacttatgggcccagccagccaggctcaggccatggctcccctttttcttcctcaccctgatttcttgcttattcactgaagttctcctgaagaggaactgggcctgttgccctttctgtaccatttatttgctcccaatgtttatgataataaaggcaccgctgatggggacctccactctgtctgtgtct

SEQ ID NO: 450775 - DNA, 3232 bp, Homo sapiens
tgacaatatcaggtgagctgtggaggtggggtccttggaagctggatgacagcagctggcaaggggataagagagcagtgagcccctccctcaaggaggtctggctttatccatagacagggccctctgaggtggggctgaggtacaaagggggattgagcagcccaggagaagagagatgggggttcccttcttctcttctctcagatgcatggtggacttaggaccttgctgggctgggggtctcactgcagagatgaagctgcttctggccctagcagggctcctggccattctggccacgccccagccctctgaaggtgctgctccagctgtcctgggggaggtggacacctcgttggtgctgagctccatggaggaggccaagcagctggtggacaaggcctacaaggagcggcgggaaagcatcaagcagcggcttcgcagcggctcagccagccccatggaactcctatcctacttcaagcagccggtggcagccaccaggacggcggtgagggccgctgactacctgcacgtggctctagacctgctggagaggaagctgcggtccctgtggcgaaggccattcaatgtcactgatgtgctgacgcccgcccagctgaatgtgttgtccaagtcaagcggctgcgcctaccaggacgtgggggtgacttgcccggagcaggacaaataccgcaccatcaccgggatgtgcaacaacagacgcagccccacgctgggggcctccaaccgtgcctttgtgcgctggctgccggcggagtatgaggacggcttctctcttccctacggctggacgcccggggtcaagcgcaacggcttcccggtggctctggctcgcgcggtctccaacgagatcgtgcgcttccccactgatcagctgactccggaccaggagcgctcactcatgttcatgcaatcgcaacggttttccaatcaagaacttgagtttcacgactgacacggccgagcgggcatccttcctcactggcgttaaaggagagaccagttgcgtgcagcaaccgccatgctgctcgctcaagatcccgcccaatgacccccgcatcaagaaccaagccgactgcatcccgttcttccgctcctgcccggcttgccccgggagcaacatcaccatccgcaaccagatcaacgcgctcacttccttcgtggacgccagcatggtgtacggcagcgaggagcccctggccaggaacctgcgcaacatgtccaaccagctggggctgctggccgtcaaccagcgcttccaagacaacggccgggccctgctgccctttgacaacctgcacgatgacccctgtctcctcaccaaccgctcagcgcgcatcccctgcttcctggcaggggacacccgttccagtgagatgcccgagctcacctccatgcacaccctcttacttcgggagcacaaccggctggccacagagctcaagagcctgaaccctaggtgggatggggagaggctctaccaggaagcccggaagatcgtgggggccatggtccagatcatcacttaccgggactacctgcccctggtgctggggccaacggccatgaggaagtacctgcccacgtaccgttcctacaatgactcagtggacccacgcatcgccaacgtcttcaccaatgccttccgctacggccacaccctcatccaacccttcatgttccgcctggacaatcggtaccagcccatggaacccaacccccgtgtccccctcagcagggtcttttttgcctcctggagggtcgtgctggaaggtggcattgaccccatcctccggggcctcatggccacccctgccaagctgaatcgtcagaaccaaattgcagtggatgagatccgggagcgattgtttgagcaggtcatgaggattgggctggacctgcctgctctgaacatgcagcgcagcagggaccacggcctcccaggatacaatgcctggaggcgcttctgtgggctcccgcagcctgaaactgtgggccagctgggcacggtgctgaggaacctgaaattggcgaggaaactgatggagcagtatggcacgcccaacaacatcgacatctggatgggcggcgtgtccgagcctctgaagcgcaaaggccgcgtgggcccactcctcgcctgcatcatcggtacccagttcaggaagctccgggatggtgatcggttttggtgggagaacgagggtgtgttcagcatgcagcagcgacaggccctggcccagatctcattgccccggatcatctgcgacaacacaggcatcaccaccgtgtctaagaacaacatcttcatgtccaactcatatccccgggactttgtcaactgcagtacacttcctgcattgaacctggcttcctggagggaagcctcctagaggccaggtaagggggtgcagcagtgaggggtatatctgggctggccagttggaaccacggagatctccttgccctagatgagcccagccctgttctgggtgcagctgagaaaatgagtgactagacgttcatttgtgtgctcatgtatgtgcgaagtatataaattggcttttcatgcgtgtgtgttgtctgaacatggggagtgtttcatgggttatgtgtatgtgccatttatgtgagtgtgtgtttgtgctgatgagaatactgagtatgtggaaggcagcagagcggactggtgaggagcacagctcaggaactagactgcctgggttccaatcctggctctgtggcttgctagctatgtgaccttgagcaaattaccctccttaaacaagagttttcttccttgtaaattacatctgtcatggtttcttggagggcccacttgtatcctctggttcttcatttattgagcacctactacatgcaaggcactgtactaggcgtgagaagcatatagaggcaagaaagagataccaagatgccatctgtgtcctggttagcagagctggaccagtggtgccttggagggataagccagctgcagctgggctgtgtggttgacttatgggcccagccagccaggctcaggccatggctcccctttttcttcctcaccctgatttcttgcttattcactgaagttctcctgaagaggaactgggcctgttgccctttctgtaccatttatttgctcccaatgtttatgataataaaggcaccgctgatggggacctccactctgtctgtgtct

SEQ ID NO: 450776 - DNA, 2575 bp, Homo sapiens
tgacaatatcaggtgagctgtggaggtggggtccttggaagctggatgacagcagctggcaaggggataagagagcagtgagcccctccctcaaggaggtctggctttatccatagacagggccctctgaggtggggctgaggtacaaagggggattgagcagcccaggagaagagagatgggggttcccttcttctcttctctcagatgcatggtggacttaggaccttgctgggctgggggtctcactgcagagatgaagctgcttctggccctagcagggctcctggccattctggccacgccccagccctctgaaggtgctgctccagctgtcctgggggaggtggacacctcgttggtgctgagctccatggaggaggccaagcagctggtggacaaggcctacaaggagcggcgggaaagcatcaagcagcggcttcgcagcggctcagccagccccatggaactcctatcctacttcaagcagccggtggcagccaccaggacggcggtgagggccgctgactacctgcacgtggctctagacctgctggagaggaagctgcggtccctgtggcgaaggccattcaatgtcactgatgtgctgacgcccgcccagctgaatgtgttgtccaagtcaagcggctgcgcctaccaggacgtgggggtgacttgcccggagcaggacaaataccgcaccatcaccgggatgtgcaacaacagacgcagccccacgctgggggcctccaaccgtgcctttgtgcgctggctgccggcggagtatgaggacggcttctctcttccctacggctggacgcccggggtcaagcgcaacggcttcccggtggctctggctcgcgcggtctccaacgagatcgtgcgcttccccactgatcagctgactccggaccaggagcgctcactcatgttcatgcaatggggccagctgttggaccacgacctcgacttcacccctgagccggccgcccgggcctccttcgtcactggcgtcaactgcgagaccagctgcgttcagcagccgccctgcttcccgctcaagatcccgcccaatgacccccgcatcaagaaccaagccgactgcatcccgttcttccgctcctgcccggcttgccccgggagcaacatcaccatccgcaaccagatcaacgcgctcacttccttcgtggacgccagcatggtgtacggcagcgaggagcccctggccaggaacctgcgcaacatgtccaaccagctggggctgctggccgtcaaccagcgcttccaagacaacggccgggccctgctgccctttgacaacctgcacgatgacccctgtctcctcaccaaccgctcagcgcgcatcccctgcttcctggcaggggacacccgttccagtgagatgcccgagctcacctccatgcacaccctcttacttcgggagcacaaccggctggccacagagctcaagagcctgaaccctaggtgggatggggagaggctctaccaggaagcccggaagatcgtgggggccatggtccagatcatcacttaccgggactacctgcccctggtgctggggccaacggccatgaggaagtacctgcccacgtaccgttcctacaatgactcagtggacccacgcatcgccaacgtcttcaccaatgccttccgctacggccacaccctcatccaacccttcatgttccgcctggacaatcggtaccagcccatggaacccaacccccgtgtccccctcagcagggtcttttttgcctcctggagggtcgtgctggaaggtggcattgaccccatcctccggggcctcatggccacccctgccaagctgaatcgtcagaaccaaattgcagtggatgagatccgggagcgattgtttgagcaggtcatgaggattgggctggacctgcctgctctgaacatgcagcgcagcagggaccacggcctcccaggatacaatgcctggaggcgcttctgtgggctcccgcagcctgaaactgtgggccagctgggcacggtgctgaggaacctgaaattggcgaggaaactgatggagcagtatggcacgcccaacaacatcgacatctggatgggcggcgtgtccgagcctctgaagcgcaaaggccgcgtgggcccactcctcgcctgcatcatcggtacccagttcaggaagctccgggatggtgatcggtgaggaggggcaggcgtcgtgggccgctgggtggctgtgggcccatccttgactctcttggagcccaaatttcctcctgtcagttgaaggactggagggagtcagtaattttccagtgtgttccaggaatcctccagatgccctggagtgcccacattgctttgcgcgccaagcaagtgggcacaattacatgaaataataataaccacaacaactaagttggttttttttttttttttctgtcttccagcttggagtgcagaggcatgatcttcgctcactgcaacatctgccttctggattctagcgattctcctgcctcagcctcccgagtagctgggattacaggtgcccacttgctgtgca

SEQ ID NO: 450777 - DNA, 2205 bp, Homo sapiens
tgacaatatcaggtgagctgtggaggtggggtccttggaagctggatgacagcagctggcaaggggataagagagcagtgagcccctccctcaaggaggtctggctttatccatagacagggccctctgaggtggggctgaggtacaaagggggattgagcagcccaggagaagagagatgggggttcccttcttctcttctctcagatgcatggtggacttaggaccttgctgggctgggggtctcactgcagagatgaagctgcttctggccctagcagggctcctggccattctggccacgccccagccctctgaaggtgctgctccagctgtcctgggggaggtggacacctcgttggtgctgagctccatggaggaggccaagcagctggtggacaaggcctacaaggagcggcgggaaagcatcaagcagcggcttcgcagcggctcagccagccccatggaactcctatcctacttcaagcagccggtggcagccaccaggacggcggtgagggccgctgactacctgcacgtggctctagacctgctggagaggaagctgcggtccctgtggcgaaggccattcaatgtcactgatgtgctgacgcccgcccagctgaatgtgttgtccaagtcaagcggctgcgcctaccaggacgtgggggtgacttgcccggagcaggacaaataccgcaccatcaccgggatgtgcaacaacagacgcagccccacgctgggggcctccaaccgtgcctttgtgcgctggctgccggcggagtatgaggacggcttctctcttccctacggctggacgcccggggtcaagcgcaacggcttcccggtggctctggctcgcgcggtctccaacgagatcgtgcgcttccccactgatcagctgactccggaccaggagcgctcactcatgttcatgcaatggggccagctgttggaccacgacctcgacttcacccctgagccggccgcccgggcctccttcgtcactggcgtcaactgcgagaccagctgcgttcagcagccgccctgcttcccgctcaagatcccgcccaatgacccccgcatcaagaaccaagccgactgcatcccgttcttccgctcctgcccggcttgccccgggagcaacatcaccatccgcaaccagatcaacgcgctcacttccttcgtggacgccagcatggtgtacggcagcgaggagcccctggccaggaacctgcgcaacatgtccaaccagctggggctgctggccgtcaaccagcgcttccaagacaacggccgggccctgctgccctttgacaacctgcacgatgacccctgtctcctcaccaaccgctcagcgcgcatcccctgcttcctggcaggggacacccgttccagtgagatgcccgagctcacctccatgcacaccctcttacttcgggagcacaaccggctggccacagagctcaagagcctgaaccctaggtgggatggggagaggctctaccaggaagcccggaagatcgtgggggccatggtccagatcatcacttaccgggactacctgcccctggtgctggggccaacggccatgaggaagtacctgcccacgtaccgttcctacaatgactcagtggacccacgcatcgccaacgtcttcaccaatgccttccgctacggccacaccctcatccaacccttcatgttccgcctggacaatcggtaccagcccatggaacccaacccccgtgtccccctcagcagggtcttttttgcctcctggagggtcgtgctggaaggtggcattgaccccatcctccggggcctcatggccacccctgccaagctgaatcgtcagaaccaaattgcagtggatgagatccgggagcgattgtttgagcaggtcatgaggattgggctggacctgcctgctctgaacatgcagcgcagcagggaccacggcctcccaggtgaggggctgcaggagtctcccctgatgctcacctcccctgagctgcctcctaggtagcccatcaccccccttcccactctagggtccctgccctctccaaagcatattagaggcactttgctctcaggaagtagcctgaggccaggcccctgccttttcccggacccacctgataaatttccagctcctctcaacctcctcttgcatgctgcaattccacaggggggccatcg

SEQ ID NO: 450778 - DNA, 1900 bp, Homo sapiens
  misc_feature (1)..(1): n is a, c, g, or t
  misc_feature (30)..(30): n is a, c, g, or t
  misc_feature (47)..(47): n is a, c, g, or t
ntcatgctcgtaccagactcggcacagtcngcgcgcatcccgcttcnggcagggacacccgttccagtgagatgcccgagctcacctccatgcacaccctcttacttcgggagcacaaccggctggccacagagctcaagagcctgaaccctaggtgggatggggagaggctctaccaggaagcccggaagatcgtgggggccatggtccagatcatcacttaccgggactacctgcccctggtgctggggccaacggccatgaggaagtacctgcccacgtaccgttcctacaatgactcagtggacccacgcatcgccaacgtcttcaccaatgccttccgctacggccacaccctcatccaacccttcatgttccgcctggacaatcggtaccagcccatggaacccaacccccgtgtccccctcagcagggtcttttttgcctcctggagggtcgtgctggaaggtggcattgaccccatcctccggggcctcatggccacccctgccaagctgaatcgtcagaaccaaattgcagtggatgagatccgggagcgattgtttgagcaggtcatgaggattgggctggacctgcctgctctgaacatgcagcgcagcagggaccacggcctcccaggatacaatgcctggaggcgcttctgtgggctcccgcagcctgaaactgtgggccagctgggcacggtgctgaggaacctgaaattggcgaggaaactgatggagcagtatggcacgcccaacaacatcgacatctggatgggcggcgtgtccgagcctctgaagcgcaaaggccgcgtgggcccactcctcgcctgcatcatcggtacccagttcaggaagctccgggatggtgatcggttttggtgggagaacgagggtgtgttcagcatgcagcagcgacaggccctggcccagatctcattgccccggatcatctgcgacaacacaggcatcaccaccgtgtctaagaacaacatcttcatgtccaactcatatccccgggactttgtcaactgcagtacacttcctgcattgaacctggcttcctggagggaagcctcctagaggccaggtaagggggtgcagcagtgaggggtatatctgggctggccagttggaaccacggagatctccttgccctagatgagcccagccctgttctgggtgcagctgagaaaatgagtgactagacgttcatttgtgtgctcatgtatgtgcgaagtatataaattggcttttcatgcgtgtgtgttgtctgaacatggggagtgtttcatgggttatgtgtatgtgccatttatgtgagtgtgtgtttgtgctgatgagaatactgagtatgtggaaggcagcagagcggactggtgaggagcacagctcaggaactagactgcctgggttccaatcctggctctgtggcttgctagctatgtgaccttgagcaaattaccctccttaaacaagagttttcttccttgtaaattacatctgtcatggtttcttggagggcccacttgtatcctctggttcttcatttattgagcacctactacatgcaaggcactgtactaggcgtgagaagcatatagaggcaagaaagagataccaagatgccatctgtgtcctggttagcagagctggaccagtggtgccttggagggataagccagctgcagctgggctgtgtggttgacttatgggcccagccagccaggctcaggccatggctcccctttttcttcctcaccctgatttcttgcttattcactgaagttctcctgaagaggaactgggcctgttgccctttctgtaccatttatttgctcccaatgtttatgataataaaggcaccgctgatggggacctccactctgtctgtgtct

SEQ ID NO: 450779 - DNA, 2113 bp, Homo sapiens
gtcatgtgttggaagtgatacctattgaatgagcatccccaaccagcagcggccctgagctgaggcagaagctatcattgtggactggggcatcagggaaggcctcctagaggagtgtaaattggggatagtttgaaaagatggatggggaggaggggtgagtaggaggcatttcaggccttggctggggagggggtttcagtggagcaaatcttttctgggatggaggccttaagaatgacagtggcttttgcctccccaagggggacacccgttccagtgagatgcccgagctcacctccatgcacaccctcttacttcgggagcacaaccggctggccacagagctcaagagcctgaaccctaggtgggatggggagaggctctaccaggaagcccggaagatcgtgggggccatggtccagatcatcacttaccgggactacctgcccctggtgctggggccaacggccatgaggaagtacctgcccacgtaccgttcctacaatgactcagtggacccacgcatcgccaacgtcttcaccaatgccttccgctacggccacaccctcatccaacccttcatgttccgcctggacaatcggtaccagcccatggaacccaacccccgtgtccccctcagcagggtcttttttgcctcctggagggtcgtgctggaaggtggcattgaccccatcctccggggcctcatggccacccctgccaagctgaatcgtcagaaccaaattgcagtggatgagatccgggagcgattgtttgagcaggtcatgaggattgggctggacctgcctgctctgaacatgcagcgcagcagggaccacggcctcccaggatacaatgcctggaggcgcttctgtgggctcccgcagcctgaaactgtgggccagctgggcacggtgctgaggaacctgaaattggcgaggaaactgatggagcagtatggcacgcccaacaacatcgacatctggatgggcggcgtgtccgagcctctgaagcgcaaaggccgcgtgggcccactcctcgcctgcatcatcggtacccagttcaggaagctccgggatggtgatcggttttggtgggagaacgagggtgtgttcagcatgcagcagcgacaggccctggcccagatctcattgccccggatcatctgcgacaacacaggcatcaccaccgtgtctaagaacaacatcttcatgtccaactcatatccccgggactttgtcaactgcagtacacttcctgcattgaacctggcttcctggagggaagcctcctagaggccaggtaagggggtgcagcagtgaggggtatatctgggctggccagttggaaccacggagatctccttgccctagatgagcccagccctgttctgggtgcagctgagaaaatgagtgactagacgttcatttgtgtgctcatgtatgtgcgaagtatataaattggcttttcatgcgtgtgtgttgtctgaacatggggagtgtttcatgggttatgtgtatgtgccatttatgtgagtgtgtgtttgtgctgatgagaatactgagtatgtggaaggcagcagagcggactggtgaggagcacagctcaggaactagactgcctgggttccaatcctggctctgtggcttgctagctatgtgaccttgagcaaattaccctccttaaacaagagttttcttccttgtaaattacatctgtcatggtttcttggagggcccacttgtatcctctggttcttcatttattgagcacctactacatgcaaggcactgtactaggcgtgagaagcatatagaggcaagaaagagataccaagatgccatctgtgtcctggttagcagagctggaccagtggtgccttggagggataagccagctgcagctgggctgtgtggttgacttatgggcccagccagccaggctcaggccatggctcccctttttcttcctcaccctgatttcttgcttattcactgaagttctcctgaagaggaactgggcctgttgccctttctgtaccatttatttgctcccaatgtttatgataataaaggcaccgctgatggggacctccactctgtctgtgtct

SEQ ID NO: 450780 - DNA, 1831 bp, Homo sapiens
cctgtttgcggcctgctgagaatactgagtatgtggaaggcagcagagcggactggtgaggagcactcaagagcctgaaccctaggtgggatggggagaggctctaccaggaagcccggaagatcgtgggggccatggtccagatcatcacttaccgggactacctgcccctggtgctggggccaacggccatgaggaagtacctgcccacgtaccgttcctacaatgactcagtggacccacgcatcgccaacgtcttcaccaatgccttccgctacggccacaccctcatccaacccttcatgttccgcctggacaatcggtaccagcccatggaacccaacccccgtgtccccctcagcagggtcttttttgcctcctggagggtcgtgctggaaggtggcattgaccccatcctccggggcctcatggccacccctgccaagctgaatcgtcagaaccaaattgcagtggatgagatccgggagcgattgtttgagcaggtcatgaggattgggctggacctgcctgctctgaacatgcagcgcagcagggaccacggcctcccaggatacaatgcctggaggcgcttctgtgggctcccgcagcctgaaactgtgggccagctgggcacggtgctgaggaacctgaaattggcgaggaaactgatggagcagtatggcacgcccaacaacatcgacatctggatgggcggcgtgtccgagcctctgaagcgcaaaggccgcgtgggcccactcctcgcctgcatcatcggtacccagttcaggaagctccgggatggtgatcggttttggtgggagaacgagggtgtgttcagcatgcagcagcgacaggccctggcccagatctcattgccccggatcatctgcgacaacacaggcatcaccaccgtgtctaagaacaacatcttcatgtccaactcatatccccgggactttgtcaactgcagtacacttcctgcattgaacctggcttcctggagggaagcctcctagaggccaggtaagggggtgcagcagtgaggggtatatctgggctggccagttggaaccacggagatctccttgccctagatgagcccagccctgttctgggtgcagctgagaaaatgagtgactagacgttcatttgtgtgctcatgtatgtgcgaagtatataaattggcttttcatgcgtgtgtgttgtctgaacatggggagtgtttcatgggttatgtgtatgtgccatttatgtgagtgtgtgtttgtgctgatgagaatactgagtatgtggaaggcagcagagcggactggtgaggagcacagctcaggaactagactgcctgggttccaatcctggctctgtggcttgctagctatgtgaccttgagcaaattaccctccttaaacaagagttttcttccttgtaaattacatctgtcatggtttcttggagggcccacttgtatcctctggttcttcatttattgagcacctactacatgcaaggcactgtactaggcgtgagaagcatatagaggcaagaaagagataccaagatgccatctgtgtcctggttagcagagctggaccagtggtgccttggagggataagccagctgcagctgggctgtgtggttgacttatgggcccagccagccaggctcaggccatggctcccctttttcttcctcaccctgatttcttgcttattcactgaagttctcctgaagaggaactgggcctgttgccctttctgtaccatttatttgctcccaatgtttatgataataaaggcaccgctgatggggacctccactctgtctgtgtct

SEQ ID NO: 450781 - DNA, 1789 bp, Homo sapiens
ctgtgtcctggttagcagagctggaccagtggtgccttggagggataagccagctgcagctgggctgtgtggatgacttatgggctcaggccatggtccagatcatcacttaccgggactacctgcccctggtgctggggccaacggccatgaggaagtacctgcccacgtaccgttcctacaatgactcagtggacccacgcatcgccaacgtcttcaccaatgccttccgctacggccacaccctcatccaacccttcatgttccgcctggacaatcggtaccagcccatggaacccaacccccgtgtccccctcagcagggtcttttttgcctcctggagggtcgtgctggaaggtggcattgaccccatcctccggggcctcatggccacccctgccaagctgaatcgtcagaaccaaattgcagtggatgagatccgggagcgattgtttgagcaggtcatgaggattgggctggacctgcctgctctgaacatgcagcgcagcagggaccacggcctcccaggatacaatgcctggaggcgcttctgtgggctcccgcagcctgaaactgtgggccagctgggcacggtgctgaggaacctgaaattggcgaggaaactgatggagcagtatggcacgcccaacaacatcgacatctggatgggcggcgtgtccgagcctctgaagcgcaaaggccgcgtgggcccactcctcgcctgcatcatcggtacccagttcaggaagctccgggatggtgatcggttttggtgggagaacgagggtgtgttcagcatgcagcagcgacaggccctggcccagatctcattgccccggatcatctgcgacaacacaggcatcaccaccgtgtctaagaacaacatcttcatgtccaactcatatccccgggactttgtcaactgcagtacacttcctgcattgaacctggcttcctggagggaagcctcctagaggccaggtaagggggtgcagcagtgaggggtatatctgggctggccagttggaaccacggagatctccttgccctagatgagcccagccctgttctgggtgcagctgagaaaatgagtgactagacgttcatttgtgtgctcatgtatgtgcgaagtatataaattggcttttcatgcgtgtgtgttgtctgaacatggggagtgtttcatgggttatgtgtatgtgccatttatgtgagtgtgtgtttgtgctgatgagaatactgagtatgtggaaggcagcagagcggactggtgaggagcacagctcaggaactagactgcctgggttccaatcctggctctgtggcttgctagctatgtgaccttgagcaaattaccctccttaaacaagagttttcttccttgtaaattacatctgtcatggtttcttggagggcccacttgtatcctctggttcttcatttattgagcacctactacatgcaaggcactgtactaggcgtgagaagcatatagaggcaagaaagagataccaagatgccatctgtgtcctggttagcagagctggaccagtggtgccttggagggataagccagctgcagctgggctgtgtggttgacttatgggcccagccagccaggctcaggccatggctcccctttttcttcctcaccctgatttcttgcttattcactgaagttctcctgaagaggaactgggcctgttgccctttctgtaccatttatttgctcccaatgtttatgataataaaggcaccgctgatggggacctccactctgtctgtgtct

SEQ ID NO: 450782 - DNA, 1872 bp, Homo sapiens
atcaccttggctctagggagctagggtggggagcagtctggttttctcccatcttggagatctggtctgactctctagcctcagttcctctgactctgcttccatatctgataataaacagtggggtggggatggccctcagagggaactggctacttcctatgtgttgtggctcgctgtgacccaggaagccagggcctgggagcatcccaatcttgcaagtctgaatggcataatctcctgagacctatatgtccctggggtcatgtagtgaccggtgaggacctgctcactggggccaccaccttggcaccaggcactgcttgtgcccagccctcttctcgaatcctcctgaccctacctggacttgtccctgactccaatctgagctctgatactgagccagatacttcccctgacctggctcctctggtccccaggtggcattgaccccatcctccggggcctcatggccacccctgccaagctgaatcgtcagaaccaaattgcagtggatgagatccgggagcgattgtttgagcaggtcatgaggattgggctggacctgcctgctctgaacatgcagcgcagcagggaccacggcctcccaggatacaatgcctggaggcgcttctgtgggctcccgcagcctgaaactgtgggccagctgggcacggtgctgaggaacctgaaattggcgaggaaactgatggagcagtatggcacgcccaacaacatcgacatctggatgggcggcgtgtccgagcctctgaagcgcaaaggccgcgtgggcccactcctcgcctgcatcatcggtacccagttcaggaagctccgggatggtgatcggttttggtgggagaacgagggtgtgttcagcatgcagcagcgacaggccctggcccagatctcattgccccggatcatctgcgacaacacaggcatcaccaccgtgtctaagaacaacatcttcatgtccaactcatatccccgggactttgtcaactgcagtacacttcctgcattgaacctggcttcctggagggaagcctcctagaggccaggtaagggggtgcagcagtgaggggtatatctgggctggccagttggaaccacggagatctccttgccctagatgagcccagccctgttctgggtgcagctgagaaaatgagtgactagacgttcatttgtgtgctcatgtatgtgcgaagtatataaattggcttttcatgcgtgtgtgttgtctgaacatggggagtgtttcatgggttatgtgtatgtgccatttatgtgagtgtgtgtttgtgctgatgagaatactgagtatgtggaaggcagcagagcggactggtgaggagcacagctcaggaactagactgcctgggttccaatcctggctctgtggcttgctagctatgtgaccttgagcaaattaccctccttaaacaagagttttcttccttgtaaattacatctgtcatggtttcttggagggcccacttgtatcctctggttcttcatttattgagcacctactacatgcaaggcactgtactaggcgtgagaagcatatagaggcaagaaagagataccaagatgccatctgtgtcctggttagcagagctggaccagtggtgccttggagggataagccagctgcagctgggctgtgtggttgacttatgggcccagccagccaggctcaggccatggctcccctttttcttcctcaccctgatttcttgcttattcactgaagttctcctgaagaggaactgggcctgttgccctttctgtaccatttatttgctcccaatgtttatgataataaaggcaccgctgatggggacctccactctgtctgtgtct

SEQ ID NO: 450783 - DNA, 1573 bp, Homo sapiens
gtctcgcagtgctccggtacggtgacgcctcactcgtgcctggtgttccggctgcacaatcggtacgtgcccttggaaccccagccccgtgttctcctcagtagggtcttttgtgccttgctggaggattagtgttggaatgtggcattgaccccatcctccggggcctcatggccacccctgccaagctgaatcgtcagaaccaaattgcagtggatgagatccgggagcgattgtttgagcaggtcatgaggattgggctggacctgcctgctctgaacatgcagcgcagcagggaccacggcctcccaggatacaatgcctggaggcgcttctgtgggctcccgcagcctgaaactgtgggccagctgggcacggtgctgaggaacctgaaattggcgaggaaactgatggagcagtatggcacgcccaacaacatcgacatctggatgggcggcgtgtccgagcctctgaagcgcaaaggccgcgtgggcccactcctcgcctgcatcatcggtacccagttcaggaagctccgggatggtgatcggttttggtgggagaacgagggtgtgttcagcatgcagcagcgacaggccctggcccagatctcattgccccggatcatctgcgacaacacaggcatcaccaccgtgtctaagaacaacatcttcatgtccaactcatatccccgggactttgtcaactgcagtacacttcctgcattgaacctggcttcctggagggaagcctcctagaggccaggtaagggggtgcagcagtgaggggtatatctgggctggccagttggaaccacggagatctccttgccctagatgagcccagccctgttctgggtgcagctgagaaaatgagtgactagacgttcatttgtgtgctcatgtatgtgcgaagtatataaattggcttttcatgcgtgtgtgttgtctgaacatggggagtgtttcatgggttatgtgtatgtgccatttatgtgagtgtgtgtttgtgctgatgagaatactgagtatgtggaaggcagcagagcggactggtgaggagcacagctcaggaactagactgcctgggttccaatcctggctctgtggcttgctagctatgtgaccttgagcaaattaccctccttaaacaagagttttcttccttgtaaattacatctgtcatggtttcttggagggcccacttgtatcctctggttcttcatttattgagcacctactacatgcaaggcactgtactaggcgtgagaagcatatagaggcaagaaagagataccaagatgccatctgtgtcctggttagcagagctggaccagtggtgccttggagggataagccagctgcagctgggctgtgtggttgacttatgggcccagccagccaggctcaggccatggctcccctttttcttcctcaccctgatttcttgcttattcactgaagttctcctgaagaggaactgggcctgttgccctttctgtaccatttatttgctcccaatgtttatgataataaaggcaccgctgatggggacctccactctgtctgtgtct

SEQ ID NO: 450784 - DNA, 1104 bp, Homo sapiens
tgacaatatcaggtgagctgtggaggtggggtccttggaagctggatgacagcagctggcaaggggataagagagcagtgagcccctccctcaaggaggtctggctttatccatagacagggccctctgaggtggggctgaggtacaaagggggattgagcagcccaggagaagagagatgggggttcccttcttctcttctctcagatgcatggtggacttaggaccttgctgggctgggggtctcactgcagagatgaagctgcttctggccctagcagggctcctggccattctggccacgccccagccctctgaaggtgctgctccagctgtcctgggggaggtggacacctcgttggtgctgagctccatggaggaggccaagcagctggtggacaaggcctacaaggagcggcgggaaagcatcaagcagcggcttcgcagcggctcagccagccccatggaactcctatcctacttcaagcagccggtggcagccaccaggacggcggtgagggccgctgactacctgcacgtggctctagacctgctggagaggaagctgcggtccctgtggcgaaggccattcaatgtcactgatgtgctgacgcccgcccagctgaatgtgttgtccaagtcaagcggctgcgcctaccaggacgtgggggtgacttgcccggagcaggacaaataccgcaccatcaccgggatgtgcaacaacagacgcagccccacgctgggggcctccaaccgtgcctttgtgcgctggctgccggcggagtatgaggacggcttctctcttccctacggctggacgcccggggtcaagcgcaacggcttcccggtggctctggctcgcgcggtctccaacgagatcgtgcgcttccccactgatcagctgactccggaccaggagcgctcactcatgttcatgcaatggggccagctgttggaccacgacctcgacttcacccctgagccggccgcccgggcctccttcgtcactggcgtcaactgcgagaccagctgcgttcagcagccgccctgcttcccgctcaagatcccgcccaatacccgccgtcataagcggtagcgagctcg

SEQ ID NO: 450785 - DNA, 845 bp, Homo sapiens
agatctgcgtggttgcagctgaccagcacagatatagagctcgctgctccccatccatgcctggcacttagctggcttcccgccagcaagtcaggttcaatgcagtaagtgtgcggcagttcacaaagtgccgaggatatgagttggacatgaagacgttcatttgtgtgctcatgtatgtgcgaagtatataaattggcttttcatgcgtgtgtgttgtctgaacatggggagtgtttcatgggttatgtgtatgtgccatttatgtgagtgtgtgtttgtgctgatgagaatactgagtatgtggaaggcagcagagcggactggtgaggagcacagctcaggaactagactgcctgggttccaatcctggctctgtggcttgctagctatgtgaccttgagcaaattaccctccttaaacaagagttttcttccttgtaaattacatctgtcatggtttcttggagggcccacttgtatcctctggttcttcatttattgagcacctactacatgcaaggcactgtactaggcgtgagaagcatatagaggcaagaaagagataccaagatgccatctgtgtcctggttagcagagctggaccagtggtgccttggagggataagccagctgcagctgggctgtgtggttgacttatgggcccagccagccaggctcaggccatggctcccctttttcttcctcaccctgatttcttgcttattcactgaagttctcctgaagaggaactgggcctgttgccctttctgtaccatttatttgctcccaatgtttatgataataaaggcaccgctgatggggacctccactctgtctgtgtct

SEQ ID NO: 450786 - DNA, 1081 bp, Homo sapiens
gtcatgtgttggaagtgatacctattgaatgagcatccccaaccagcagcggccctgagctgaggcagaagctatcattgtggactggggcatcagggaaggcctcctagaggagtgtaaattggggatagtttgaaaagatggatggggaggaggggtgagtaggaggcatttcaggccttggctggggagggggtttcagtggagcaaatcttttctgggatggaggccttaagaatgacagtggcttttgcctccccaagggggacacccgttccagtgagatgcccgagctcacctccatgcacaccctcttacttcgggagcacaaccggctggccacagagctcaagagcctgaaccctaggtgggatggggagaggctctaccaggaagcccggaagatcgtgggggccatggtccaggtaggccgtcttgaacaccgggcacacgggatccagatgtgtccctgcaacatcctagctgtgtgaccttgggcaagttcctaacgctcctgagccttgccttcttcatccatgaggctgtaaggattataatacatatatgaaaacacctttcagatagtaagtgcttgacaaagcctccttcccttccctctccttcttcgcaggtttgctccctgcagtcttctttcctgtgggtctgttattggtgttgggagggttgaatgtttggtttagcgcccaagtagctgttcagtaaattcttcttccctccatctcactgtcactcttagctcctttacccactcacctcttctttttaaaattaaaaaaattatagggctgggcgcggtggctcatgcctgtaatcccagcactttgggaggcggaggcgggtggatcacgaggtcaggagatcaagaccatgctggctaacacggtgaaaccccatctctactaaaaatacaaaaattagccgggcgtggtggcgggcacctgtagtcccagctacttgggaggctgaggcaggagaatggcgtgaacccaggctggagtgcagtggtgcgatcttggctcactgcaacctccacctttcaggctcaagccattctcccatc

SEQ ID NO: 450787 - DNA, 1047 bp, Homo sapiens
tccttagcctcatttacccctggggcaatgttcctggttctgtctctcaacatctggtgcttcattgcccccaccctctccctcagaggcagaggcagacatacacacactcacacacacacacacacacacacacacactcctagattctggaggagagagttttcggtgctaagggtgagtttttgatttgcactaagaactcaagtgaaattcatttacactccaaaataacttctagactctagaatgtagagtgagactattccatgtcttcacttttcacagggaaaatcatgccagaatggcccttcgttccttcctgcctccctgctttccacaaacctaaactgagccttactgtgggcaggcacttggtgggcactgtgaagaatttcaacaacttcaatttcccttgctctcaaggactttataagatagttgcagaaatgagacattaataacttgaggacaaggaagttatcacaatgactaaaaaagtgatttgctatttagtcctctaaggcagagggcaatataattatccttaatgtacatttgaggaactcaggctcagagaggttaataattggtccaaggtcacccagccagcaagcagtagaactctatttatgcctctcagtgccactctgttaggcccaggtccggtattgtgggaggctattccctgaccatagagggatggaaggggtccccgaagccaagagcaggcagagactctggccctcctgtgctgccaggcggcatttgctgtggaggagtgggtggagaggccattccaaatgacttgtctttagatcatcacttaccgggaccccccgcactagtgcggtggggggttcccctgggtcatggactttccttggagtgtcctccagcgcaaaggacttcttcaaggatccccttgccatcccccatgggtgtgtgcctcatgctgtatcggttcccgaggaaactgccaaacagtcaaacctggggcctctggctgtgcttcacccatggagagggaataggtggcaggctaag

SEQ ID NO: 450788 - DNA, 426 bp, Homo sapiens
ccaacaacatcgacatctggatgggcggcgtgtccgagcctctgaagcgcaaaggccgcgtgggcccactcctcgcctgcatcatcggtacccagttcaggaagctccgggatggtgatcggtgaggaggggcaggcgtcgtgggccgctgggtggctgtgggcccatccttgactctcttggagcccaaatttcctcctgtcagttgaaggactggagggagtcagtaattttccagtgtgttccaggaatcctccagatgccctggagtgcccctaatgtgccctgaacctgttgggggtgcagcaaggaaagacctggacccctggttgtaaagggtggaagatagaaaagtgccacccttagctacttcttcccatgggtttcactgtgccaccatgtgggtgtcagtcaccagtgggcagt

SEQ ID NO: 450789 - DNA, 3289 bp, Homo sapiens
tgacaatatcaggtgagctgtggaggtggggtccttggaagctggatgacagcagctggcaaggggataagagagcagtgagcccctccctcaaggaggtctggctttatccatagacagggccctctgaggtggggctgaggtacaaagggggattgagcagcccaggagaagagagatgggggttcccttcttctcttctctcagatgcatggtggacttaggaccttgctgggctgggggtctcactgcagagatgaagctgcttctggccctagcagggctcctggccattctggccacgccccagccctctgaaggtgctgctccagctgtcctgggggaggtggacacctcgttggtgctgagctccatggaggaggccaagcagctggtggacaaggcctacaaggagcggcgggaaagcatcaagcagcggcttcgcagcggctcagccagccccatggaactcctatcctacttcaagcagccggtggcagccaccaggacggcggtgagggccgctgactacctgcacgtggctctagacctgctggagaggaagctgcggtccctgtggcgaaggccattcaatgtcactgatgtgctgacgcccgcccagctgaatgtgttgtccaagtcaagcggctgcgcctaccaggacgtgggggtgacttgcccggagcaggacaaataccgcaccatcaccgggatgtgcaacaacagacgcagccccacgctgggggcctccaaccgtgcctttgtgcgctggctgccggcggagtatgaggacggcttctctcttccctacggctggacgcccggggtcaagcgcaacggcttcccggtggctctggctcgcgcggtctccaacgagatcgtgcgcttccccactgatcagctgactccggaccaggagcgctcactcatgttcatgcaatggggccagctgttggaccacgacctcgacttcacccctgagccggccgcccgggcctccttcgtcactggcgtcaactgcgagaccagctgcgttcagcagccgccctgcttcccgctcaagatcccgcccaatgacccccgcatcaagaaccaagccgactgcatcccgttcttccgctcctgcccggcttgccccgggagcaacatcaccatccgcaaccagatcaacgcgctcacttccttcgtggacgccagcatggtgtacggcagcgaggagcccctggccaggaacctgcgcaacatgtccaaccagctggggctgctggccgtcaaccagcgcttccaagacaacggccgggccctgctgccctttgacaacctgcacgatgacccctgtctcctcaccaaccgctcagcgcgcatcccctgcttcctggcaggtcagctttggggtggggaccagaggtggcataggagatgttccctgttggagccacagggacacccgttccagtgagatgcccgagctcacctccatgcacaccctcttacttcgggagcacaaccggctggccacagagctcaagagcctgaaccctaggtgggatggggagaggctctaccaggaagcccggaagatcgtgggggccatggtccagatcatcacttaccgggactacctgcccctggtgctggggccaacggccatgaggaagtacctgcccacgtaccgttcctacaatgactcagtggacccacgcatcgccaacgtcttcaccaatgccttccgctacggccacaccctcatccaacccttcatgttccgcctggacaatcggtaccagcccatggaacccaacccccgtgtccccctcagcagggtcttttttgcctcctggagggtcgtgctggaaggtggcattgaccccatcctccggggcctcatggccacccctgccaagctgaatcgtcagaaccaaattgcagtggatgagatccgggagcgattgtttgagcaggtcatgaggattgggctggacctgcctgctctgaacatgcagcgcagcagggaccacggcctcccaggatacaatgcctggaggcgcttctgtgggctcccgcagcctgaaactgtgggccagctgggcacggtgctgaggaacctgaaattggcgaggaaactgatggagcagtatggcacgcccaacaacatcgacatctggatgggcggcgtgtccgagcctctgaagcgcaaaggccgcgtgggcccactcctcgcctgcatcatcggtacccagttcaggaagctccgggatggtgatcggttttggtgggagaacgagggtgtgttcagcatgcagcagcgacaggccctggcccagatctcattgccccggatcatctgcgacaacacaggcatcaccaccgtgtctaagaacaacatcttcatgtccaactcatatccccgggactttgtcaactgcagtacacttcctgcattgaacctggcttcctggagggaagcctcctagaggccaggtaagggggtgcagcagtgaggggtatatctgggctggccagttggaaccacggagatctccttgccctagatgagcccagccctgttctgggtgcagctgagaaaatgagtgactagacgttcatttgtgtgctcatgtatgtgcgaagtatataaattggcttttcatgcgtgtgtgttgtctgaacatggggagtgtttcatgggttatgtgtatgtgccatttatgtgagtgtgtgtttgtgctgatgagaatactgagtatgtggaaggcagcagagcggactggtgaggagcacagctcaggaactagactgcctgggttccaatcctggctctgtggcttgctagctatgtgaccttgagcaaattaccctccttaaacaagagttttcttccttgtaaattacatctgtcatggtttcttggagggcccacttgtatcctctggttcttcatttattgagcacctactacatgcaaggcactgtactaggcgtgagaagcatatagaggcaagaaagagataccaagatgccatctgtgtcctggttagcagagctggaccagtggtgccttggagggataagccagctgcagctgggctgtgtggttgacttatgggcccagccagccaggctcaggccatggctcccctttttcttcctcaccctgatttcttgcttattcactgaagttctcctgaagaggaactgggcctgttgccctttctgtaccatttatttgctcccaatgtttatgataataaaggcaccgctgatggggacctccactctgtctgtgtct

SEQ ID NO: 450790 - DNA, 2915 bp, Homo sapiens
tccctgctctgggcagctgtcctgggggaggtggacacctcgttggtgctgagctccatggaggaggccaagcagctggtggacaaggcctacaaggagcggcgggaaagcatcaagcagcggcttcgcagcggctcagccagccccatggaactcctatcctacttcaagcagccggtggcagccaccaggacggcggtgagggccgctgactacctgcacgtggctctagacctgctggagaggaagctgcggtccctgtggcgaaggccattcaatgtcactgatgtgctgacgcccgcccagctgaatgtgttgtccaagtcaagcggctgcgcctaccaggacgtgggggtgacttgcccggagcaggacaaataccgcaccatcaccgggatgtgcaacaacagacgcagccccacgctgggggcctccaaccgtgcctttgtgcgctggctgccggcggagtatgaggacggcttctctcttccctacggctggacgcccggggtcaagcgcaacggcttcccggtggctctggctcgcgcggtctccaacgagatcgtgcgcttccccactgatcagctgactccggaccaggagcgctcactcatgttcatgcaatggggccagctgttggaccacgacctcgacttcacccctgagccggccgcccgggcctccttcgtcactggcgtcaactgcgagaccagctgcgttcagcagccgccctgcttcccgctcaagatcccgcccaatgacccccgcatcaagaaccaagccgactgcatcccgttcttccgctcctgcccggcttgccccgggagcaacatcaccatccgcaaccagatcaacgcgctcacttccttcgtggacgccagcatggtgtacggcagcgaggagcccctggccaggaacctgcgcaacatgtccaaccagctggggctgctggccgtcaaccagcgcttccaagacaacggccgggccctgctgccctttgacaacctgcacgatgacccctgtctcctcaccaaccgctcagcgcgcatcccctgcttcctggcaggggacacccgttccagtgagatgcccgagctcacctccatgcacaccctcttacttcgggagcacaaccggctggccacagagctcaagagcctgaaccctaggtgggatggggagaggctctaccaggaagcccggaagatcgtgggggccatggtccagatcatcacttaccgggactacctgcccctggtgctggggccaacggccatgaggaagtacctgcccacgtaccgttcctacaatgactcagtggacccacgcatcgccaacgtcttcaccaatgccttccgctacggccacaccctcatccaacccttcatgttccgcctggacaatcggtaccagcccatggaacccaacccccgtgtccccctcagcagggtcttttttgcctcctggagggtcgtgctggaaggtggcattgaccccatcctccggggcctcatggccacccctgccaagctgaatcgtcagaaccaaattgcagtggatgagatccgggagcgattgtttgagcaggtcatgaggattgggctggacctgcctgctctgaacatgcagcgcagcagggaccacggcctcccaggatacaatgcctggaggcgcttctgtgggctcccgcagcctgaaactgtgggccagctgggcacggtgctgaggaacctgaaattggcgaggaaactgatggagcagtatggcacgcccaacaacatcgacatctggatgggcggcgtgtccgagcctctgaagcgcaaaggccgcgtgggcccactcctcgcctgcatcatcggtacccagttcaggaagctccgggatggtgatcggttttggtgggagaacgagggtgtgttcagcatgcagcagcgacaggccctggcccagatctcattgccccggatcatctgcgacaacacaggcatcaccaccgtgtctaagaacaacatcttcatgtccaactcatatccccgggactttgtcaactgcagtacacttcctgcattgaacctggcttcctggagggaagcctcctagaggccaggtaagggggtgcagcagtgaggggtatatctgggctggccagttggaaccacggagatctccttgccctagatgagcccagccctgttctgggtgcagctgagaaaatgagtgactagacgttcatttgtgtgctcatgtatgtgcgaagtatataaattggcttttcatgcgtgtgtgttgtctgaacatggggagtgtttcatgggttatgtgtatgtgccatttatgtgagtgtgtgtttgtgctgatgagaatactgagtatgtggaaggcagcagagcggactggtgaggagcacagctcaggaactagactgcctgggttccaatcctggctctgtggcttgctagctatgtgaccttgagcaaattaccctccttaaacaagagttttcttccttgtaaattacatctgtcatggtttcttggagggcccacttgtatcctctggttcttcatttattgagcacctactacatgcaaggcactgtactaggcgtgagaagcatatagaggcaagaaagagataccaagatgccatctgtgtcctggttagcagagctggaccagtggtgccttggagggataagccagctgcagctgggctgtgtggttgacttatgggcccagccagccaggctcaggccatggctcccctttttcttcctcaccctgatttcttgcttattcactgaagttctcctgaagaggaactgggcctgttgccctttctgtaccatttatttgctcccaatgtttatgataataaaggcaccgctgatggggacctccactctgtctgtgtct

SEQ ID NO: 450791 - DNA, 3070 bp, Homo sapiens
tgacaatatcaggtgagctgtggaggtggggtccttggaagctggatgacagcagctggcaaggggataagagagcagtgagcccctccctcaaggaggtctggctttatccatagacagggccctctgaggtggggctgaggtacaaagggggattgagcagcccaggagaagagagatgggggttcccttcttctcttctctcagatgcatggtggacttaggaccttgctgggctgggggtctcactgcagagatgaagctgcttctggccctagcagggctcctggccattctggccacgccccagccctctgaaggtgctgctccagctgtcctgggggaggtggacacctcgttggtgctgagctccatggaggaggccaagcagctggtggacaaggcctacaaggagcggcgggaaagcatcaagcagcggcttcgcagcggctcagccagccccatggaactcctatcctacttcaagcagccggtggcagccaccaggacggcggtgagggccgctgactacctgcacgtggctctagacctgctggagaggaagctgcggtccctgtggcgaaggccattcaatgtcactgatgtgctgacgcccgcccagctgaatgtgttgtccaagtcaagcggctgcgcctaccaggacgtgggggtgacttgcccggagcaggacaaataccgcaccatcaccgggatgtgcaacaacagacgcagccccacgctgggggcctccaaccgtgcctttgtgcgctggctgccggcggagtatgaggacggcttctctcttccctacggctggacgcccggggtcaagcgcaacggcttcccggtggctctggctcgcgcggtctccaacgagatcgtgcgcttccccactgatcagctgactccggaccaggagcgctcactcatgttcatgcaatggggccagctgttggaccacgacctcgacttcacccctgagccggccgcccgggcctccttcgtcactggcgtcaactgcgagaccagctgcgttcagcagccgccctgcttcccgctcaagatcccgcccaatgacccccgcatcaagaaccaagccgactgcatcccgttcttccgctcctgcccggcttgccccgggagcaacatcaccatccgcaaccagatcaacgcgctcacttccttcgtggacgccagcatggtgtacggcagcgaggagcccctggccaggaacctgcgcaacatgtccaaccagctggggctgctggccgtcaaccagcgcttccaagacaacggccgggccctgctgccctttgacaacctgcacgatgacccctgtctcctcaccaaccgctcagcgcgcatcccctgcttcctggcagatcatcacttaccgggactacctgcccctggtgctggggccaacggccatgaggaagtacctgcccacgtaccgttcctacaatgactcagtggacccacgcatcgccaacgtcttcaccaatgccttccgctacggccacaccctcatccaacccttcatgttccgcctggacaatcggtaccagcccatggaacccaacccccgtgtccccctcagcagggtcttttttgcctcctggagggtcgtgctggaaggtggcattgaccccatcctccggggcctcatggccacccctgccaagctgaatcgtcagaaccaaattgcagtggatgagatccgggagcgattgtttgagcaggtcatgaggattgggctggacctgcctgctctgaacatgcagcgcagcagggaccacggcctcccaggatacaatgcctggaggcgcttctgtgggctcccgcagcctgaaactgtgggccagctgggcacggtgctgaggaacctgaaattggcgaggaaactgatggagcagtatggcacgcccaacaacatcgacatctggatgggcggcgtgtccgagcctctgaagcgcaaaggccgcgtgggcccactcctcgcctgcatcatcggtacccagttcaggaagctccgggatggtgatcggttttggtgggagaacgagggtgtgttcagcatgcagcagcgacaggccctggcccagatctcattgccccggatcatctgcgacaacacaggcatcaccaccgtgtctaagaacaacatcttcatgtccaactcatatccccgggactttgtcaactgcagtacacttcctgcattgaacctggcttcctggagggaagcctcctagaggccaggtaagggggtgcagcagtgaggggtatatctgggctggccagttggaaccacggagatctccttgccctagatgagcccagccctgttctgggtgcagctgagaaaatgagtgactagacgttcatttgtgtgctcatgtatgtgcgaagtatataaattggcttttcatgcgtgtgtgttgtctgaacatggggagtgtttcatgggttatgtgtatgtgccatttatgtgagtgtgtgtttgtgctgatgagaatactgagtatgtggaaggcagcagagcggactggtgaggagcacagctcaggaactagactgcctgggttccaatcctggctctgtggcttgctagctatgtgaccttgagcaaattaccctccttaaacaagagttttcttccttgtaaattacatctgtcatggtttcttggagggcccacttgtatcctctggttcttcatttattgagcacctactacatgcaaggcactgtactaggcgtgagaagcatatagaggcaagaaagagataccaagatgccatctgtgtcctggttagcagagctggaccagtggtgccttggagggataagccagctgcagctgggctgtgtggttgacttatgggcccagccagccaggctcaggccatggctcccctttttcttcctcaccctgatttcttgcttattcactgaagttctcctgaagaggaactgggcctgttgccctttctgtaccatttatttgctcccaatgtttatgataataaaggcaccgctgatggggacctccactctgtctgtgtct

SEQ ID NO: 450792 - DNA, 3204 bp, Homo sapiens
ctggatgggagaacagcttaaaagccatccttcccaaagccttgcctctgtctggacacccaggtccatatcctttttataaaaggaagccttcctcccacccgtgggcctgcctgcatggtcctgcatgtctgcccctgggctggggctctgctgggtgggtctgtatcccttctctggccctcactcctcctttctccaagcagcatcaagcagcggcttcgcagcggctcagccagccccatggaactcctatcctacttcaagcagccggtggcagccaccaggacggcggtgagggccgctgactacctgcacgtggctctagacctgctggagaggaagctgcggtccctgtggcgaaggccattcaatgtcactggtactgttgcccatcacaccccaggtccctgctccactagtgactcctcctagggaccccagtcgtctctcagtgatcccctcagccttcttcctccagggagtctcaggagtctccagggctcctcagcctcaggttgcctgggataggaagtgaggcggctcagctcccccattgttctttcccccggcagatgtgctgacgcccgcccagctgaatgtgttgtccaagtcaagcggctgcgcctaccaggacgtgggggtgacttgcccggagcaggacaaataccgcaccatcaccgggatgtgcaacaacagacgcagccccacgctgggggcctccaaccgtgcctttgtgcgctggctgccggcggagtatgaggacggcttctctcttccctacggctggacgcccggggtcaagcgcaacggcttcccggtggctctggctcgcgcggtctccaacgagatcgtgcgcttccccactgatcagctgactccggaccaggagcgctcactcatgttcatgcaatggggccagctgttggaccacgacctcgacttcacccctgagccggccgcccgggcctccttcgtcactggcgtcaactgcgagaccagctgcgttcagcagccgccctgcttcccgctcaagatcccgcccaatgacccccgcatcaagaaccaagccgactgcatcccgttcttccgctcctgcccggcttgccccgggagcaacatcaccatccgcaaccagatcaacgcgctcacttccttcgtggacgccagcatggtgtacggcagcgaggagcccctggccaggaacctgcgcaacatgtccaaccagctggggctgctggccgtcaaccagcgcttccaagacaacggccgggccctgctgccctttgacaacctgcacgatgacccctgtctcctcaccaaccgctcagcgcgcatcccctgcttcctggcaggggacacccgttccagtgagatgcccgagctcacctccatgcacaccctcttacttcgggagcacaaccggctggccacagagctcaagagcctgaaccctaggtgggatggggagaggctctaccaggaagcccggaagatcgtgggggccatggtccagatcatcacttaccgggactacctgcccctggtgctggggccaacggccatgaggaagtacctgcccacgtaccgttcctacaatgactcagtggacccacgcatcgccaacgtcttcaccaatgccttccgctacggccacaccctcatccaacccttcatgttccgcctggacaatcggtaccagcccatggaacccaacccccgtgtccccctcagcagggtcttttttgcctcctggagggtcgtgctggaaggtggcattgaccccatcctccggggcctcatggccacccctgccaagctgaatcgtcagaaccaaattgcagtggatgagatccgggagcgattgtttgagcaggtcatgaggattgggctggacctgcctgctctgaacatgcagcgcagcagggaccacggcctcccaggatacaatgcctggaggcgcttctgtgggctcccgcagcctgaaactgtgggccagctgggcacggtgctgaggaacctgaaattggcgaggaaactgatggagcagtatggcacgcccaacaacatcgacatctggatgggcggcgtgtccgagcctctgaagcgcaaaggccgcgtgggcccactcctcgcctgcatcatcggtacccagttcaggaagctccgggatggtgatcggttttggtgggagaacgagggtgtgttcagcatgcagcagcgacaggccctggcccagatctcattgccccggatcatctgcgacaacacaggcatcaccaccgtgtctaagaacaacatcttcatgtccaactcatatccccgggactttgtcaactgcagtacacttcctgcattgaacctggcttcctggagggaagcctcctagaggccaggtaagggggtgcagcagtgaggggtatatctgggctggccagttggaaccacggagatctccttgccctagatgagcccagccctgttctgggtgcagctgagaaaatgagtgactagacgttcatttgtgtgctcatgtatgtgcgaagtatataaattggcttttcatgcgtgtgtgttgtctgaacatggggagtgtttcatgggttatgtgtatgtgccatttatgtgagtgtgtgtttgtgctgatgagaatactgagtatgtggaaggcagcagagcggactggtgaggagcacagctcaggaactagactgcctgggttccaatcctggctctgtggcttgctagctatgtgaccttgagcaaattaccctccttaaacaagagttttcttccttgtaaattacatctgtcatggtttcttggagggcccacttgtatcctctggttcttcatttattgagcacctactacatgcaaggcactgtactaggcgtgagaagcatatagaggcaagaaagagataccaagatgccatctgtgtcctggttagcagagctggaccagtggtgccttggagggataagccagctgcagctgggctgtgtggttgacttatgggcccagccagccaggctcaggccatggctcccctttttcttcctcaccctgatttcttgcttattcactgaagttctcctgaagaggaactgggcctgttgccctttctgtaccatttatttgctcccaatgtttatgataataaaggcaccgctgatggggacctccactctgtctgtgtct

SEQ ID NO: 450793 - DNA, 2868 bp, Homo sapiens
tgacaatatcaggtgagctgtggaggtggggtccttggaagctggatgacagcagctggcaaggggataagagagcagtgagcccctccctcaaggaggtctggctttatccatagacagggccctctgaggtggggctgaggtacaaagggggattgagcagcccaggagaagagagatgggggttcccttcttctcttctctcagatgcatggtggacttaggaccttgctgggctgggggtctcactgcagagatgaagctgcttctggccctagcagggctcctggccattctggccacgccccagccctctgaaggtgctgctccagctgtcctgggggaggtggacacctcgttggtgctgagctccatggaggaggccaagcagctggtggacaaggcctacaaggagcggcgggaaagcatcaagcagcggcttcgcagcggctcagccagccccatggaactcctatcctacttcaagcagccggtggcagccaccaggacggcggtgagggccgctgactacctgcacgtggctctagacctgctggagaggaagctgcggtccctgtggcgaaggccattcaatgtcactgatgtgctgacgcccgcccagctgaatgtgttgtccaagtcaagcggctgcgcctaccaggacgtgggggtgacttgcccggagcaggacaaataccgcaccatcaccgggatgtgcaacaacagacgcagccccacgctgggggcctccaaccgtgcctttgtgcgctggctgccggcggagtatgaggacggcttctctcttccctacggctggacgcccggggtcaagcgcaacggcttcccggtggctctggctcgcgcggtctccaacgagatcgtgcgcttccccactgatcagctgactccggaccaggagcgctcactcatgttcatgcaatggggccagctgttggaccacgacctcgacttcacccctgagccggccgcccgggcctccttcgtcactggcgtcaactgcgagaccagctgcgttcagcagccgccctgcttcccgctcaagatcccgcccaatgacccccgcatcaagaaccaagccgactgcatcccgttcttccgctcctgcccggcttgccccgggagcaacatcaccatccgcaaccagatcaacgcgctcacttccttcgtggacgccagcatggtgtacggcagcgaggagcccctggccaggaacctgcgcaacatgtccaaccagctggggctgctggccgtcaaccagcgcttccaagacaacggccgggccctgctgccctttgacaacctgcacgatgacccctgtctcctcaccaaccgctcagcgcgcatcccctgcttcctggcaggggacacccgttccagtgagatgcccgagctcacctccatgcacaccctcttacttcgggagcacaaccggctggccacagagctcaagagcctgaaccctaggtgggatggggagaggctctaccaggaagcccggaagatcgtgggggccatggtccagatcatcacttaccgggactacctgcccctggtgctggggccaacggccatgaggaagtacctgcccacgtaccgttcctacaatgactcagtggacccacgcatcgccaacgtcttcaccaatgccttccgctacggccacaccctcatccaacccttcatgttccgcctggacaatcggtaccagcccatggaacccaacccccgtgtccccctcagcagggtcttttttgcctcctggagggtcgtgctggaaggtggcattgaccccatcctccggggcctcatggccacccctgccaagctgaatcgtcagaaccaaattgcagtggatgagatccgggagcgattgtttgagcagatctcattgccccggatcatctgcgacaacacaggcatcaccaccgtgtctaagaacaacatcttcatgtccaactcatatccccgggactttgtcaactgcagtacacttcctgcattgaacctggcttcctggagggaagcctcctagaggccaggtaagggggtgcagcagtgaggggtatatctgggctggccagttggaaccacggagatctccttgccctagatgagcccagccctgttctgggtgcagctgagaaaatgagtgactagacgttcatttgtgtgctcatgtatgtgcgaagtatataaattggcttttcatgcgtgtgtgttgtctgaacatggggagtgtttcatgggttatgtgtatgtgccatttatgtgagtgtgtgtttgtgctgatgagaatactgagtatgtggaaggcagcagagcggactggtgaggagcacagctcaggaactagactgcctgggttccaatcctggctctgtggcttgctagctatgtgaccttgagcaaattaccctccttaaacaagagttttcttccttgtaaattacatctgtcatggtttcttggagggcccacttgtatcctctggttcttcatttattgagcacctactacatgcaaggcactgtactaggcgtgagaagcatatagaggcaagaaagagataccaagatgccatctgtgtcctggttagcagagctggaccagtggtgccttggagggataagccagctgcagctgggctgtgtggttgacttatgggcccagccagccaggctcaggccatggctcccctttttcttcctcaccctgatttcttgcttattcactgaagttctcctgaagaggaactgggcctgttgccctttctgtaccatttatttgctcccaatgtttatgataataaaggcaccgctgatggggacctccactctgtctgtgtct

SEQ ID NO: 450794 - DNA, 1873 bp, Homo sapiens
gaatcaagtcagtccagactcggagggacacccgttccagtgagatgcccgagctcacctccatgcacaccctcttacttcgggagcacaaccggctggccacagagctcaagagcctgaaccctaggtgggatggggagaggctctaccaggaagcccggaagatcgtgggggccatggtccagatcatcacttaccgggactacctgcccctggtgctggggccaacggccatgaggaagtacctgcccacgtaccgttcctacaatgactcagtggacccacgcatcgccaacgtcttcaccaatgccttccgctacggccacaccctcatccaacccttcatgttccgcctggacaatcggtaccagcccatggaacccaacccccgtgtccccctcagcagggtcttttttgcctcctggagggtcgtgctggaaggtggcattgaccccatcctccggggcctcatggccacccctgccaagctgaatcgtcagaaccaaattgcagtggatgagatccgggagcgattgtttgagcaggtcatgaggattgggctggacctgcctgctctgaacatgcagcgcagcagggaccacggcctcccaggatacaatgcctggaggcgcttctgtgggctcccgcagcctgaaactgtgggccagctgggcacggtgctgaggaacctgaaattggcgaggaaactgatggagcagtatggcacgcccaacaacatcgacatctggatgggcggcgtgtccgagcctctgaagcgcaaaggccgcgtgggcccactcctcgcctgcatcatcggtacccagttcaggaagctccgggatggtgatcggttttggtgggagaacgagggtgtgttcagcatgcagcagcgacaggccctggcccagatctcattgccccggatcatctgcgacaacacaggcatcaccaccgtgtctaagaacaacatcttcatgtccaactcatatccccgggactttgtcaactgcagtacacttcctgcattgaacctggcttcctggagggaagcctcctagaggccaggtaagggggtgcagcagtgaggggtatatctgggctggccagttggaaccacggagatctccttgccctagatgagcccagccctgttctgggtgcagctgagaaaatgagtgactagacgttcatttgtgtgctcatgtatgtgcgaagtatataaattggcttttcatgcgtgtgtgttgtctgaacatggggagtgtttcatgggttatgtgtatgtgccatttatgtgagtgtgtgtttgtgctgatgagaatactgagtatgtggaaggcagcagagcggactggtgaggagcacagctcaggaactagactgcctgggttccaatcctggctctgtggcttgctagctatgtgaccttgagcaaattaccctccttaaacaagagttttcttccttgtaaattacatctgtcatggtttcttggagggcccacttgtatcctctggttcttcatttattgagcacctactacatgcaaggcactgtactaggcgtgagaagcatatagaggcaagaaagagataccaagatgccatctgtgtcctggttagcagagctggaccagtggtgccttggagggataagccagctgcagctgggctgtgtggttgacttatgggcccagccagccaggctcaggccatggctcccctttttcttcctcaccctgatttcttgcttattcactgaagttctcctgaagaggaactgggcctgttgccctttctgtaccatttatttgctcccaatgtttatgataataaaggcaccgctgatggggacctccactctgtctgtgtct

SEQ ID NO: 450795 - DNA, 1672 bp, Homo sapiens
tcatatagactcgggttagtacccccgcggccatgaggaagtacctgcccacgtaccgttcctacaatgactcagtggacccacgcatcgccaacgtcttcaccaatgccttccgctacggccacaccctcatccaacccttcatgttccgcctggacaatcggtaccagcccatggaacccaacccccgtgtccccctcagcagggtcttttttgcctcctggagggtcgtgctggaaggtggcattgaccccatcctccggggcctcatggccacccctgccaagctgaatcgtcagaaccaaattgcagtggatgagatccgggagcgattgtttgagcaggtcatgaggattgggctggacctgcctgctctgaacatgcagcgcagcagggaccacggcctcccaggatacaatgcctggaggcgcttctgtgggctcccgcagcctgaaactgtgggccagctgggcacggtgctgaggaacctgaaattggcgaggaaactgatggagcagtatggcacgcccaacaacatcgacatctggatgggcggcgtgtccgagcctctgaagcgcaaaggccgcgtgggcccactcctcgcctgcatcatcggtacccagttcaggaagctccgggatggtgatcggttttggtgggagaacgagggtgtgttcagcatgcagcagcgacaggccctggcccagatctcattgccccggatcatctgcgacaacacaggcatcaccaccgtgtctaagaacaacatcttcatgtccaactcatatccccgggactttgtcaactgcagtacacttcctgcattgaacctggcttcctggagggaagcctcctagaggccaggtaagggggtgcagcagtgaggggtatatctgggctggccagttggaaccacggagatctccttgccctagatgagcccagccctgttctgggtgcagctgagaaaatgagtgactagacgttcatttgtgtgctcatgtatgtgcgaagtatataaattggcttttcatgcgtgtgtgttgtctgaacatggggagtgtttcatgggttatgtgtatgtgccatttatgtgagtgtgtgtttgtgctgatgagaatactgagtatgtggaaggcagcagagcggactggtgaggagcacagctcaggaactagactgcctgggttccaatcctggctctgtggcttgctagctatgtgaccttgagcaaattaccctccttaaacaagagttttcttccttgtaaattacatctgtcatggtttcttggagggcccacttgtatcctctggttcttcatttattgagcacctactacatgcaaggcactgtactaggcgtgagaagcatatagaggcaagaaagagataccaagatgccatctgtgtcctggttagcagagctggaccagtggtgccttggagggataagccagctgcagctgggctgtgtggttgacttatgggcccagccagccaggctcaggccatggctcccctttttcttcctcaccctgatttcttgcttattcactgaagttctcctgaagaggaactgggcctgttgccctttctgtaccatttatttgctcccaatgtttatgataataaaggcaccgctgatggggacctccactctgtctgtgtct

SEQ ID NO: 450796 - DNA, 2506 bp, Homo sapiens
tccttagcctcatttacccctggggcaatgttcctggttctgtctctcaacatctggtgcttcattgcccccaccctctccctcagaggcagaggcagacatacacacactcacacacacacacacacacacacacacactcctagattctggaggagagagttttcggtgctaagggtgagtttttgatttgcactaagaactcaagtgaaattcatttacactccaaaataacttctagactctagaatgtagagtgagactattccatgtcttcacttttcacagggaaaatcatgccagaatggcccttcgttccttcctgcctccctgctttccacaaacctaaactgagccttactgtgggcaggcacttggtgggcactgtgaagaatttcaacaacttcaatttcccttgctctcaaggactttataagatagttgcagaaatgagacattaataacttgaggacaaggaagttatcacaatgactaaaaaagtgatttgctatttagtcctctaaggcagagggcaatataattatccttaatgtacatttgaggaactcaggctcagagaggttaataattggtccaaggtcacccagccagcaagcagtagaactctatttatgcctctcagtgccactctgttaggcccaggtccggtattgtgggaggctattccctgaccatagagggatggaaggggtccccgaagccaagagcaggcagagactctggccctcctgtgctgccaggcggcatttgctgtggaggagtgggtggagaggccattccaaatgacttgtctttagatcatcacttaccgggactacctgcccctggtgctggggccaacggccatgaggaagtacctgcccacgtaccgttcctacaatgactcagtggacccacgcatcgccaacgtcttcaccaatgccttccgctacggccacaccctcatccaacccttcatgttccgcctggacaatcggtaccagcccatggaacccaacccccgtgtccccctcagcagggtcttttttgcctcctggagggtcgtgctggaaggtggcattgaccccatcctccggggcctcatggccacccctgccaagctgaatcgtcagaaccaaattgcagtggatgagatccgggagcgattgtttgagcaggtcatgaggattgggctggacctgcctgctctgaacatgcagcgcagcagggaccacggcctcccaggatacaatgcctggaggcgcttctgtgggctcccgcagcctgaaactgtgggccagctgggcacggtgctgaggaacctgaaattggcgaggaaactgatggagcagtatggcacgcccaacaacatcgacatctggatgggcggcgtgtccgagcctctgaagcgcaaaggccgcgtgggcccactcctcgcctgcatcatcggtacccagttcaggaagctccgggatggtgatcggttttggtgggagaacgagggtgtgttcagcatgcagcagcgacaggccctggcccagatctcattgccccggatcatctgcgacaacacaggcatcaccaccgtgtctaagaacaacatcttcatgtccaactcatatccccgggactttgtcaactgcagtacacttcctgcattgaacctggcttcctggagggaagcctcctagaggccaggtaagggggtgcagcagtgaggggtatatctgggctggccagttggaaccacggagatctccttgccctagatgagcccagccctgttctgggtgcagctgagaaaatgagtgactagacgttcatttgtgtgctcatgtatgtgcgaagtatataaattggcttttcatgcgtgtgtgttgtctgaacatggggagtgtttcatgggttatgtgtatgtgccatttatgtgagtgtgtgtttgtgctgatgagaatactgagtatgtggaaggcagcagagcggactggtgaggagcacagctcaggaactagactgcctgggttccaatcctggctctgtggcttgctagctatgtgaccttgagcaaattaccctccttaaacaagagttttcttccttgtaaattacatctgtcatggtttcttggagggcccacttgtatcctctggttcttcatttattgagcacctactacatgcaaggcactgtactaggcgtgagaagcatatagaggcaagaaagagataccaagatgccatctgtgtcctggttagcagagctggaccagtggtgccttggagggataagccagctgcagctgggctgtgtggttgacttatgggcccagccagccaggctcaggccatggctcccctttttcttcctcaccctgatttcttgcttattcactgaagttctcctgaagaggaactgggcctgttgccctttctgtaccatttatttgctcccaatgtttatgataataaaggcaccgctgatggggacctccactctgtctgtgtct

SEQ ID NO: 450797 - DNA, 2199 bp, Homo sapiens
tgacaatatcaggtgagctgtggaggtggggtccttggaagctggatgacagcagctggcaaggggataagagagcagtgagcccctccctcaaggaggtctggctttatccatagacagggccctctgaggtggggctgaggtacaaagggggattgagcagcccaggagaagagagatgggggttcccttcttctcttctctcagatgcatggtggacttaggaccttgctgggctgggggtctcactgcagagatgaagctgcttctggccctagcagggctcctggccattctggccacgccccagccctctgaaggtgctgctccagctgtcctgggggaggtggacacctcgttggtgctgagctccatggaggaggccaagcagctggtggacaaggcctacaaggagcggcgggaaagcatcaagcagcggcttcgcagcggctcagccagccccatggaactcctatcctacttcaagcagccggtggcagccaccaggacggcggtgagggccgctgactacctgcacgtggctctagacctgctggagaggaagctgcggtccctgtggcgaaggccattcaatgtcactgatgtgctgacgcccgcccagctgaatgtgttgtccaagtcaagcggctgcgcctaccaggacgtgggggtgacttgcccggagcaggacaaataccgcaccatcaccgggatgtgcaacaacagacgcagccccacgctgggggcctccaaccgtgcctttgtgcgctggctgccggcggagtatgaggacggcttctctcttccctacggctggacgcccggggtcaagcgcaacggcttcccggtggctctggctcgcgcggtctccaacgagatcgtgcgcttccccactgatcagctgactccggaccaggagcgctcactcatgttcatgcaatggggccagctgttggaccacgacctcgacttcacccctgagccggccgcccgggcctccttcgtcactggcgtcaactgcgagaccagctgcgttcagcagccgccctgcttcccgctcaagatcccgcccaatgacccccgcatcaagaaccaagccgactgcatcccgttcttccgctcctgcccggcttgccccgggagcaacatcaccatccgcaaccagatcaacgcgctcacttccttcgtggacgccagcatggtgtacggcagcgaggagcccctggccaggaacctgcgcaacatgtccaaccagctggggctgctggccgtcaaccagcgcttccaagacaacggccgggccctgctgccctttgacaacctgcacgatgacccctgtctcctcaccaaccgctcagcgcgcatcccctgcttcctggcaggggacacccgttccagtgagatgcccgagctcacctccatgcacaccctcttacttcgggagcacaaccggctggccacagagctcaagagcctgaaccctaggtgggatggggagaggctctaccaggaagcccggaagatcgtgggggccatggtccaggtaggccgtcttgaacaccgggcacacgggatccagatgtgtccctgcaacatcctagctgtgtgaccttgggcaagttcctaacgctcctgagccttgccttcttcatccatgaggctgtaaggattataatacatatatgaaaacacctttcagatagtaagtgcttgacaaagcctccttcccttccctctccttcttcgcaggtttgctccctgcagtcttctttcctgtgggtctgttattggtgttgggagggttgaatgtttggtttagcgcccaagtagctgttcagtaaattcttcttccctccatctcactgtcactcttagctcctttacccactcacctcttctttttaaaattaaaaaaattatagggctgggcgcggtggctcatgcctgtaatcccagcactttgggaggcggaggcgggtggatcacgaggtcaggagatcaagaccatgctggctaacacggtgaaaccccatctctactaaaaatacaaaaattagccgggcgtggtggcgggcacctgtagtcccagctacttgggaggctgaggcaggagaatggcgtgaacccaggctggagtgcagtggtgcgatcttggctcactgcaacctccacctttcaggctcaagccattctcccatc

SEQ ID NO: 450798 - DNA, 1385 bp, Homo sapiens
gtgttgggaaggtgggttttctgggctgctggcgatatgtgaatcttccctgctgtctccagtgacctccccaccttgaagcagagagacctgcccatagccacctgtcccctcccccatgcaggatacaatgcctggaggcgcttctgtgggctcccgcagcctgaaactgtgggccagctgggcacggtgctgaggaacctgaaattggcgaggaaactgatggagcagtatggcacgcccaacaacatcgacatctggatgggcggcgtgtccgagcctctgaagcgcaaaggccgcgtgggcccactcctcgcctgcatcatcggtacccagttcaggaagctccgggatggtgatcggttttggtgggagaacgagggtgtgttcagcatgcagcagcgacaggccctggcccagatctcattgccccggatcatctgcgacaacacaggcatcaccaccgtgtctaagaacaacatcttcatgtccaactcatatccccgggactttgtcaactgcagtacacttcctgcattgaacctggcttcctggagggaagcctcctagaggccaggtaagggggtgcagcagtgaggggtatatctgggctggccagttggaaccacggagatctccttgccctagatgagcccagccctgttctgggtgcagctgagaaaatgagtgactagacgttcatttgtgtgctcatgtatgtgcgaagtatataaattggcttttcatgcgtgtgtgttgtctgaacatggggagtgtttcatgggttatgtgtatgtgccatttatgtgagtgtgtgtttgtgctgatgagaatactgagtatgtggaaggcagcagagcggactggtgaggagcacagctcaggaactagactgcctgggttccaatcctggctctgtggcttgctagctatgtgaccttgagcaaattaccctccttaaacaagagttttcttccttgtaaattacatctgtcatggtttcttggagggcccacttgtatcctctggttcttcatttattgagcacctactacatgcaaggcactgtactaggcgtgagaagcatatagaggcaagaaagagataccaagatgccatctgtgtcctggttagcagagctggaccagtggtgccttggagggataagccagctgcagctgggctgtgtggttgacttatgggcccagccagccaggctcaggccatggctcccctttttcttcctcaccctgatttcttgcttattcactgaagttctcctgaagaggaactgggcctgttgccctttctgtaccatttatttgctcccaatgtttatgataataaaggcaccgctgatggggacctccactctgtctgtgtct

SEQ ID NO: 450799 - DNA, 770 bp, Homo sapiens
  misc_feature (732)..(733): n is a, c, g, or t
tgacaatatcaggtgagctgtggaggtggggtccttggaagctggatgacagcagctggcaaggggataagagagcagtgagcccctccctcaaggaggtctggctttatccatagacagggccctctgaggtggggctgaggtacaaagggggattgagcagcccaggagaagagagatgggggttcccttcttctcttctctcagatgcatggtggacttaggaccttgctgggctgggggtctcactgcagagatgaagctgcttctggccctagcagggctcctggccattctggccacgccccagccctctgaaggtgctgctccagctgtcctgggggaggtggacacctcgttggtgctgagctccatggaggaggccaagcagctggtggacaaggcctacaaggagcggcgggaaagcatcaagcagcggcttcgcagcggctcagccagccccatggaactcctatcctacttcaagcagccggtggcagccaccaggacggcggtgagggccgctgactacctgcacgtggctctagacctgctggagaggaagctgcggtccctgtggcgaaggccattcaatgtcactgatgtgctgacgcccgcccagctgaatgtgttgtccaagtcaagcggctgcgcctaccaggacgtgggggtgacttgcccggagcaggacaaataccgcaccatcaccgggatgtgcaacaacagacgcannccacgctgggcctccttgtgcctctataagctccgct

SEQ ID NO: 450800 - DNA, 1068 bp, Homo sapiens
tccttagcctcatttacccctggggcaatgttcctggttctgtctctcaacatctggtgcttcattgcccccaccctctccctcagaggcagaggcagacatacacacactcacacacacacacacacacacacacacactcctagattctggaggagagagttttcggtgctaagggtgagtttttgatttgcactaagaactcaagtgaaattcatttacactccaaaataacttctagactctagaatgtagagtgagactattccatgtcttcacttttcacagggaaaatcatgccagaatggcccttcgttccttcctgcctccctgctttccacaaacctaaactgagccttactgtgggcaggcacttggtgggcactgtgaagaatttcaacaacttcaatttcccttgctctcaaggactttataagatagttgcagaaatgagacattaataacttgaggacaaggaagttatcacaatgactaaaaaagtgatttgctatttagtcctctaaggcagagggcaatataattatccttaatgtacatttgaggaactcaggctcagagaggttaataattggtccaaggtcacccagccagcaagcagtagaactctatttatgcctctcagtgccactctgttaggcccaggtccggtattgtgggaggctattccctgaccatagagggatggaaggggtccccgaagccaagagcaggcagagactctggccctcctgtgctgccaggcggcatttgctgtggaggagtgggtggagaggccattccaaatgacttgtctttagatcatcacttaccgggactacctgcccctggtgctggggccaacggccatgaggaagtacctgcccacgtaccgttcctacaatgactcagtggacccacgcatcgccaacgtcttcaccaatgccttccgctacggccacaccctcatccaacccttcatgttccgcctggacaatcggtaccagcccatggaaccccccccgcactgtacccgcgtcgcactgggatcctcagagcgaccaacaaagc

SEQ ID NO: 450801 - DNA, 1083 bp, Homo sapiens
acgcctgagcgctgggcgcctggtctgccggacctcagcagggggcaccgcgggccggactgtggaggggcgcacgcccggaagcggcgagggtagccatgacggcctccgtgctgcgaagtatctcgctagccctgcgcccgactagcgggtgagtgcggacgctggccggatagcggagtgcccagggcgcgtgcggggtcttcgcgactgtccgccaggactcgcctgtgctccctgctcgcctcccagtccacgaatatctcagggatgagccatctggtcgtgactcttatgcatgaaaatctgagcaccctggcgagcagcggtcctgcttaagtcctctgtggtctgaacgaaagattttgaaaaaccttccacgttgaccttgctgtcatatcaagcttctgggaacttggcagacgcagcttagagagactcaccagcgagcgtcattgttgtctttctgggaactcattcccatgagatcagaacctcttcgaaaaaagaagaaggtagatcctaaaaaagaccaagaagcaaaggagcgcttgaaaaggaagatccgaaaactggaaaaggctactcaagagctaattcctattgaagattttattacccctctaaagttcttggataaagcaagagagcggcctcaggtggagctcacctttgaggagactgagaggagagctctgcttctgaagaagtggtccttgtacaagcagcaagagcgtaagatggagagggacaccatcagggctatgctagaagcccagcaggaagctctggaggaactgcaactggaatccccgaagctccatgctgaggccatcaagcgggatcctaacctgttcccctttgagaaggaagggccacattacacaccaccgatccctaactaccaaccccctgaaggcaggtacaatgacatcaccaaggtgtacacacaagtggagtttaagagatagacttgcaggctgctatccttaacatgctgcccctgagagtaggaatgaccagggttcaagtctgctttccacagaatcaggcatgctgttaataaatactggtttaatcaaa

SEQ ID NO: 450802 - DNA, 901 bp, Homo sapiens
ggcctcccgagtagctcggattacaggcgcccaacaccacgcccggctaatttttgtatttttagtagagacggggtttcaccatgttggccaggctggtcttgaactcctgacctcgcgatccacccgcctcggcctcccaaagtgctgggattacagacgtgagcaaccgcgcctagcctggagaagcagatatttatacatactcttgtatctttcaggcttctgggaacttggcagacgcagcttagagagactcaccagcgagcgtcattgttgtctttctgggaactcattcccatgagatcagaacctcttcgaaaaaagaagaaggtagatcctaaaaaagaccaagaagcaaaggagcgcttgaaaaggaagatccgaaaactggaaaaggctactcaagagctaattcctattgaagattttattacccctctaaagttcttggataaagcaagagagcggcctcaggtggagctcacctttgaggagactgagaggagagctctgcttctgaagaagtggtccttgtacaagcagcaagagcgtaagatggagagggacaccatcagggctatgctagaagcccagcaggaagctctggaggaactgcaactggaatccccgaagctccatgctgaggccatcaagcgggatcctaacctgttcccctttgagaaggaagggccacattacacaccaccgatccctaactaccaaccccctgaaggcaggtacaatgacatcaccaaggtgtacacacaagtggagtttaagagatagacttgcaggctgctatccttaacatgctgcccctgagagtaggaatgaccagggttcaagtctgctttccacagaatcaggcatgctgttaataaatactggtttaatcaaa

SEQ ID NO: 450803 - DNA, 1029 bp, Homo sapiens
acgcctgagcgctgggcgcctggtctgccggacctcagcagggggcaccgcgggccggactgtggaggggcgcacgcccggaagcggcgagggtagccatgacggcctccgtgctgcgaagtatctcgctagccctgcgcccgactagcgggcttctgggaacttggcagacgcagcttagagagactcaccagcgagcgtcattgttgtctttctgggaactcattcccatgagatcagaacctcttcgaaaaaagaagaaggtagatcctaaaaaagaccaagaagcaaaggagcgcttgaaaaggaagatccgaaaactggaaaaggctactcaagagctaattcctattgaagattttattacccctctaaagttcttggataaagcaagagagcggcctcaggtggagctcacctttgaggagactgagaggagagctctgcttctgaagaagtggtccttgtacaagcagcaagagcgtaagatggagagggacaccatcagggctatgctagaagcccagcaggaagctctggaggaactgcaactggaatccccgaagctccatgctgaggccatcaagcgggatcctaacctgttcccctttgagaaggaagggccacattacacaccaccgatccctaactaccaaccccctgaaggcaggtacaatgacatcaccaaggtgtacacacaagtggagtttaagagatagacttgcaggctgctatccttaacatgctgcccctgagagtaggaatgaccagggttcaagtctgctttccacagatcgctgctgtataatactgttatcaaaaaaaaaaaggggggggtctaaaattccgggggccagttagcgtccggtttctgtgcaggccaaggggtataaggaaggcggggggttacacggggggaaggctggttggaggacctctgggggatgggccccaggtagtgaaaaggtattggccttgggtttgttatacatgacaaggatgtggcggttatgatacccatcctacatc

SEQ ID NO: 450804 - DNA, 831 bp, Homo sapiens
acgcctgagcgctgggcgcctggtctgccggacctcagcagggggcaccgcgggccggactgtggaggggcgcacgcccggaagcggcgagggtagccatgacggcctccgtgctgcgaagtatctcgctagccctgcgcccgactagcgggcttctgggaacttggcagacgcagcttagagagactcaccagcgagcgtcattgttgtctttctgggaactcattcccatgagatcagaacctcttcgaaaaaagaagaaggtagatcctaaaaaagaccaagaagcaaaggagcgcttgaaaaggaagatccgaaaactggaaaaggctactcaagagctaattcctattgaagattttattacccctctaaagttcttggataaagcaagagagcggcctcaggtggagctcacctttgaggagactgagaggagagctctgcttctgaagaagtggtccttgtacaagcagcaagagcgtaagatggagagggacaccatcagggctatgctagaagcccagcaggaagctctggaggaactgcaactggaatccccgaagctccatgctgaggccatcaagcgggatcctaacctgttcccctttgagaaggaagggccacattacacaccaccgatccctaactaccaaccccctgaaggcaggtacaatgacatcaccaaggtgtacacacaagtggagtttaagagatagacttgcaggctgctatccttaacatgctgcccctgagagtaggaatgaccagggttcaagtctgctttccacagaatcaggcatgctgttaataaatactggtttaatcaaa

SEQ ID NO: 450805 - DNA, 852 bp, Homo sapiens
  misc_feature (833)..(833): n is a, c, g, or t
  misc_feature (839)..(839): n is a, c, g, or t
acgcctgagcgctgggcgcctggtctgccggacctcagcagggggcaccgcgggccggactgtggaggggcgcacgcccggaagcggcgagggtagccatgacggcctccgtgctgcgaagtatctcgctagccctgcgcccgactagcgggcttctgggaacttggcagacgcagcttagagagactcaccagcgagcgtcattgttgtctttctgggaactcattcccatgagatcagaacctcttcgaaaaaagaagaaggtagatcctaaaaaagaccaagaagcaaaggagcgcttgaaaaggaagatccgaaaactggaaaaggctactcaagagctaattcctattgaagattttattacccctctaaagttcttggataaagcaagagagcggcctcaggtggagctcacctttgaggagactgagaggagagctctgcttctgaagaagtggtccttgtacaagcagcaagagcgtaagatggagagggacaccatcagggctatgctagaagcccagcaggaagctctggaggaactgcaactggaatccccgaagctccatgctgaggccatcaagcgggatcctaacctgttcccctttgagaaggaagggccacattacacaccaccgatccctaactaccaaccccctgaaggcaggtacaatgacatcaccaaggtgtacacacaagtggagtttaagagatagacttgcaggctgctatccttaacatgctgcccctgagagtaggaatgaccagggttcaagtctgctttccacagaatcaggcatgctgttaataaatactggtttaatcaaatngacatngaagaaaaaacac

SEQ ID NO: 450806 - DNA, 778 bp, Homo sapiens
acgcctgagcgctgggcgcctggtctgccggacctcagcagggggcaccgcgggccggactgtggaggggcgcacgcccggaagcggcgagggtagccatgacggcctccgtgctgcgaagtatctcgctagccctgcgcccgactagcgggcttctgggaacttggcagacgcagcttagagagactcaccagcgagcgtcattgttgtctttctgggaactcattcccatgagatcagaacctcttcgaaaaaagaagaaggtagatcctaaaaaagaccaagaagcaaaggagcgcttgaaaaggaagatccgaaaactggaaaaggctactcaagagagagcggcctcaggtggagctcacctttgaggagactgagaggagagctctgcttctgaagaagtggtccttgtacaagcagcaagagcgtaagatggagagggacaccatcagggctatgctagaagcccagcaggaagctctggaggaactgcaactggaatccccgaagctccatgctgaggccatcaagcgggatcctaacctgttcccctttgagaaggaagggccacattacacaccaccgatccctaactaccaaccccctgaaggcaggtacaatgacatcaccaaggtgtacacacaagtggagtttaagagatagacttgcaggctgctatccttaacatgctgcccctgagagtaggaatgaccagggttcaagtctgctttccacagaatcaggcatgctgttaataaatactggtttaatcaaa

SEQ ID NO: 450807 - DNA, 943 bp, Homo sapiens
ccagtccccgcccctcgcgcgcttcgtttattcctccgcgcgctgggacaggctgcttcttcgccagaaccaaccggttgcttgctgtcccagcggcgccccctcatcaccgtcgccatgcccggaggtctgcttctcggggacgtggctcccaactttgaggccaataccaccgtcggccgcatccgtttccacgactttctgggagactcatggggcattctcttctcccaccctcgggactttaccccagtgtgcaccacagagcttggcagagctgcaaagctggcaccagaatttgccaagaggaatgttaagttgattgccctttcaatagacagtgttgaggaccatcttgcctggagcaaggatatcaatgcttacaattgtgaagagcccacagaaaagttaccttttcccatcatcgatgataggaatcgggagcttgccatcctgttgggcatgctggatccagcagagaaggatgaaaagggcatgcctgtgacagctcgtgtggtgtttgttttggtcctgataagaagctgaagctgtctatcctctacccagctaccactggcaggaactttgatgagattctcagggtagtcatctctctccagctgacagcagaaaaaagggttgccaccccagttgattggaaggatggggatagtgtgatggtccttccaaccatccctgaagaagaagccaaaaaacttttcccgaaaggagtcttcaccaaagagctcccatctggcaagaaatacctccgctacacaccccagccttaagtctcttggagaagctggtgctgtgagccagaggatgtcagctgccaattgtgttttcctgcagcaattccataaacacatcctggtgtcatcacagccaaggtttttaggttgctataccaatggcttattaaatgaaaatggcactaaaa

SEQ ID NO: 450808 - DNA, 1074 bp, Homo sapiens
tcagtgaactacttggcttgaatagcacagattgtattagccaaaaaggagtcagggtggcaccataattattaaaggaggcaacaccttaacattagtctttttaaatatgtgtcatcttgaatttcatgtctttgattgaattgggctataagcataggcttctctggaggtaagtagattgaaaagcactcctcaacagaaaagcttaaaagtaaatatcatcataagcattcatttaaaaaagaaagcctgtttttgatccagaagttgtgacttttcattctctgtgatgttggtgataactcttaattcaattgtgaccttgtttttcttcctttcaatggggcattctcttctcccaccctcgggactttaccccagtgtgcaccacagagcttggcagagctgcaaagctggcaccagaatttgccaagaggaatgttaagttgattgccctttcaatagacagtgttgaggaccatcttgcctggagcaaggatatcaatgcttacaattgtgaagagcccacagaaaagttaccttttcccatcatcgatgataggaatcgggagcttgccatcctgttgggcatgctggatccagcagagaaggatgaaaagggcatgcctgtgacagctcgtgtggtgtttgttttggtcctgataagaagctgaagctgtctatcctctacccagctaccactggcaggaactttgatgagattctcagggtagtcatctctctccagctgacagcagaaaaaagggttgccaccccagttgattggaaggatggggatagtgtgatggtccttccaaccatccctgaagaagaagccaaaaaacttttcccgaaaggagtcttcaccaaagagctcccatctggcaagaaatacctccgctacacaccccagccttaagtctcttggagaagctggtgctgtgagccagaggatgtcagctgccaattgtgttttcctgcagcaattccataaacacatcctggtgtcatcacagccaaggtttttaggttgctataccaatggcttattaaatgaaaatggcactaaaa

SEQ ID NO: 450809 - DNA, 431 bp, Homo sapiens
gggaggatagacagcttcagcttcttatcaggaccaaaaacaaacaccacacgagctgtcactggcaggaactttgatgagattctcagggtagtcatctctctccagctgacagcagaaaaaagggttgccaccccagttgattggaaggatggggatagtgtgatggtccttccaaccatccctgaagaagaagccaaaaaacttttcccgaaaggagtcttcaccaaagagctcccatctggcaagaaatacctccgctacacaccccagccttaagtctcttggagaagctggtgctgtgagccagaggatgtcagctgccaattgtgttttcctgcagcaattccataaacacatcctggtgtcatcacagccaaggtttttaggttgctataccaatggcttattaaatgaaaatggcactaaaa

SEQ ID NO: 450810 - DNA, 652 bp, Homo sapiens
aggaatacaaggaaagctagcatgcttggagaagaagctgcagaaggtggggtgagggacaagagatgagaggaggcaggattccatcacacagggcttgcaggccatgatactcagaattaaatgtaaagtgtggtggccagctgttactgggtttaaaacaggactgtttcttgttaagatgggggaactgctttcctgccaaaagtgccaaagatcaacttggaaaacaaaatcctcacagaggggagagtaaagaacacttgattagtctcattagcacctgtagctacttttctaaagttaattcctgaaggccttgaagcttcactatgagattgaatttcaccattctcaatgtctttcaataggatggggatagtgtgatggtccttccaaccatccctgaagaagaagccaaaaaacttttcccgaaaggagtcttcaccaaagagctcccatctggcaagaaatacctccgctacacaccccagccttaagtctcttggagaagctggtgctgtgagccagaggatgtcagctgccaattgtgttttcctgcagcaattccataaacacatcctggtgtcatcacagccaaggtttttaggttgctataccaatggcttattaaatgaaaatggcactaaaa

SEQ ID NO: 450811 - DNA, 556 bp, Homo sapiens
gagccggtccggaagatctggtggtgatggctgttaactgatgaaattcagagcatgtgttgggtttagattcctctttccccttttacttgtgtttcaggatatcaatgcttacaattgtgaagagcccacagaaaagttaccttttcccatcatcgatgataggaatcgggagcttgccatcctgttgggcatgctggatccagcagagaaggatgaaaagggcatgcctgtgacagctcgtgtggtaggtcatacaaattcattttgtagttagcttaactgatcaggctgtatgtccgtgtaaatgctggtaccagctagaggagataggggaatatctacgattatgaaataactgtgtattggcgacaatatcactgattatctgtaatgctgatgcaattttcagctaaattttccaactgctttattcatagttcatggaaatctacaaaaaaaaagttgtttatcctaaaatgtcttccagaattgagaaaccttttcatagctctcctgactgctctcctgaccgccctgtctttaaagtgatggg

SEQ ID NO: 450812 - DNA, 2652 bp, Homo sapiens
ccagtccccgcccctcgcgcgcttcgtttattcctccgcgcgctgggacaggctgcttcttcgccagaaccaaccggttgcttgctgtcccagcggcgccccctcatcaccgtcgccatgcccggaggtctgcttctcggggacgtggctcccaactttgaggccaataccaccgtcggccgcatccgtttccacgactttctgggagactcatggggcattctcttctcccaccctcgggactttaccccagtgtgcaccacagagcttggcagagctgcaaagctggcaccagaatttgccaagaggaatgttaagttgattgccctttcaatagacagtgttgaggaccatcttgcctggagcaaggatatcaatgcttacaattgtgaagagcccacagaaaagttaccttttcccatcatcgatgataggaatcgggagcttgccatcctgttgggcatgctggatccagcagagaaggatgaaaagggcatgcctgtgacagctcgtgtggtgtttgttttggtcctgataagaagctgaagctgtctatcctctacccagctaccactggcaggaactttgatgagattctcagggtagtcatctctctccagctgacagcagaaaaaagggttgccaccccagttgattggaaggatggggatagtgtgatggtccttccaaccatccctgaagaagaagccaaaaaacttttcccgaaaggagtcttcaccaaagagctcccatctggcaagaaatacctccgctacacaccccagccttaagtctcttggagaagctggtgctgtgagccagaggatgtcagctgccaattgtgttttcctgcagcaattccataaacacatcctggtgtcatcacagccaaggtttttaggttgctataccaatggcttattaaatgaaaatggcactaaaagtttcttgagattctttatactctctgccttcagcaatcaattccattcatacatcagcactctgctggttctgtttgaaatatgttctgtatttaaaactcaaatcttgttggatctctgcagggcttgtgaccaatgaagtcatatttgttgatggttgacaaagcttgcttcactccatcagagaatgactatcaatttttttttaactgtcctatcacgtcctctcctgtcacccattttgaagagtggcagaacttgaagttcaacttcctctgtaaatatccaagtataaagcccaggaacttctagaataacccagatgcgctttaattttttttaatatgttttgatcacagaacttctagaataacccagatgctctttcatattcttttaatacatcttgatcacagctgggggaaaaaaagctttttaattctataccttcctagtagataagtgaagagcagggaaagagacctttaaatattttgctataaaaaaatttgtgataagtttctatcaaaatggggagattgcagaaaaggcttcccttggctcccaaggaggtgtagcaggtgtgagcaatattagtgccatgtgcctttcacacagggtttgcatttatcagtctgttttccgatgatgtgtacatgaaagagtacaccatgtgaagagaagagagaatgattgaaaatgttttagtatagaactcttcttgcagtgggttgctattttctagattttactttttagggaacaaaataaaatcctttgttaaaactgggaaaaaaaaaaaaaaaaaaaaaaaaaaaaaaaaaaaaaaaaaaaaaaagaaaaaaaaaaaaagaaaaatgccaaacaagagaagaagaagaaaaaaatagaaaagacacaaagaagacaggacaaaagacagacacacaaacatagcccgacaacaatgaccaaacaaacaacaaaacgtaagaaaagcatgaagtaatatcaaccgagataaacagcaagcagctcggcacctggctgggcagggaccaacgttcccctagcaagtggcgaggagacggttaacatacgagaatacgtcaatcggtttgagcgtaccactcaacgcacggaaaagcagcttaacgagctgtgacaattaacataaacgtaaaaacagaaaatctccagattatagacgacatacaggaaaggagacatggaaccataacagagcaagactataaaaacagaatgcaacaaggaacaaaatcacatgcaaaaaacacatctaaaacaacattaaacgaaaatcaagaacaaaggagtggcacaggtaccgaaaaagtgagaagacacagaaataaggagaagacagacaagagcagaacagaaaggaaaagggtacaaggaaaataaagtcaccgaggatgacgaacacaaaaacaaaaagtatagcacgcattgaaagcgaaaaagcaaaaaggacaacacaacaaaatcaagaaaaagaccaaaaaaaaaaaaagagaacaagacaaagaaagacacaaagacaaacaacaaaacaaaaaacgaagaagaaagacacaatagaaaaaacagaacaacagagccaaaaacagacaactatacaagaagaaaagaaaaacagaatacaaaaaagaaagtaaaaataacgaaaaacaacacaaaagcaacgcaaaaaaaaacacactca

SEQ ID NO: 450813 - DNA, 1490 bp, Homo sapiens
  misc_feature (1427)..(1427): n is a, c, g, or t
  misc_feature (1434)..(1434): n is a, c, g, or t
  misc_feature (1445)..(1445): n is a, c, g, or t
  misc_feature (1448)..(1450): n is a, c, g, or t
  misc_feature (1459)..(1459): n is a, c, g, or t
  misc_feature (1468)..(1468): n is a, c, g, or t
ccagtccccgcccctcgcgcgcttcgtttattcctccgcgcgctgggacaggctgcttcttcgccagaaccaaccggttgcttgctgtcccagcggcgccccctcatcaccgtcgccatgcccggaggtctgcttctcggggacgtggctcccaactttgaggccaataccaccgtcggccgcatccgtttccacgactttctgggagactcatggggcattctcttctcccaccctcgggactttaccccagtgtgcaccacagagcttggcagagctgcaaagctggcaccagaatttgccaagaggaatgttaagttgattgccctttcaatagacagtgttgaggaccatcttgcctggagcaaggatatcaatgcttacaattgtgaagagcccacagaaaagttaccttttcccatcatcgatgataggaatcgggagcttgccatcctgttgggcatgctggatccagcagagaaggatgaaaagggcatgcctgtgacagctcgtgtggtgtttgttttggtcctgataagaagctgaagctgtctatcctctacccagctaccactggcaggaactttgatgagattctcagggtagtcatctctctccagctgacagcagaaaaaagggttgccaccccagttgattggaaggatggggatagtgtgatggtccttccaaccatccctgaagaagaagccaaaaaacttttcccgaaaggagtcttcaccaaagagctcccatctggcaagaaatacctccgctacacaccccagccttaagtctcttggagaagctggtgctgtgagccagaggatgtcagctgccaattgtgttttcctgcagcaattccataaacacatcctggtgtcatcacagccaaggtttttaggttgctataccaatggcttattaaatgaaaatggcactaaaagtttcttgagattctttatactctctgccttcagcaatcaattccattcatacatcagcactctgctggttctgtttgaaatatgttctgtatttaaaactcaaatcttgttggatctctgcagggcttgtgaccaatgaagtcatatttgttgatggttgacaaagcttgcttcactccatcagagaatgactatcaatttttttttaactgtcctatcacgtcctctcctgtcacccattttgaagagtggcagaacttgaagttcaacttcctctgtaaatatccaagtataaagcccaggaacttctagaataacccagatgcgctttaattttttttaatatgttttgatcacagaacttctagaataacccagatgctctttcatattcttttaatacatcttgatcacagctgggggaaaaaaagctttttaattctataccttcctagtagataagtgaagagcagggaaagcttnattggtnaacaagggggnttnnnagggggggnaaagcctgnccaggggagtggaaaaaagggg

SEQ ID NO: 450814 - DNA, 2173 bp, Homo sapiens
  misc_feature (10)..(10): n is a, c, g, or t
  misc_feature (458)..(458): n is a, c, g, or t
  misc_feature (506)..(506): n is a, c, g, or t
acgcaggctngctcaccgctcccgcactacccgggatacaccagatgctctatacatattcttttaatacatcttgatccacagctgggggaaaaaaagctttttaattctataccttcctagtagataagtgaagagcagggaaagagacctttaaatattttgctataaaaaaatttgtgataagtttctatcaaaatggggagattgcagaaaaggcttcccttggctcccaaggaggtgtagcaggtgtgagcaatattagtgccatgtgcctttcacacagggtttgcatttatcagtctgttttccgatgatgtgtacatgaaagagtacaccatgtgaagagaagagagaatgattgaaaatgttttagtatagaactcttcttgcagtgggttgctattttctagattttactttttagggaacaaaataaaatcctttgttaaaactgnaaaaaaaaaaaaaaaaaaaaaaaaaaaaaaaaaaaaaaaaaaaaaaancccaaccggttgcttgctgtcccagcggcgccccctcatcaccgtcgccatgcccggaggtctgcttctcggggacgtggctcccaactttgaggccaataccaccgtcggccgcatccgtttccacgactttctgggagactcatggggcattctcttctcccaccctcgggactttaccccagtgtgcaccacagagcttggcagagctgcaaagctggcaccagaatttgccaagaggaatgttaagttgattgccctttcaatagacagtgttgaggaccatcttgcctggagcaaggatatcaatgcttacaattgtgaagagcccacagaaaagttaccttttcccatcatcgatgataggaatcgggagcttgccatcctgttgggcatgctggatccagcagagaaggatgaaaagggcatgcctgtgacagctcgtgtggtgtttgttttggtcctgataagaagctgaagctgtctatcctctacccagctaccactggcaggaactttgatgagattctcagggtagtcatctctctccagctgacagcagaaaaaagggttgccaccccagttgattggaaggatggggatagtgtgatggtccttccaaccatccctgaagaagaagccaaaaaacttttcccgaaaggagtcttcaccaaagagctcccatctggcaagaaatacctccgctacacaccccagccttaagtctcttggagaagctggtgctgtgagccagaggatgtcagctgccaattgtgttttcctgcagcaattccataaacacatcctggtgtcatcacagccaaggtttttaggttgctataccaatggcttattaaatgaaaatggcactaaaagtttcttgagattctttatactctctgccttcagcaatcaattccattcatacatcagcactctgctggttctgtttgaaatatgttctgtatttaaaactcaaatcttgttggatctctgcagggcttgtgaccaatgaagtcatatttgttgatggttgacaaagcttgcttcactccatcagagaatgactatcaatttttttttaactgtcctatcacgtcctctcctgtcacccattttgaagagtggcagaacttgaagttcaacttcctctgtaaatatccaagtataaagcccaggaacttctagaataacccagatgcgctttaattttttttaatatgttttgatcacagaacttctagaataacccagatgctctttcatattcttttaatacatcttgatcacagctgggggaaaaaaagctttttaattctataccttcctagtagataagtgaagagcagggaaagagacctttaaatattttgctataaaaaaatttgtgataagtttctatcaaaatggggagattgcagaaaaggcttcccttggctcccaaggaggtgtagcaggtgtgagcaatattagtgccatgtgcctttcacacagggtttgcatttatcagtctgttttccgatgatgtgtacatgaaagagtacaccatgtgaagagaagagagaatgattgaaaatgttttagtatagaactcttcttgcagtgggttgctattttctagattttactttttagggaacaaaataaaatcctttgttaaaactggg

SEQ ID NO: 450815 - DNA, 1691 bp, Homo sapiens
gacccacgcgtcgcggacgcgtgggccaaccggttgcttgctgtcccagcggcgccccctcatcaccgtcgccatgcccggaggtctgcttctcggggacgtggctcccaactttgaggccaataccaccgtcggccgcatccgtttccacgactttctgggagactcatggggcattctcttctcccaccctcgggactttaccccagtgtgcaccacagagcttggcagagctgcaaagctggcaccagaatttgccaagaggaatgttaagttgattgccctttcaatagacagtgttgaggaccatcttgcctggagcaaggatatcaatgcttacaattgtgaagagcccacagaaaagttaccttttcccatcatcgatgataggaatcgggagcttgccatcctgttgggcatgctggatccagcagagaaggatgaaaagggcatgcctgtgacagctcgtgtggtgtttgttttggtcctgataagaagctgaagctgtctatcctctacccagctaccactggcaggaactttgatgagattctcagggtagtcatctctctccagctgacagcagaaaaaagggttgccaccccagttgattggaaggatggggatagtgtgatggtccttccaaccatccctgaagaagaagccaaaaaacttttcccgaaaggagtcttcaccaaagagctcccatctggcaagaaatacctccgctacacaccccagccttaagtctcttggagaagctggtgctgtgagccagaggatgtcagctgccaattgtgttttcctgcagcaattccataaacacatcctggtgtcatcacagccaaggtttttaggttgctataccaatggcttattaaatgaaaatggcactaaaagtttcttgagattctttatactctctgccttcagcaatcaattccattcatacatcagcactctgctggttctgtttgaaatatgttctgtatttaaaactcaaatcttgttggatctctgcagggcttgtgaccaatgaagtcatatttgttgatggttgacaaagcttgcttcactccatcagagaatgactatcaatttttttttaactgtcctatcacgtcctctcctgtcacccattttgaagagtggcagaacttgaagttcaacttcctctgtaaatatccaagtataaagcccaggaacttctagaataacccagatgcgctttaattttttttaatatgttttgatcacagaacttctagaataacccagatgctctttcatattcttttaatacatcttgatcacagctgggggaaaaaaagctttttaattctataccttcctagtagataagtgaagagcagggaaagagacctttaaatattttgctataaaaaaatttgtgataagtttctatcaaaatggggagattgcagaaaaggcttcccttggctcccaaggaggtgtagcaggtgtgagcaatattagtgccatgtgcctttcacacagggtttgcatttatcagtctgttttccgatgatgtgtacatgaaagagtacaccatgtgaagagaagagagaatgattgaaaatgttttagtatagaactcttcttgcagtgggttgctattttctagattttactttttagggaacaaaataaaatcctttgttaaaactggg

SEQ ID NO: 450816 - DNA, 1408 bp, Homo sapiens
  misc_feature (1294)..(1294): n is a, c, g, or t
ccagtccccgcccctcgcgcgcttcgtttattcctccgcgcgctgggacaggctgcttcttcgccagaaccaaccggttgcttgctgtcccagcggcgccccctcatcaccgtcgccatgcccggaggtctgcttctcggggacgtggctcccaactttgaggccaataccaccgtcggccgcatccgtttccacgactttctgggagactcatggggcattctcttctcccaccctcgggactttaccccagtgtgcaccacagagcttggcagagctgcaaagctggcaccagaatttgccaagaggaatgttaagttgattgccctttcaatagacagtgttgaggaccatcttgcctggagcaaggatatcaatgcttacaattgtgaagagcccacagaaaagttaccttttcccatcatcgatgataggaatcgggagcttgccatcctgttgggcatgctggatccagcagagaaggatgaaaagggcatgcctgtgacagctcgtgtggtgtttgttttggtcctgataagaagctgaagctgtctatcctctacccagctaccactggcaggaactttgatgagattctcagggtagtcatctctctccagctgacagcagaaaaaagggttgccaccccagttgattggaaggatggggatagtgtgatggtccttccaaccatccctgaagaagaagccaaaaaacttttcccgaaaggagtcttcaccaaagagctcccatctggcaagaaatacctccgctacacaccccagccttaagtctcttggagaagctggtgctgtgagccagaggatgtcagctgccaattgtgttttcctgcagcaattccataaacacatcctggtgtcatcacagccaaggtttttaggttgctataccaatggcttattaaatgaaaatggcactaaaagtttcttgagattctttatactctctgccttcagcaatcaattccattcatacatcagcactctgctggttctgtttgaaatatgttctgtatttaaaactcaaatcttgttggatctctgcagggcttgtgaccaatgaagtcatatttgttgatggttgacaaagcttgcttcactccatcagagaatgactatcaatttttttttaactgtcctatcacgtcctctcctgtcacccattttgaagagtggcagaacttgaagttcaacttcctctgtaaatatccaagtataaagcccaggaacttctagaataacccagatgcgctttaattttttttaatatgatntgttggttccaagcttctgaataaccagaggctacattttaatatcggctcaggggacaactacatgaccgtaaggaaggagaaccaattgtaaatggatcaaggggaaacttc

SEQ ID NO: 450817 - DNA, 1697 bp, Homo sapiens
ttcgtctaggtacgaggcctgggtgtgagcaccaaccggttgcttgctgtcccagcggcgccccctcatcaccgtcgccatgcccggaggtctgcttctcggggacgtggctcccaactttgaggccaataccaccgtcggccgcatccgtttccacgactttctgggagactcatggggcattctcttctcccaccctcgggactttaccccagtgtgcaccacagagcttggcagagctgcaaagctggcaccagaatttgccaagaggaatgttaagttgattgccctttcaatagacagtgttgaggaccatcttgcctggagcaaggatatcaatgcttacaattgtgaagagcccacagaaaagttaccttttcccatcatcgatgataggaatcgggagcttgccatcctgttgggcatgctggatccagcagagaaggatgaaaagggcatgcctgtgacagctcgtgtggtgtttgttttggtcctgataagaagctgaagctgtctatcctctacccagctaccactggcaggaactttgatgagattctcagggtagtcatctctctccagctgacagcagaaaaaagggttgccaccccagttgattggaaggatggggatagtgtgatggtccttccaaccatccctgaagaagaagccaaaaaacttttcccgaaaggagtcttcaccaaagagctcccatctggcaagaaatacctccgctacacaccccagccttaagtctcttggagaagctggtgctgtgagccagaggatgtcagctgccaattgtgttttcctgcagcaattccataaacacatcctggtgtcatcacagccaaggtttttaggttgctataccaatggcttattaaatgaaaatggcactaaaagtttcttgagattctttatactctctgccttcagcaatcaattccattcatacatcagcactctgctggttctgtttgaaatatgttctgtatttaaaactcaaatcttgttggatctctgcagggcttgtgaccaatgaagtcatatttgttgatggttgacaaagcttgcttcactccatcagagaatgactatcaatttttttttaactgtcctatcacgtcctctcctgtcacccattttgaagagtggcagaacttgaagttcaacttcctctgtaaatatccaagtataaagcccaggaacttctagaataacccagatgcgctttaattttttttaatatgttttgatcacagaacttctagaataacccagatgctctttcatattcttttaatacatcttgatcacagctgggggaaaaaaagctttttaattctataccttcctagtagataagtgaagagcagggaaagagacctttaaatattttgctataaaaaaatttgtgataagtttctatcaaaatggggagattgcagaaaaggcttcccttggctcccaaggaggtgtagcaggtgtgagcaatattagtgccatgtgcctttcacacagggtttgcatttatcagtctgttttccgatgatgtgtacatgaaagagtacaccatgtgaagagaagagagaatgattgaaaatgttttagtatagaactcttcttgcagtgggttgctattttctagattttactttttagggaacaaaataaaatcctttgttaaaactggg

SEQ ID NO: 450818 - DNA, 953 bp, Homo sapiens
  misc_feature (884)..(884): n is a, c, g, or t
  misc_feature (908)..(908): n is a, c, g, or t
ccagtccccgcccctcgcgcgcttcgtttattcctccgcgcgctgggacaggctgcttcttcgccagaaccaaccggttgcttgctgtcccagcggcgccccctcatcaccgtcgccatgcccggaggtctgcttctcggggacgtggctcccaactttgaggccaataccaccgtcggccgcatccgtttccacgactttctgggagactcatggggcattctcttctcccaccctcgggactttaccccagtgtgcaccacagagcttggcagagctgcaaagctggcaccagaatttgccaagaggaatgttaagttgattgccctttcaatagacagtgttgaggaccatcttgcctggagcaaggatatcaatgcttacaattgtgaagagcccacagaaaagttaccttttcccatcatcgatgataggaatcgggagcttgccatcctgttgggcatgctggatccagcagagaaggatgaaaagggcatgcctgtgacagctcgtgtggtgtttgttttggtcctgataagaagctgaagctgtctatcctctacccagctaccactggcaggaactttgatgagattctcagggtagtcatctctctccagctgacagcagaaaaaagggttgccaccccagttgattggaaggatggggatagtgtgatggtccttccaaccatccctgaagaagaagccaaaaaacttttcccgaaaggagtcttcaccaaagagctcccatctggcaagaaatacctccgctacacaccccagccttaagtctcttggagaagctggtgctgtgagccagaggatgtcagctgccaattgtgttttcctgcagcaattccataaacacatctgggtctcccngcaggtttaggtgcttaccatgcntttaatgaaatgggtcaaaaaaaaaaaagggggggtagagaccgg

SEQ ID NO: 450819 - DNA, 1866 bp, Homo sapiens
tcagtgaactacttggcttgaatagcacagattgtattagccaaaaaggagtcagggtggcaccataattattaaaggaggcaacaccttaacattagtctttttaaatatgtgtcatcttgaatttcatgtctttgattgaattgggctataagcataggcttctctggaggtaagtagattgaaaagcactcctcaacagaaaagcttaaaagtaaatatcatcataagcattcatttaaaaaagaaagcctgtttttgatccagaagttgtgacttttcattctctgtgatgttggtgataactcttaattcaattgtgaccttgtttttcttcctttcaatggggcattctcttctcccaccctcgggactttaccccagtgtgcaccacagagcttggcagagctgcaaagctggcaccagaatttgccaagaggaatgttaagttgattgccctttcaatagacagtgttgaggaccatcttgcctggagcaaggatatcaatgcttacaattgtgaagagcccacagaaaagttaccttttcccatcatcgatgataggaatcgggagcttgccatcctgttgggcatgctggatccagcagagaaggatgaaaagggcatgcctgtgacagctcgtgtggtgtttgttttggtcctgataagaagctgaagctgtctatcctctacccagctaccactggcaggaactttgatgagattctcagggtagtcatctctctccagctgacagcagaaaaaagggttgccaccccagttgattggaaggatggggatagtgtgatggtccttccaaccatccctgaagaagaagccaaaaaacttttcccgaaaggagtcttcaccaaagagctcccatctggcaagaaatacctccgctacacaccccagccttaagtctcttggagaagctggtgctgtgagccagaggatgtcagctgccaattgtgttttcctgcagcaattccataaacacatcctggtgtcatcacagccaaggtttttaggttgctataccaatggcttattaaatgaaaatggcactaaaagtttcttgagattctttatactctctgccttcagcaatcaattccattcatacatcagcactctgctggttctgtttgaaatatgttctgtatttaaaactcaaatcttgttggatctctgcagggcttgtgaccaatgaagtcatatttgttgatggttgacaaagcttgcttcactccatcagagaatgactatcaatttttttttaactgtcctatcacgtcctctcctgtcacccattttgaagagtggcagaacttgaagttcaacttcctctgtaaatatccaagtataaagcccaggaacttctagaataacccagatgcgctttaattttttttaatatgttttgatcacagaacttctagaataacccagatgctctttcatattcttttaatacatcttgatcacagctgggggaaaaaaagctttttaattctataccttcctagtagataagtgaagagcagggaaagagacctttaaatattttgctataaaaaaatttgtgataagtttctatcaaaatggggagattgcagaaaaggcttcccttggctcccaaggaggtgtagcaggtgtgagcaatattagtgccatgtgcctttcacacagggtttgcatttatcagtctgttttccgatgatgtgtacatgaaagagtacaccatgtgaagagaagagagaatgattgaaaatgttttagtatagaactcttcttgcagtgggttgctattttctagattttactttttagggaacaaaataaaatcctttgttaaaactggg

SEQ ID NO: 450820 - DNA, 1568 bp, Homo sapiens
ttcggccgatccggttccatctattttctgggtatatcatgggtgtctatttcttcttcttcctctctcttctttactttacgcgttgtgcaccacagagcttggcagagctgcaaagctggcaccagaatttgccaagaggaatgttaagttgattgccctttcaatagacagtgttgaggaccatcttgcctggagcaaggatatcaatgcttacaattgtgaagagcccacagaaaagttaccttttcccatcatcgatgataggaatcgggagcttgccatcctgttgggcatgctggatccagcagagaaggatgaaaagggcatgcctgtgacagctcgtgtggtgtttgttttggtcctgataagaagctgaagctgtctatcctctacccagctaccactggcaggaactttgatgagattctcagggtagtcatctctctccagctgacagcagaaaaaagggttgccaccccagttgattggaaggatggggatagtgtgatggtccttccaaccatccctgaagaagaagccaaaaaacttttcccgaaaggagtcttcaccaaagagctcccatctggcaagaaatacctccgctacacaccccagccttaagtctcttggagaagctggtgctgtgagccagaggatgtcagctgccaattgtgttttcctgcagcaattccataaacacatcctggtgtcatcacagccaaggtttttaggttgctataccaatggcttattaaatgaaaatggcactaaaagtttcttgagattctttatactctctgccttcagcaatcaattccattcatacatcagcactctgctggttctgtttgaaatatgttctgtatttaaaactcaaatcttgttggatctctgcagggcttgtgaccaatgaagtcatatttgttgatggttgacaaagcttgcttcactccatcagagaatgactatcaatttttttttaactgtcctatcacgtcctctcctgtcacccattttgaagagtggcagaacttgaagttcaacttcctctgtaaatatccaagtataaagcccaggaacttctagaataacccagatgcgctttaattttttttaatatgttttgatcacagaacttctagaataacccagatgctctttcatattcttttaatacatcttgatcacagctgggggaaaaaaagctttttaattctataccttcctagtagataagtgaagagcagggaaagagacctttaaatattttgctataaaaaaatttgtgataagtttctatcaaaatggggagattgcagaaaaggcttcccttggctcccaaggaggtgtagcaggtgtgagcaatattagtgccatgtgcctttcacacagggtttgcatttatcagtctgttttccgatgatgtgtacatgaaagagtacaccatgtgaagagaagagagaatgattgaaaatgttttagtatagaactcttcttgcagtgggttgctattttctagattttactttttagggaacaaaataaaatcctttgttaaaactggg

SEQ ID NO: 450821 - DNA, 1662 bp, Homo sapiens
ctgccattaagggtgtgggccgaagatatgctcatgtggtgttgaggaaagcagacattgacctcaccaagagggcgggagaactcactgaggatgaggtggaacgtgtgatcaccattatgcagaatccacgccagtacaagatcccagactggttcttgaacagacagaaggaaaaggatggtcatggatccagagatctccacccacgcgtccgcccagaatttgccaagaggaatgttaagttgattgccctttcaatagacagtgttgaggaccatcttgcctggagcaaggatatcaatgcttacaattgtgaagagcccacagaaaagttaccttttcccatcatcgatgataggaatcgggagcttgccatcctgttgggcatgctggatccagcagagaaggatgaaaagggcatgcctgtgacagctcgtgtggtgtttgttttggtcctgataagaagctgaagctgtctatcctctacccagctaccactggcaggaactttgatgagattctcagggtagtcatctctctccagctgacagcagaaaaaagggttgccaccccagttgattggaaggatggggatagtgtgatggtccttccaaccatccctgaagaagaagccaaaaaacttttcccgaaaggagtcttcaccaaagagctcccatctggcaagaaatacctccgctacacaccccagccttaagtctcttggagaagctggtgctgtgagccagaggatgtcagctgccaattgtgttttcctgcagcaattccataaacacatcctggtgtcatcacagccaaggtttttaggttgctataccaatggcttattaaatgaaaatggcactaaaagtttcttgagattctttatactctctgccttcagcaatcaattccattcatacatcagcactctgctggttctgtttgaaatatgttctgtatttaaaactcaaatcttgttggatctctgcagggcttgtgaccaatgaagtcatatttgttgatggttgacaaagcttgcttcactccatcagagaatgactatcaatttttttttaactgtcctatcacgtcctctcctgtcacccattttgaagagtggcagaacttgaagttcaacttcctctgtaaatatccaagtataaagcccaggaacttctagaataacccagatgcgctttaattttttttaatatgttttgatcacagaacttctagaataacccagatgctctttcatattcttttaatacatcttgatcacagctgggggaaaaaaagctttttaattctataccttcctagtagataagtgaagagcagggaaagagacctttaaatattttgctataaaaaaatttgtgataagtttctatcaaaatggggagattgcagaaaaggcttcccttggctcccaaggaggtgtagcaggtgtgagcaatattagtgccatgtgcctttcacacagggtttgcatttatcagtctgttttccgatgatgtgtacatgaaagagtacaccatgtgaagagaagagagaatgattgaaaatgttttagtatagaactcttcttgcagtgggttgctattttctagattttactttttagggaacaaaataaaatcctttgttaaaactggg

SEQ ID NO: 450822 - DNA, 1751 bp, Homo sapiens
tcagtgaactacttggcttgaatagcacagattgtattagccaaaaaggagtcagggtggcaccataattattaaaggaggcaacaccttaacattagtctttttaaatatgtgtcatcttgaatttcatgtctttgattgaattgggctataagcataggcttctctggaggtaagtagattgaaaagcactcctcaacagaaaagcttaaaagtaaatatcatcataagcattcatttaaaaaagaaagcctgtttttgatccagaagttgtgacttttcattctctgtgatgttggtgataactcttaattcaattgtgaccttgtttttcttcctttcactttcaatagacagtgttgaggaccatcttgcctggagcaaggatatcaatgcttacaattgtgaagagcccacagaaaagttaccttttcccatcatcgatgataggaatcgggagcttgccatcctgttgggcatgctggatccagcagagaaggatgaaaagggcatgcctgtgacagctcgtgtggtgtttgttttggtcctgataagaagctgaagctgtctatcctctacccagctaccactggcaggaactttgatgagattctcagggtagtcatctctctccagctgacagcagaaaaaagggttgccaccccagttgattggaaggatggggatagtgtgatggtccttccaaccatccctgaagaagaagccaaaaaacttttcccgaaaggagtcttcaccaaagagctcccatctggcaagaaatacctccgctacacaccccagccttaagtctcttggagaagctggtgctgtgagccagaggatgtcagctgccaattgtgttttcctgcagcaattccataaacacatcctggtgtcatcacagccaaggtttttaggttgctataccaatggcttattaaatgaaaatggcactaaaagtttcttgagattctttatactctctgccttcagcaatcaattccattcatacatcagcactctgctggttctgtttgaaatatgttctgtatttaaaactcaaatcttgttggatctctgcagggcttgtgaccaatgaagtcatatttgttgatggttgacaaagcttgcttcactccatcagagaatgactatcaatttttttttaactgtcctatcacgtcctctcctgtcacccattttgaagagtggcagaacttgaagttcaacttcctctgtaaatatccaagtataaagcccaggaacttctagaataacccagatgcgctttaattttttttaatatgttttgatcacagaacttctagaataacccagatgctctttcatattcttttaatacatcttgatcacagctgggggaaaaaaagctttttaattctataccttcctagtagataagtgaagagcagggaaagagacctttaaatattttgctataaaaaaatttgtgataagtttctatcaaaatggggagattgcagaaaaggcttcccttggctcccaaggaggtgtagcaggtgtgagcaatattagtgccatgtgcctttcacacagggtttgcatttatcagtctgttttccgatgatgtgtacatgaaagagtacaccatgtgaagagaagagagaatgattgaaaatgttttagtatagaactcttcttgcagtgggttgctattttctagattttactttttagggaacaaaataaaatcctttgttaaaactggg

SEQ ID NO: 450823 - DNA, 1681 bp, Homo sapiens
ccagtccccgcccctcgcgcgcttcgtttattcctccgcgcgctgggacaggctgcttcttcgccagaaccaaccggttgcttgctgtcccagcggcgccccctcatcaccgtcgccatgcccggaggtctgcttctcggggacgtggctcccaactttgaggccaataccaccgtcggccgcatccgtttccacgactttctgggagactcatggggcattctcttctcccaccctcgggactttaccccagtgtgcaccacagagcttggcagagctgcaaagctggcaccagaatttgccaagaggaatgttaagttgattgccctttcaatagacagtgttgaggaccatcttgcctggagcaaggatatcaatgcttacaattgtgaagagcccacagtgggcatgctggatccagcagagaaggatgaaaagggcatgcctgtgacagctcgtgtggtgtttgttttggtcctgataagaagctgaagctgtctatcctctacccagctaccactggcaggaactttgatgagattctcagggtagtcatctctctccagctgacagcagaaaaaagggttgccaccccagttgattggaaggatggggatagtgtgatggtccttccaaccatccctgaagaagaagccaaaaaacttttcccgaaaggagtcttcaccaaagagctcccatctggcaagaaatacctccgctacacaccccagccttaagtctcttggagaagctggtgctgtgagccagaggatgtcagctgccaattgtgttttcctgcagcaattccataaacacatcctggtgtcatcacagccaaggtttttaggttgctataccaatggcttattaaatgaaaatggcactaaaagtttcttgagattctttatactctctgccttcagcaatcaattccattcatacatcagcactctgctggttctgtttgaaatatgttctgtatttaaaactcaaatcttgttggatctctgcagggcttgtgaccaatgaagtcatatttgttgatggttgacaaagcttgcttcactccatcagagaatgactatcaatttttttttaactgtcctatcacgtcctctcctgtcacccattttgaagagtggcagaacttgaagttcaacttcctctgtaaatatccaagtataaagcccaggaacttctagaataacccagatgcgctttaattttttttaatatgttttgatcacagaacttctagaataacccagatgctctttcatattcttttaatacatcttgatcacagctgggggaaaaaaagctttttaattctataccttcctagtagataagtgaagagcagggaaagagacctttaaatattttgctataaaaaaatttgtgataagtttctatcaaaatggggagattgcagaaaaggcttcccttggctcccaaggaggtgtagcaggtgtgagcaatattagtgccatgtgcctttcacacagggtttgcatttatcagtctgttttccgatgatgtgtacatgaaagagtacaccatgtgaagagaagagagaatgattgaaaatgttttagtatagaactcttcttgcagtgggttgctattttctagattttactttttagggaacaaaataaaatcctttgttaaaactggg

SEQ ID NO: 450824 - DNA, 921 bp, Homo sapiens
  misc_feature (920)..(920): n is a, c, g, or t
ccagtccccgcccctcgcgcgcttcgtttattcctccgcgcgctgggacaggctgcttcttcgccagaaccaaccggttgcttgctgtcccagcggcgccccctcatcaccgtcgccatgcccggaggtctgcttctcggggacgtggctcccaactttgaggccaataccaccgtcggccgcatccgtttccacgactttctgggagactcatggggcattctcttctcccaccctcgggactttaccccagtgtgcaccacagagcttggcagagctgcaaagctggcaccagaatttgccaagaggaatgttaagttgattgccctttcaatagacagtgttgaggaccatcttgcctggagcaaggatatcaatgcttacaattgtgaagagcccacagaaaagttaccttttcccatcatcgatgataggaatcgggagcttgccatcctgttgggcatgctggatccagcagagaaggatgaaaagggcatgcctgtgacagctcgtgtggtgtttgttttggtcctgataagaagctgaagctgtctatcctctacccagctaccactggcaggaactttgatgagattctcagggtagtcatctctctccagctgacagcagaaaaaagggttgccaccccagttgattggaaggatggggatagtgtgatggtccttccaaccatccctgaagaagaagccaaaaaacttttcccgaaaggagtcttcaccaaagagctcccatctggcaagaaatacctccgctagctagttttggagtgtgtttggcaagtgtgtgatggttttgggattcttaattcggttagcagtttggttcaggttttgtgggaaaaaaaagggggggataaatggggggaagaagtacgatggcagggggagttttcgctgggng

SEQ ID NO: 450825 - DNA, 1110 bp, Homo sapiens
tcgatcgagctcggtaccggcccccggggaatggaaggatggggatagtgtgatggtccttccaaccatccctgaagaagaagccaaaaaacttttcccgaaaggagtcttcaccaaagagctcccatctggcaagaaatacctccgctacacaccccagccttaagtctcttggagaagctggtgctgtgagccagaggatgtcagctgccaattgtgttttcctgcagcaattccataaacacatcctggtgtcatcacagccaaggtttttaggttgctataccaatggcttattaaatgaaaatggcactaaaagtttcttgagattctttatactctctgccttcagcaatcaattccattcatacatcagcactctgctggttctgtttgaaatatgttctgtatttaaaactcaaatcttgttggatctctgcagggcttgtgaccaatgaagtcatatttgttgatggttgacaaagcttgcttcactccatcagagaatgactatcaatttttttttaactgtcctatcacgtcctctcctgtcacccattttgaagagtggcagaacttgaagttcaacttcctctgtaaatatccaagtataaagcccaggaacttctagaataacccagatgcgctttaattttttttaatatgttttgatcacagaacttctagaataacccagatgctctttcatattcttttaatacatcttgatcacagctgggggaaaaaaagctttttaattctataccttcctagtagataagtgaagagcagggaaagagacctttaaatattttgctataaaaaaatttgtgataagtttctatcaaaatggggagattgcagaaaaggcttcccttggctcccaaggaggtgtagcaggtgtgagcaatattagtgccatgtgcctttcacacagggtttgcatttatcagtctgttttccgatgatgtgtacatgaaagagtacaccatgtgaagagaagagagaatgattgaaaatgttttagtatagaactcttcttgcagtgggttgctattttctagattttactttttagggaacaaaataaaatcctttgttaaaactggg

SEQ ID NO: 450826 - DNA, 1444 bp, Homo sapiens
aggaatacaaggaaagctagcatgcttggagaagaagctgcagaaggtggggtgagggacaagagatgagaggaggcaggattccatcacacagggcttgcaggccatgatactcagaattaaatgtaaagtgtggtggccagctgttactgggtttaaaacaggactgtttcttgttaagatgggggaactgctttcctgccaaaagtgccaaagatcaacttggaaaacaaaatcctcacagaggggagagtaaagaacacttgattagtctcattagcacctgtagctacttttctaaagttaattcctgaaggccttgaagcttcactatgagattgaatttcaccattctcaatgtctttcaataggatggggatagtgtgatggtccttccaaccatccctgaagaagaagccaaaaaacttttcccgaaaggagtcttcaccaaagagctcccatctggcaagaaatacctccgctacacaccccagccttaagtctcttggagaagctggtgctgtgagccagaggatgtcagctgccaattgtgttttcctgcagcaattccataaacacatcctggtgtcatcacagccaaggtttttaggttgctataccaatggcttattaaatgaaaatggcactaaaagtttcttgagattctttatactctctgccttcagcaatcaattccattcatacatcagcactctgctggttctgtttgaaatatgttctgtatttaaaactcaaatcttgttggatctctgcagggcttgtgaccaatgaagtcatatttgttgatggttgacaaagcttgcttcactccatcagagaatgactatcaatttttttttaactgtcctatcacgtcctctcctgtcacccattttgaagagtggcagaacttgaagttcaacttcctctgtaaatatccaagtataaagcccaggaacttctagaataacccagatgcgctttaattttttttaatatgttttgatcacagaacttctagaataacccagatgctctttcatattcttttaatacatcttgatcacagctgggggaaaaaaagctttttaattctataccttcctagtagataagtgaagagcagggaaagagacctttaaatattttgctataaaaaaatttgtgataagtttctatcaaaatggggagattgcagaaaaggcttcccttggctcccaaggaggtgtagcaggtgtgagcaatattagtgccatgtgcctttcacacagggtttgcatttatcagtctgttttccgatgatgtgtacatgaaagagtacaccatgtgaagagaagagagaatgattgaaaatgttttagtatagaactcttcttgcagtgggttgctattttctagattttactttttagggaacaaaataaaatcctttgttaaaactggg

SEQ ID NO: 450827 - DNA, 1763 bp, Homo sapiens
  misc_feature (10)..(10): n is a, c, g, or t
  misc_feature (458)..(458): n is a, c, g, or t
  misc_feature (506)..(506): n is a, c, g, or t
acgcaggctngctcaccgctcccgcactacccgggatacaccagatgctctatacatattcttttaatacatcttgatccacagctgggggaaaaaaagctttttaattctataccttcctagtagataagtgaagagcagggaaagagacctttaaatattttgctataaaaaaatttgtgataagtttctatcaaaatggggagattgcagaaaaggcttcccttggctcccaaggaggtgtagcaggtgtgagcaatattagtgccatgtgcctttcacacagggtttgcatttatcagtctgttttccgatgatgtgtacatgaaagagtacaccatgtgaagagaagagagaatgattgaaaatgttttagtatagaactcttcttgcagtgggttgctattttctagattttactttttagggaacaaaataaaatcctttgttaaaactgnaaaaaaaaaaaaaaaaaaaaaaaaaaaaaaaaaaaaaaaaaaaaaaancccaaccggttgcttgctgtcccagcggcgccccctcatcaccgtcgccatgcccggaggtctgcttctcggggacgtggctcccaactttgaggccaataccaccgtcggccgcatccgtttccacgactttctgggagactcatggggcattctcttctcccaccctcgggactttaccccagtgtgcaccacagagcttggcagagctgcaaagctggcagaagaagccaaaaaacttttcccgaaaggagtcttcaccaaagagctcccatctggcaagaaatacctccgctacacaccccagccttaagtctcttggagaagctggtgctgtgagccagaggatgtcagctgccaattgtgttttcctgcagcaattccataaacacatcctggtgtcatcacagccaaggtttttaggttgctataccaatggcttattaaatgaaaatggcactaaaagtttcttgagattctttatactctctgccttcagcaatcaattccattcatacatcagcactctgctggttctgtttgaaatatgttctgtatttaaaactcaaatcttgttggatctctgcagggcttgtgaccaatgaagtcatatttgttgatggttgacaaagcttgcttcactccatcagagaatgactatcaatttttttttaactgtcctatcacgtcctctcctgtcacccattttgaagagtggcagaacttgaagttcaacttcctctgtaaatatccaagtataaagcccaggaacttctagaataacccagatgcgctttaattttttttaatatgttttgatcacagaacttctagaataacccagatgctctttcatattcttttaatacatcttgatcacagctgggggaaaaaaagctttttaattctataccttcctagtagataagtgaagagcagggaaagagacctttaaatattttgctataaaaaaatttgtgataagtttctatcaaaatggggagattgcagaaaaggcttcccttggctcccaaggaggtgtagcaggtgtgagcaatattagtgccatgtgcctttcacacagggtttgcatttatcagtctgttttccgatgatgtgtacatgaaagagtacaccatgtgaagagaagagagaatgattgaaaatgttttagtatagaactcttcttgcagtgggttgctattttctagattttactttttagggaacaaaataaaatcctttgttaaaactggg

SEQ ID NO: 450828 - DNA, 1582 bp, Homo sapiens
  misc_feature (10)..(10): n is a, c, g, or t
  misc_feature (458)..(458): n is a, c, g, or t
  misc_feature (506)..(506): n is a, c, g, or t
acgcaggctngctcaccgctcccgcactacccgggatacaccagatgctctatacatattcttttaatacatcttgatccacagctgggggaaaaaaagctttttaattctataccttcctagtagataagtgaagagcagggaaagagacctttaaatattttgctataaaaaaatttgtgataagtttctatcaaaatggggagattgcagaaaaggcttcccttggctcccaaggaggtgtagcaggtgtgagcaatattagtgccatgtgcctttcacacagggtttgcatttatcagtctgttttccgatgatgtgtacatgaaagagtacaccatgtgaagagaagagagaatgattgaaaatgttttagtatagaactcttcttgcagtgggttgctattttctagattttactttttagggaacaaaataaaatcctttgttaaaactgnaaaaaaaaaaaaaaaaaaaaaaaaaaaaaaaaaaaaaaaaaaaaaaancccaaccggttgcttgctgtcccagcggcgccccctcatcacgaagaagccaaaaaacttttcccgaaaggagtcttcaccaaagagctcccatctggcaagaaatacctccgctacacaccccagccttaagtctcttggagaagctggtgctgtgagccagaggatgtcagctgccaattgtgttttcctgcagcaattccataaacacatcctggtgtcatcacagccaaggtttttaggttgctataccaatggcttattaaatgaaaatggcactaaaagtttcttgagattctttatactctctgccttcagcaatcaattccattcatacatcagcactctgctggttctgtttgaaatatgttctgtatttaaaactcaaatcttgttggatctctgcagggcttgtgaccaatgaagtcatatttgttgatggttgacaaagcttgcttcactccatcagagaatgactatcaatttttttttaactgtcctatcacgtcctctcctgtcacccattttgaagagtggcagaacttgaagttcaacttcctctgtaaatatccaagtataaagcccaggaacttctagaataacccagatgcgctttaattttttttaatatgttttgatcacagaacttctagaataacccagatgctctttcatattcttttaatacatcttgatcacagctgggggaaaaaaagctttttaattctataccttcctagtagataagtgaagagcagggaaagagacctttaaatattttgctataaaaaaatttgtgataagtttctatcaaaatggggagattgcagaaaaggcttcccttggctcccaaggaggtgtagcaggtgtgagcaatattagtgccatgtgcctttcacacagggtttgcatttatcagtctgttttccgatgatgtgtacatgaaagagtacaccatgtgaagagaagagagaatgattgaaaatgttttagtatagaactcttcttgcagtgggttgctattttctagattttactttttagggaacaaaataaaatcctttgttaaaactggg

SEQ ID NO: 450829 - DNA, 1659 bp, Homo sapiens
  misc_feature (10)..(10): n is a, c, g, or t
  misc_feature (458)..(458): n is a, c, g, or t
  misc_feature (506)..(506): n is a, c, g, or t
acgcaggctngctcaccgctcccgcactacccgggatacaccagatgctctatacatattcttttaatacatcttgatccacagctgggggaaaaaaagctttttaattctataccttcctagtagataagtgaagagcagggaaagagacctttaaatattttgctataaaaaaatttgtgataagtttctatcaaaatggggagattgcagaaaaggcttcccttggctcccaaggaggtgtagcaggtgtgagcaatattagtgccatgtgcctttcacacagggtttgcatttatcagtctgttttccgatgatgtgtacatgaaagagtacaccatgtgaagagaagagagaatgattgaaaatgttttagtatagaactcttcttgcagtgggttgctattttctagattttactttttagggaacaaaataaaatcctttgttaaaactgnaaaaaaaaaaaaaaaaaaaaaaaaaaaaaaaaaaaaaaaaaaaaaaancccaaccggttgcttgctgtcccagcggcgccccctcatcaccgtcgccatgcccggaggtctgcttctcggggacgtggctcccaactttgaggccaataccaccgtcggccgcatccgaagaagccaaaaaacttttcccgaaaggagtcttcaccaaagagctcccatctggcaagaaatacctccgctacacaccccagccttaagtctcttggagaagctggtgctgtgagccagaggatgtcagctgccaattgtgttttcctgcagcaattccataaacacatcctggtgtcatcacagccaaggtttttaggttgctataccaatggcttattaaatgaaaatggcactaaaagtttcttgagattctttatactctctgccttcagcaatcaattccattcatacatcagcactctgctggttctgtttgaaatatgttctgtatttaaaactcaaatcttgttggatctctgcagggcttgtgaccaatgaagtcatatttgttgatggttgacaaagcttgcttcactccatcagagaatgactatcaatttttttttaactgtcctatcacgtcctctcctgtcacccattttgaagagtggcagaacttgaagttcaacttcctctgtaaatatccaagtataaagcccaggaacttctagaataacccagatgcgctttaattttttttaatatgttttgatcacagaacttctagaataacccagatgctctttcatattcttttaatacatcttgatcacagctgggggaaaaaaagctttttaattctataccttcctagtagataagtgaagagcagggaaagagacctttaaatattttgctataaaaaaatttgtgataagtttctatcaaaatggggagattgcagaaaaggcttcccttggctcccaaggaggtgtagcaggtgtgagcaatattagtgccatgtgcctttcacacagggtttgcatttatcagtctgttttccgatgatgtgtacatgaaagagtacaccatgtgaagagaagagagaatgattgaaaatgttttagtatagaactcttcttgcagtgggttgctattttctagattttactttttagggaacaaaataaaatcctttgttaaaactggg

SEQ ID NO: 450830 - DNA, 1074 bp, Homo sapiens
  misc_feature (26)..(26): n is a, c, g, or t
atgatgcatgctcggagcgggccgcnagtgtggtggaattgaagaagccaaaaaacttttcccgaaaggagtcttcaccaaagagctcccatctggcaagaaatacctccgctacacaccccagccttaagtctcttggagaagctggtgctgtgagccagaggatgtcagctgccaattgtgttttcctgcagcaattccataaacacatcctggtgtcatcacagccaaggtttttaggttgctataccaatggcttattaaatgaaaatggcactaaaagtttcttgagattctttatactctctgccttcagcaatcaattccattcatacatcagcactctgctggttctgtttgaaatatgttctgtatttaaaactcaaatcttgttggatctctgcagggcttgtgaccaatgaagtcatatttgttgatggttgacaaagcttgcttcactccatcagagaatgactatcaatttttttttaactgtcctatcacgtcctctcctgtcacccattttgaagagtggcagaacttgaagttcaacttcctctgtaaatatccaagtataaagcccaggaacttctagaataacccagatgcgctttaattttttttaatatgttttgatcacagaacttctagaataacccagatgctctttcatattcttttaatacatcttgatcacagctgggggaaaaaaagctttttaattctataccttcctagtagataagtgaagagcagggaaagagacctttaaatattttgctataaaaaaatttgtgataagtttctatcaaaatggggagattgcagaaaaggcttcccttggctcccaaggaggtgtagcaggtgtgagcaatattagtgccatgtgcctttcacacagggtttgcatttatcagtctgttttccgatgatgtgtacatgaaagagtacaccatgtgaagagaagagagaatgattgaaaatgttttagtatagaactcttcttgcagtgggttgctattttctagattttactttttagggaacaaaataaaatcctttgttaaaactggg

SEQ ID NO: 450831 - DNA, 872 bp, Homo sapiens
gcagggcttgagttttaaatacagaacatatttcaaacagaaccagcagagtgctgatgtatgaatggaattgattgctgaaggcagagagtataaaagaatctcaagaaacttttagtgccattttcatttaatcagcactctgctggttctgtttgaaatatgttctgtatttaaaactcaaatcttgttggatctctgcagggcttgtgaccaatgaagtcatatttgttgatggttgacaaagcttgcttcactccatcagagaatgactatcaatttttttttaactgtcctatcacgtcctctcctgtcacccattttgaagagtggcagaacttgaagttcaacttcctctgtaaatatccaagtataaagcccaggaacttctagaataacccagatgcgctttaattttttttaatatgttttgatcacagaacttctagaataacccagatgctctttcatattcttttaatacatcttgatcacagctgggggaaaaaaagctttttaattctataccttcctagtagataagtgaagagcagggaaagagacctttaaatattttgctataaaaaaatttgtgataagtttctatcaaaatggggagattgcagaaaaggcttcccttggctcccaaggaggtgtagcaggtgtgagcaatattagtgccatgtgcctttcacacagggtttgcatttatcagtctgttttccgatgatgtgtacatgaaagagtacaccatgtgaagagaagagagaatgattgaaaatgttttagtatagaactcttcttgcagtgggttgctattttctagattttactttttagggaacaaaataaaatcctttgttaaaactggg

SEQ ID NO: 450832 - DNA, 1446 bp, Homo sapiens
ccagtccccgcccctcgcgcgcttcgtttattcctccgcgcgctgggacaggctgcttcttcgccagaaccaaccggttgcttgctgtcccagcggcgccccctcatcaccgtcgccatgcccggaggtctgcttctcggggacgtggctcccaactttgaggccaataccaccgtcggccgcatccgtttccacgactttctgggagactcatggggcattctcttctcccaccctcgggactttaccccagtgtgcaccacagagcttggcagagctgcaaagctggcaccagaatttgccaagaggaatgttaagttgattgccctttcaatagacagtgttgaggaccatcttgcctggagcaaggatatcaatgcttacaattgtgaagagcccacagaaaagttaccttttcccatcatcgatgataggaatcgggagcttgccatcctgttgggcatgctggatccagcagagaaggatgaaaagggcatgcctgtgacagctcgtgtggtgtttgttttggtcctgataagaagctgaagctgtctatcctctacccagctaccactggcaggaactttgatgagattctcagggtagtcatctctctccagctgacagcagaaaaaagggttgccaccccagttgattggaagatggagtctccttctgtcacccaagctggagtgcagtggcgtgatcttggcccactgcaacctctgcctcccgggttcaagtgattctcctgcctcagcctcctgagtagctggaactacaggcacacaccaccacgcctggctagtttttgtattattagtagagatggggtttcaccatattgaccaggctggtctcaaactcctgacctcatgatccacccaccttggcctcccaaaatgttggtattacagttgtgagccgccacgcctggccctaaatgttttcttaaattaaacacttataaatcttccagatatcaccttttgtcaaaattcaataattatgaatggaccttactatactgatgctttcttactaagctcctctctaccctgaatgcaagagaccctcatagttaggcaagaatatcatcaccccattcaacctgaaaaagctacagaagatggatcgtcatccctctgcaaccctcaggattaaggattctttcataaaagggagagggaaatgtcagagacatgtgaaccagagcatctccatcttaaataagagctgggtaaaatgaggctgaaagttactgggctgcattcccagacggataaagcaatctaagtcatgaagtcagcacaaaatacaggtcataatgaccttgctgataaaacaggttgcagtaaaggagccagccaaaaccaaaatggtgacaagactgacctctggtcgtcctcactgctacactcccatcagcaccatgacagtttacaa

SEQ ID NO: 450833 - DNA, 719 bp, Homo sapiens
ccagtccccgcccctcgcgcgcttcgtttattcctccgcgcgctgggacaggctgcttcttcgccagaaccaaccggttgcttgctgtcccagcggcgccccctcatcaccgtcgccatgcccggaggtctgcttctcggggacgtggctcccaactttgaggccaataccaccgtcggccgcatccgtttccacgactttctgggagactcatggggcattctcttctcccaccctcgggactttaccccagtgtgcaccacagagcttggcagagctgcaaagctggcaccagaatttgccaagaggaatgttaagttgattgccctttcaatagacagtgttgaggaccatcttgcctggagcaaggatatcaatgcttacaattgtgaagagcccacagaaaagttaccttttcccatcatcgatgataggaatcgggagcttgccatcctgttgggcatgctggatccagcagagaaggatgaaaagggcatgcctgtgacagctcgtgtggtgtttgttttggtcctgataagaagctgaagctgtctatcctctacccagctaccactggcaggaactttgatgagattctcagggtagtcatctctctccagctgacagcagaaaaaagggttgccaccccagttgattggaagttttgcaagaggaatgtcaactctgaatgccctatcaatagacatgtgtgagaccat

SEQ ID NO: 450834 - DNA, 1735 bp, Homo sapiens
ccagtccccgcccctcgcgcgcttcgtttattcctccgcgcgctgggacaggctgcttcttcgccagaaccaaccggttgcttgctgtcccagcggcgccccctcatcaccgtcgccatgcccggaggtctgcttctcggggacgtggctcccaactttgaggccaataccaccgtcggccgcatccgtttccacgactttctgggagactcatggggcattctcttctcccaccctcgggactttaccccagtgtgcaccacagagcttggcagagctgcaaagctggcaccagaatttgccaagaggaatgttaagttgattgccctttcaatagacagtgttgaggaccatcttgcctggagcaaggatatcaatgcttacaattgtgaagagcccacagaaaagttaccttttcccatcatcgatgataggaatcgggagcttgccatcctgttgggcatgctggatccagcagagaaggatgaaaagggcatgcctgtgacagctcgtgtggtgtttgttttggtcctgataagaagctgaagctgtctatcctctacccagctaccactggcaggaactttgatgagattctcagggtagtcatctctctccagctgacagcagaaaaaagggttgccaccccagttgattggaaggatggggatagtgtgatggtccttccaaccatccctgaagaagaagccaaaaaacttttcccgaaaggagtcttcaccaaagagctcccatctggcaagaaatacctccgctacacaccccagccttaagtctcttggagaagctggtgctgtgagccagaggatgtcagctgccaattgtgttttcctgcagcaattccataaacacatcctggtgtcatcacagccaaggtttttaggttgctataccaatggcttattaaatgaaaatggcactaaaagtttcttgagattctttatactctctgccttcagcaatcaattccattcatacatcagcactctgctggttctgtttgaaatatgttctgtatttaaaactcaaatcttgttggatctctgcagggcttgtgaccaatgaagtcatatttgttgatggttgacaaagcttgcttcactccatcagagaatgactatcaatttttttttaactgtcctatcacgtcctctcctgtcacccattttgaagagtggcagaacttgaagttcaacttcctctgtaaatatccaagtataaagcccaggaacttctagaataacccagatgcgctttaattttttttaatatgttttgatcacagaacttctagaataacccagatgctctttcatattcttttaatacatcttgatcacagctgggggaaaaaaagctttttaattctataccttcctagtagataagtgaagagcagggaaagagacctttaaatattttgctataaaaaaatttgtgataagtttctatcaaaatggggagattgcagaaaaggcttcccttggctcccaaggaggtgtagcaggtgtgagcaatattagtgccatgtgcctttcacacagggtttgcatttatcagtctgttttccgatgatgtgtacatgaaagagtacaccatgtgaagagaagagagaatgattgaaaatgttttagtatagaactcttcttgcagtgggttgctattttctagattttactttttagggaacaaaataaaatcctttgttaaaactggg

SEQ ID NO: 450835 - DNA, 1682 bp, Homo sapiens
ccagtccccgcccctcgcgcgcttcgtttattcctccgcgcgctgggacaggctgcttcttcgccagaaccaaccggttgcttgctgtcccagcggcgccccctcatcaccgtcgccatgcccggaggtctgcttctcggggacgtggctcccaactttgaggccaataccaccgtcggccgcatccgtttccacgactttctgggagactcatggggcattctcttctcccaccctcgggactttaccccagtgtgcaccacagagcttggcagagctgcaaagctggcaccagaatttgccaagaggaatgttaagttgattgccctttcaatagacagtgttgaggaccatcttgcctggagcaaggatatcaatgcttacaattgtgaagagcccacagaaaagttaccttttcccatcatcgatgataggaatcgggagcttgccatcctgttgggcatgctggatccagcagagaaggatgaaaagggcatgcctgtgacagctcgtgtggtgtttgttttggtcctgataagaagctgaagctgtctatcctctacccagctaccactggcaggaactttgatgagattctcagggtagtcatctctctccagctgacagcagaaaaaagggttgccaccccagttgattggaaggatggggatagtgtgatggtccttccaaccatccctgaagaagaagccaaaaaacttttcccgaaaggagtcttcaccaaagagctcccatctggcaagaaatacctccgctacacaccccagccttaagtctcttggagaagctggtgctgtgagccagaggatgtcagctgccaattgtgttttcctgcagcaattccataaacacatcctggtgtcatcacagccaaggtttttaggttgctataccaatggcttattaaatgaaaatggcactaaaagtttcttgagattctttatactctctgccttcagcaatcaattccattcatacatcagcactctgctggttctgtttgaaatatgttcttcatatttgttgatggttgacaaagcttgcttcactccatcagagaatgactatcaatttttttttaactgtcctatcacgtcctctcctgtcacccattttgaagagtggcagaacttgaagttcaacttcctctgtaaatatccaagtataaagcccaggaacttctagaataacccagatgcgctttaattttttttaatatgttttgatcacagaacttctagaataacccagatgctctttcatattcttttaatacatcttgatcacagctgggggaaaaaaagctttttaattctataccttcctagtagataagtgaagagcagggaaagagacctttaaatattttgctataaaaaaatttgtgataagtttctatcaaaatggggagattgcagaaaaggcttcccttggctcccaaggaggtgtagcaggtgtgagcaatattagtgccatgtgcctttcacacagggtttgcatttatcagtctgttttccgatgatgtgtacatgaaagagtacaccatgtgaagagaagagagaatgattgaaaatgttttagtatagaactcttcttgcagtgggttgctattttctagattttactttttagggaacaaaataaaatcctttgttaaaactggg

SEQ ID NO: 450836 - DNA, 2494 bp, Homo sapiens
ccagtccccgcccctcgcgcgcttcgtttattcctccgcgcgctgggacaggctgcttcttcgccagaaccaaccggttgcttgctgtcccagcggcgccccctcatcaccgtcgccatgcccggaggtctgcttctcggggacgtggctcccaactttgaggccaataccaccgtcggccgcatccgtttccacgactttctgggagactcatggggcattctcttctcccaccctcgggactttaccccagtgtgcaccacagagcttggcagagctgcaaagctggcaccagaatttgccaagaggaatgttaagttgattgccctttcaatagacagtgttgaggaccatcttgcctggagcaaggatatcaatgcttacaattgtgaagagcccacagaaaagttaccttttcccatcatcgatgataggaatcgggagcttgccatcctgttgggcatgctggatccagcagagaaggatgaaaagggcatgcctgtgacagctcgtgtggtgtttgttttggtcctgataagaagctgaagctgtctatcctctacccagctaccactggcaggaactttgatgagattctcagggtagtcatctctctccagctgacagcagaaaaaagggttgccaccccagttgattggaaggatggggatagtgtgatggtccttccaaccatccctgaagaagaagccaaaaaacttttcccgaaaggagtcttcaccaaagagctcccatctggcaagaaatacctccgctacacaccccagccttaagtctcttggagaagctggtgctgtgagccagaggatgtcagctgccaattgtgttttcctgcagcaattccataaacacatcctggtgtcatcacagccaaggtttttaggttgctataccaatggcttattaaatgaaaatggcactaaaagtttcttgagattctttatactctctgccttcagcaatcaattccattcatacatcagcactctgctggttctgtttgaaatatgttctgtatttaaaactcaaatcttgttggatctctgcagggcttgtgaccaatgaagtcatatttgttgatggttgacaaagcttgcttcactccatcagagaatgactatcaatttttttttaactgtcctatcacgtcctctcctgtcacccattttgaagagtggcagaacttgaagttcaacttcctctgtaaatatccaagtataaagcccaggaacttctagaataacccagatgcgctttaattttttttaatatgttttgatcacagaacttctagaataacccagatgctctttcatattcttttaatacatcttgatcacagctgggggaaaaaaagctttttaattctataccttcctagtacagggtttgcatttatcagtctgttttccgatgatgtgtacatgaaagagtacaccatgtgaagagaagagagaatgattgaaaatgttttagtatagaactcttcttgcagtgggttgctattttctagattttactttttagggaacaaaataaaatcctttgttaaaactgggaaaaaaaaaaaaaaaaaaaaaaaaaaaaaaaaaaaaaaaaaaaaaaagaaaaaaaaaaaaagaaaaatgccaaacaagagaagaagaagaaaaaaatagaaaagacacaaagaagacaggacaaaagacagacacacaaacatagcccgacaacaatgaccaaacaaacaacaaaacgtaagaaaagcatgaagtaatatcaaccgagataaacagcaagcagctcggcacctggctgggcagggaccaacgttcccctagcaagtggcgaggagacggttaacatacgagaatacgtcaatcggtttgagcgtaccactcaacgcacggaaaagcagcttaacgagctgtgacaattaacataaacgtaaaaacagaaaatctccagattatagacgacatacaggaaaggagacatggaaccataacagagcaagactataaaaacagaatgcaacaaggaacaaaatcacatgcaaaaaacacatctaaaacaacattaaacgaaaatcaagaacaaaggagtggcacaggtaccgaaaaagtgagaagacacagaaataaggagaagacagacaagagcagaacagaaaggaaaagggtacaaggaaaataaagtcaccgaggatgacgaacacaaaaacaaaaagtatagcacgcattgaaagcgaaaaagcaaaaaggacaacacaacaaaatcaagaaaaagaccaaaaaaaaaaaaagagaacaagacaaagaaagacacaaagacaaacaacaaaacaaaaaacgaagaagaaagacacaatagaaaaaacagaacaacagagccaaaaacagacaactatacaagaagaaaagaaaaacagaatacaaaaaagaaagtaaaaataacgaaaaacaacacaaaagcaacgcaaaaaaaaacacactca

SEQ ID NO: 450837 - DNA, 1705 bp, Homo sapiens
aagagtggtatcaacgcagagtgccccattacggccgggccaaccggttgcttgctgtcccagcggcgccccctcatcaccgtcgccatgcccggaggtctgcttctcggggacgtggctcccaactttgaggccaataccaccgtcggccgcatccgtttccacgactttctgggagactcatggggcattctcttctcccaccctcgggactttaccccagtgtgcaccacagagcttggcagagctgcaaagctggcaccagaatttgccaagaggaatgttaagttgattgccctttcaatagacagtgttgaggaccatcttgcctggagcaaggatatcaatgcttacaattgtgaagagcccacagaaaagttaccttttcccatcatcgatgataggaatcgggagcttgccatcctgttgggcatgctggatccagcagagaaggatgaaaagggcatgcctgtgacagctcgtgtggtgtttgttttggtcctgataagaagctgaagctgtctatcctctacccagctaccactggcaggaactttgatgagattctcagggtagtcatctctctccagctgacagcagaaaaaagggttgccaccccagttgattggaaggatggggatagtgtgatggtccttccaaccatccctgaagaagaagccaaaaaacttttcccgaaaggagtcttcaccaaagagctcccatctggcaagaaatacctccgctacacaccccagccttaagtctcttggagaagctggtgctgtgagccagaggatgtcagctgccaattgtgttttcctgcagcaattccataaacacatcctggtgtcatcacagccaaggtttttaggttgctataccaatggcttattaaatgaaaatggcactaaaagtttcttgagattctttatactctctgccttcagcaatcaattccattcatacatcagcactctgctggttctgtttgaaatatgttctgtatttaaaactcaaatcttgttggatctctgcagggcttgtgaccaatgaagtcatatttgttgatggttgacaaagcttgcttcactccatcagagaatgactatcaatttttttttaactgtcctatcacgtcctctcctgtcacccattttgaagagtggcagaacttgaagttcaacttcctctgtaaatatccaagtataaagcccaggaacttctagaataacccagatgcgctttaattttttttaatatgttttgatcacagaacttctagaataacccagatgctctttcatattcttttaatacatcttgatcacagctgggggaaaaaaagctttttaattctataccttcctagtagataagtgaagagcagggaaagagacctttaaatattttgctataaaaaaatttgtgataagtttctatcaaaatggggagattgcagaaaaggcttcccttggctcccaaggaggtgtagcaggtgtgagcaatattagtgccatgtgcctttcacacagggtttgcatttatcagtctgttttccgatgatgtgtacatgaaagagtacaccatgtgaagagaagagagaatgattgaaaatgttttagtatagaactcttcttgcagtgggttgctattttctagattttactttttagggaacaaaataaaatcctttgttaaaactggg

SEQ ID NO: 450838 - DNA, 1313 bp, Homo sapiens
ccagtccccgcccctcgcgcgcttcgtttattcctccgcgcgctgggacaggctgcttcttcgccagaaccaaccggttgcttgctgtcccagcggcgccccctcatcaccgtcgccatgcccggaggtctgcttctcggggacgtggctcccaactttgaggccaataccaccgtcggccgcatccgtttccacgactttctgggagactcatggggcattctcttctcccaccctcgggactttaccccagtgtgcaccacagagcttggcagagctgcaaagctggcaccagaatttgccaagaggaatgttaagttgattgccctttcaatagacagtgttgaggaccatcttgcctggagcaaggatatcaatgcttacaattgtgaagagcccacagaaaagttaccttttcccatcatcgatgataggaatcgggagcttgccatcctgttgggcatgctggatccagcagagaaggatgaaaagggcatgcctgtgacagctcgtgtggtgtttgttttggtcctgataagaagctgaagctgtctatcctctacccagctaccactggcaggaactttgatgagattctcagggtagtcatctctctccagctgacagcagaaaaaagggttgccaccccagttgattggaaggatggggatagtgtgatggtccttccaaccatccctgaagaagaagccaaaaaacttttcccgaaaggagtcttcaccaaagagctcccatctggcaagaaatacctccgctacacaccccagccttaagtctcttggagaagctggtgctgtgagccagaggatgtcagctgccaattgtgttttcctgcagcaattccataaacacatcctggtgtcatcacagccaaggtttttaggttgctataccaatggcttattaaatgaaaatggcactaaaagtttcttgagattctttatactctctgccttcagcaatcaattccattcatacatcagcactctgctggttctgtttgaaatatgttctgtatttaaaactcaaatcttgttggatctctgcagggcttgtgaccaatgaagtcatatttgttgatggttgacaaagcttgcttcactccatcagagaatgactatcaatttttttttaactgtcctatcacgtcctctcctgtcacccattttgaagagtggcagaacttgaagttcaacttcctctgtaaatatccaagtataaagcccaggaactaaagaaaaaaccagagcggccaagttttgattttgataatttaagaaataaaaaaaaataaa

SEQ ID NO: 450839 - DNA, 1795 bp, Homo sapiens
cccccccgtccgaccgtcggaccgtaccctccgtaccgccgagtgacgaccctaagggtctccccacgacgccggccacgatcatggcgagaccgcggcaactcgtatgcaacataaacgagtacagcgacggaccgacaaatgcccgggaattcggccatacgccggggcgtcgccatgcccggaggtctgcttctcggggacgtggctcccaactttgaggccaataccaccgtcggccgcatccgtttccacgactttctgggagactcatggggcattctcttctcccaccctcgggactttaccccagtgtgcaccacagagcttggcagagctgcaaagctggcaccagaatttgccaagaggaatgttaagttgattgccctttcaatagacagtgttgaggaccatcttgcctggagcaaggatatcaatgcttacaattgtgaagagcccacagaaaagttaccttttcccatcatcgatgataggaatcgggagcttgccatcctgttgggcatgctggatccagcagagaaggatgaaaagggcatgcctgtgacagctcgtgtggtgtttgttttggtcctgataagaagctgaagctgtctatcctctacccagctaccactggcaggaactttgatgagattctcagggtagtcatctctctccagctgacagcagaaaaaagggttgccaccccagttgattggaaggatggggatagtgtgatggtccttccaaccatccctgaagaagaagccaaaaaacttttcccgaaaggagtcttcaccaaagagctcccatctggcaagaaatacctccgctacacaccccagccttaagtctcttggagaagctggtgctgtgagccagaggatgtcagctgccaattgtgttttcctgcagcaattccataaacacatcctggtgtcatcacagccaaggtttttaggttgctataccaatggcttattaaatgaaaatggcactaaaagtttcttgagattctttatactctctgccttcagcaatcaattccattcatacatcagcactctgctggttctgtttgaaatatgttctgtatttaaaactcaaatcttgttggatctctgcagggcttgtgaccaatgaagtcatatttgttgatggttgacaaagcttgcttcactccatcagagaatgactatcaatttttttttaactgtcctatcacgtcctctcctgtcacccattttgaagagtggcagaacttgaagttcaacttcctctgtaaatatccaagtataaagcccaggaacttctagaataacccagatgcgctttaattttttttaatatgttttgatcacagaacttctagaataacccagatgctctttcatattcttttaatacatcttgatcacagctgggggaaaaaaagctttttaattctataccttcctagtagataagtgaagagcagggaaagagacctttaaatattttgctataaaaaaatttgtgataagtttctatcaaaatggggagattgcagaaaaggcttcccttggctcccaaggaggtgtagcaggtgtgagcaatattagtgccatgtgcctttcacacagggtttgcatttatcagtctgttttccgatgatgtgtacatgaaagagtacaccatgtgaagagaagagagaatgattgaaaatgttttagtatagaactcttcttgcagtgggttgctattttctagattttactttttagggaacaaaataaaatcctttgttaaaactggg

SEQ ID NO: 450840 - DNA, 1662 bp, Homo sapiens
ccagtccccgcccctcgcgcgcttcgtttattcctccgcgcgctgggacaggctgcttcttcgccagaaccaaccggttgcttgctgtcccagcggcgccccctcatcaccgtcgccatgcccggaggtctgcttctcggggacgtggctcccaactttgaggccaataccaccgtcggccgcatccgtttccacgactttctgggagactcatggggcattctcttctcccaccctcgggactttaccccagtgtgcaccacagagcttggcagagctgcaaagctggcaccagaatttgccaagaggaatgttaagttgattgccctttcaatagacagtgttgaggaccatcttgcctggagcaaggatatcaatgcttacaattgtgaagagcccacagaaaagttaccttttcccatcatcgatgataggaatcgggagcttgccatcctgttgggcatgctggatccagcagagaaggatgaaaagggcatgcctgtgacagctcgtgtggtgtttgttttggtcctgataagaagctgaagctgtctatcctctacccagctaccactggcaggaactttgatgagattctcagggtagtcatctctctccagctgacagcagaaaaaagggttgccaccccagttgattggaaggatggggatagtgtgatggtccttccaaccatccctgaaacacaccccagccttaagtctcttggagaagctggtgctgtgagccagaggatgtcagctgccaattgtgttttcctgcagcaattccataaacacatcctggtgtcatcacagccaaggtttttaggttgctataccaatggcttattaaatgaaaatggcactaaaagtttcttgagattctttatactctctgccttcagcaatcaattccattcatacatcagcactctgctggttctgtttgaaatatgttctgtatttaaaactcaaatcttgttggatctctgcagggcttgtgaccaatgaagtcatatttgttgatggttgacaaagcttgcttcactccatcagagaatgactatcaatttttttttaactgtcctatcacgtcctctcctgtcacccattttgaagagtggcagaacttgaagttcaacttcctctgtaaatatccaagtataaagcccaggaacttctagaataacccagatgcgctttaattttttttaatatgttttgatcacagaacttctagaataacccagatgctctttcatattcttttaatacatcttgatcacagctgggggaaaaaaagctttttaattctataccttcctagtagataagtgaagagcagggaaagagacctttaaatattttgctataaaaaaatttgtgataagtttctatcaaaatggggagattgcagaaaaggcttcccttggctcccaaggaggtgtagcaggtgtgagcaatattagtgccatgtgcctttcacacagggtttgcatttatcagtctgttttccgatgatgtgtacatgaaagagtacaccatgtgaagagaagagagaatgattgaaaatgttttagtatagaactcttcttgcagtgggttgctattttctagattttactttttagggaacaaaataaaatcctttgttaaaactggg

SEQ ID NO: 450841 - DNA, 1670 bp, Homo sapiens
ccagtccccgcccctcgcgcgcttcgtttattcctccgcgcgctgggacaggctgcttcttcgccagaaccaaccggttgcttgctgtcccagcggcgccccctcatcaccgtcgccatgcccggaggtctgcttctcggggacgtggctcccaactttgaggccaataccaccgtcggccgcatccgtttccacgactttctgggagactcatggggcattctcttctcccaccctcgggactttaccccagtgtgcaccacagagcttggcagagctgcaaagctggcaccagaatttgccaagaggaatgttaagttgattgccctttcaatagacagtgttgaggaccatcttgcctggagcaaggaatcgggagcttgccatcctgttgggcatgctggatccagcagagaaggatgaaaagggcatgcctgtgacagctcgtgtggtgtttgttttggtcctgataagaagctgaagctgtctatcctctacccagctaccactggcaggaactttgatgagattctcagggtagtcatctctctccagctgacagcagaaaaaagggttgccaccccagttgattggaaggatggggatagtgtgatggtccttccaaccatccctgaagaagaagccaaaaaacttttcccgaaaggagtcttcaccaaagagctcccatctggcaagaaatacctccgctacacaccccagccttaagtctcttggagaagctggtgctgtgagccagaggatgtcagctgccaattgtgttttcctgcagcaattccataaacacatcctggtgtcatcacagccaaggtttttaggttgctataccaatggcttattaaatgaaaatggcactaaaagtttcttgagattctttatactctctgccttcagcaatcaattccattcatacatcagcactctgctggttctgtttgaaatatgttctgtatttaaaactcaaatcttgttggatctctgcagggcttgtgaccaatgaagtcatatttgttgatggttgacaaagcttgcttcactccatcagagaatgactatcaatttttttttaactgtcctatcacgtcctctcctgtcacccattttgaagagtggcagaacttgaagttcaacttcctctgtaaatatccaagtataaagcccaggaacttctagaataacccagatgcgctttaattttttttaatatgttttgatcacagaacttctagaataacccagatgctctttcatattcttttaatacatcttgatcacagctgggggaaaaaaagctttttaattctataccttcctagtagataagtgaagagcagggaaagagacctttaaatattttgctataaaaaaatttgtgataagtttctatcaaaatggggagattgcagaaaaggcttcccttggctcccaaggaggtgtagcaggtgtgagcaatattagtgccatgtgcctttcacacagggtttgcatttatcagtctgttttccgatgatgtgtacatgaaagagtacaccatgtgaagagaagagagaatgattgaaaatgttttagtatagaactcttcttgcagtgggttgctattttctagattttactttttagggaacaaaataaaatcctttgttaaaactggg

SEQ ID NO: 450842 - DNA, 1270 bp, Homo sapiens
tccaaaagcttccagggataggaaaagggcatgcctgtgacagctcgtgtggtgtttgttttggtcctgataagaagctgaagctgtctatcctctacccagctaccactggcaggaactttgatgagattctcagggtagtcatctctctccagctgacagcagaaaaaagggttgccaccccagttgattggaaggatggggatagtgtgatggtccttccaaccatccctgaagaagaagccaaaaaacttttcccgaaaggagtcttcaccaaagagctcccatctggcaagaaatacctccgctacacaccccagccttaagtctcttggagaagctggtgctgtgagccagaggatgtcagctgccaattgtgttttcctgcagcaattccataaacacatcctggtgtcatcacagccaaggtttttaggttgctataccaatggcttattaaatgaaaatggcactaaaagtttcttgagattctttatactctctgccttcagcaatcaattccattcatacatcagcactctgctggttctgtttgaaatatgttctgtatttaaaactcaaatcttgttggatctctgcagggcttgtgaccaatgaagtcatatttgttgatggttgacaaagcttgcttcactccatcagagaatgactatcaatttttttttaactgtcctatcacgtcctctcctgtcacccattttgaagagtggcagaacttgaagttcaacttcctctgtaaatatccaagtataaagcccaggaacttctagaataacccagatgcgctttaattttttttaatatgttttgatcacagaacttctagaataacccagatgctctttcatattcttttaatacatcttgatcacagctgggggaaaaaaagctttttaattctataccttcctagtagataagtgaagagcagggaaagagacctttaaatattttgctataaaaaaatttgtgataagtttctatcaaaatggggagattgcagaaaaggcttcccttggctcccaaggaggtgtagcaggtgtgagcaatattagtgccatgtgcctttcacacagggtttgcatttatcagtctgttttccgatgatgtgtacatgaaagagtacaccatgtgaagagaagagagaatgattgaaaatgttttagtatagaactcttcttgcagtgggttgctattttctagattttactttttagggaacaaaataaaatcctttgttaaaactggg

SEQ ID NO: 450843 - DNA, 904 bp, Homo sapiens
ccagtccccgcccctcgcgcgcttcgtttattcctccgcgcgctgggacaggctgcttcttcgccagaaccaaccggttgcttgctgtcccagcggcgccccctcatcaccgtcgccatgcccggaggtctgcttctcggggacgtggctcccaactttgaggccaataccaccgtcggccgcatccgtttccacgactttctgggagactcatggggcattctcttctcccaccctcgggactttaccccagtgtgcaccacagagcttggcagagctgcaaagctggcaccagaatttgccaagaggaatgttaagttgattgccctttcaatagacagtgttgaggaccatcttgcctggagcaaggatatcaatgcttacaattgtgaagagcccacagaaaagttaccttttcccatcatcgatgataggaatcgggagcttgccatcctgttgggcatgctggatccagcagagaaggatgaaaagggcatgcctgtgacagctcgtgtggtgtttgttttggtcctgataagaagctgaagctgtctatcctctacccagctaccactggcaggaactttgatgagattctcagggtagtcatctctctccagctgacagcagaaaaaagggttgccaccccagttgattggaaggaagaagccaaaaaacttttcccgaaaggagtcttcaccaaagagctcccatctggcaagaaatacctccgctacacaccccagccttaagtctcttggagaagctggtgctgtgagccagaggatgtcagctgccaattgtgttttcctgcagcaattccataaacacatcctggtgtcatcacagccaaggtttttaggttgctataccaatggcttattaaatgaaaatggcactaaaa

SEQ ID NO: 450844 - DNA, 650 bp, Homo sapiens
  misc_feature (6)..(6): n is a, c, g, or t
  misc_feature (10)..(10): n is a, c, g, or t
tatggncggntcaccgggagaaactatatgggggtgaagctggagatatttcggatgataatctacctgtcactccctggaaacaggttcagcatgtttgcacttgttattttgtagctttaatgatttttgttttctaatagggcaaatgtctctaagcttggtgtttagagctgcttcatattttaaactagttccattccacagttctagttcaaaccagtttttacagcctcctgggtgggtcgtcttgacccaaactcttgtgttgttacattttgagaggttttcataccagaatgtaccaaaaagtgcacaaggtaaaggtaatttacagccagaaacaaatatacatttgtttcatttcttgactttccctaagcagataagcagaaacttgtttaactcattactttgtttgatgtgtcttacatatttttgactaaaagttatagaatgttattcctctgggggaatcttttacaggtggaggaatggggatagcagtattgcctcagattcaaactggcatcaccataaaccctgtaggccagggtggaatgaagtcagctcctttttatagttgaaatacaattttttattcaccattgtctgcacaaatccttgaaaataaacctttttttccctaa

SEQ ID NO: 450845 - DNA, 4567 bp, Homo sapiens
ggtggtcttgaactcctgacctcaggtaatccgcctgcctcggcctcccaaagtgctgggattacaggcgtgagccgcgcccggccagctgctgctgttttagacaatggttgatgaaggattcgaaggcctaaacaatagagcttttgttctgttttgtttttgagtggtcctgaacagttcttttgggcaggggaatttgtctgtgtgtgaatgtgcaaacatatatataatctgagtggctgcctggccttgtcctaggttttgtcccgtatatacgccgtctttttttttttttctttctgcatgtatgtatattttctcaaggcatctgtcctgcactagactttggcttgtctttccaggccagcttccagaggatgctttggcagttttccctctgggtaaccaagcaggctgcagccagcagatggcactgcagcagaaaggggcagagtccctttaggcccttgacaagcacggcggattagtaaccgtataatttaaccctccagttagccttggaggactcggtgtcgcacttccgcccgaactctaataaagcgggccgagttgtgtgcaattaaggatttcagtatgcaaatctgaatctgtacttttgtctcctccaccccacccccatcattagactggcaatgtcttttgtcacgttgtcaaagtgtcctcagagaagcggtgtctagatatcgccgatttctggttaaagtggctgaagtgatcccagcattaattaaatgcaggagaatcgagattctcctgatagtttaaggaaaagaaaaattcacacaagcaaacgggcaaccctttgaatgttttccgacgacgtggtgctttaggatctgaaagatgcgacttggtttttgttgttgttgttgttgttgttgttgtttttgagacggagtttccgctcttgttgcccaggctggagtgcaatggcgcgatctcggctcaccgcaacctccgcctcccaggttcaagcgattctcctgcctcggcctcccgagtagctgggattacattacaggcatgagccaccatgcccggctaattttgtatttgtagtagagacggggtttctccatgttggtcaggctggtctcgaactacgatctcaggtgatccgcctgcctcggcctcctaaagtgcttagattacaggcatgagccaccgcgcccggctaattttgtatgtttagtagagacggggtttctccttgttggtcaggctggtctcgaactccgacctcaggtgatccgcctggctcggcctcccaaagtgctgggattacaggcgtgaaccaccgcgcccggccgcgacttgtttttgttacaaggttcctcatttcatttgcaacgttcagacgcagtctgactagatttccatccggagtaaggaagagcagctcaagggcagtcacggaggccgcaggtgcggcttcttcacccgcggtgctggagttctctcaagtggaagcccaggacgatgaaaacctcataggtaggctgctgcttacacacagcagccgccacggcgcaaaataaactacaaaactacaagcctttaccttttcaaacacactgacgcgggccagccccagccctacgcccgcaggggcacgcagaaaagacttagttaccacggccaagtaggaagccttcgagatagcgttcttcttaccctacgtaaacacgcagtttcccgagctcgacaatcggctagccactcctgatagcgttcggcgctcgcctctcggcccttgctcctgcgtactacggcttcttccagtcacctcggcccggatcgggaagtgtcaagcgggcgctcccccatctccgccgctattaccactgaacccggaccccctacccaggtccagggccagccgccatgacgaacgtgtactccttggatgggattctggtgtttggtttgctctttgtttgcacctgtgcctacttcaagaaagtacctcgtctcaaaacctggctgctatcagagaagaagggtgtttggggtgtgttttacaaagccgctgtgattggaaccaggctgcatgctgctgtggcaattgcttgtgttgtaatggccttttacgtcctgtttataaaatgaattccaaagcacccaagtcatcaactgccaaccaaggggacggggatgaagaacctgttggagacctgaacccagtgtaggagagttcagctgaaatcatcggtccccaggatgacaccacagcatctgcccctgctatatgtggggaaaactcatggtcacgaacattatttatgcttcaggggactacagaaagccagcttcctttgatctatgtgtaaatcagtccttggcagagtgcatataatgtccggataaattacacccctcggtgataagattacatacctccttcataaaaacctgtcatcctgttttgttcttcagctcctcatcaggatcttttcaaactgaggctcattagggaaggaactaggctgtgttcagacttcttttgaagagagagaattttcaagacttcttttcactctttgatttggatctggcaaattggggaggggatgctgggtgggaaacagttatgaaatgccaagaaattctttggctttagaaatttatctttcatgtacccatccgggaacataaaagagaggcatagtgctcattgcaaaaagagaacagatgaagtagctgtgttatgtgctggtatcttgagagttttgccaagaaaatctgggcctacataaaatttgagaattatctgtgtgatgagaccagaaagcagtggcttagacaagaaaaaatctttctgttcaccagtatcctcaaatggagacttcacttgatcagatggtatatgaaaaatgaatcaactattgctatttcgtaaaacctttttatattttctaaatttacttagtgctaaatactgttactcagttttaaatgccacgactaggggaaaaagaaactattgaagaaataattgtttagtatatttgcagttggggtagaagaaagaaatctagtatattgattcatatactagtaaattcatctagtataagaacttgtgatgttagattgaagttttgtcatcttataaaagacaacaaacttattttctgtttaagtctgagtgttatggcaatttttagttgattacttatttttcttagccaaattttaattttcttcatattgcattgctctttagttgtctctggaaattctatttactttaaggacatgagaaattcaaatgagagaagttgctgatattcatcagtgtgtttggacagttcatagggtccacaaatcaaatgaggttgtttcctgaagtagaagaaaacagaactttgcaattgatactgaagtactttgccatggagttagtaactcctgagcagaccattttagatggctcagcatttggcaggaagacttctccattccctgcttatatctatggaaggatcagctgttggatgtctagaacttctctatttaaaaaaaaagagtaggtctaaaattaaattattataagcaagcatagacatgggtcttccagttgaattgtccattaccgtaaaacttaatggtggacaagttagctgtggttgattcctgtgtggcagtaaattgtcttctgtctgcttactccaaataataaaagctgctaggaagtttagattttgaaataggcagtttaatgctttgagggtttctagaaatacagaaagtcatcaagtaaacactgcatgtctaatcatctcagagttgtggctgttatctcttcaggaattggtccacagggtaaatttcaacaattcatacgttttccattgtcatttctgaggacctttgagatgagagaaaggaaatctagtggaacaggaaagagagttacaccttgtgggtgtgagtttgggacctgttggcagaagggaatgtcactccctggaaacaggttcagcatgtttgcacttgttattttgtagctttaatgatttttgttttctaatagggcaaatgtctctaagcttggtgtttagagctgcttcatattttaaactagttccattccacagttctagttcaaaccagtttttacagcctcctgggtgggtcgtcttgacccaaactcttgtgttgttacattttgagaggttttcataccagaatgtaccaaaaagtgcacaaggtaaaggtaatttacagccagaaacaaatatacatttgtttcatttcttgactttccctaagcagataagcagaaacttgtttaactcattactttgtttgatgtgtcttacatatttttgactaaaagttatagaatgttattcctctgggggaatcttttacaggtggaggaatggggatagcagtattgcctcagattcaaactggcatcaccataaaccctgtaggccagggtggaatgaagtcagctcctttttatagttgaaatacaattttttattcaccattgtctgcacaaatccttgaaaataaacctttttttccctaa

SEQ ID NO: 450846 - DNA, 4525 bp, Homo sapiens
ggtggtcttgaactcctgacctcaggtaatccgcctgcctcggcctcccaaagtgctgggattacaggcgtgagccgcgcccggccagctgctgctgttttagacaatggttgatgaaggattcgaaggcctaaacaatagagcttttgttctgttttgtttttgagtggtcctgaacagttcttttgggcaggggaatttgtctgtgtgtgaatgtgcaaacatatatataatctgagtggctgcctggccttgtcctaggttttgtcccgtatatacgccgtctttttttttttttctttctgcatgtatgtatattttctcaaggcatctgtcctgcactagactttggcttgtctttccaggccagcttccagaggatgctttggcagttttccctctgggtaaccaagcaggctgcagccagcagatggcactgcagcagaaaggggcagagtccctttaggcccttgacaagcacggcggattagtaaccgtataatttaaccctccagttagccttggaggactcggtgtcgcacttccgcccgaactctaataaagcgggccgagttgtgtgcaattaaggatttcagtatgcaaatctgaatctgtacttttgtctcctccaccccacccccatcattagactggcaatgtcttttgtcacgttgtcaaagtgtcctcagagaagcggtgtctagatatcgccgatttctggttaaagtggctgaagtgatcccagcattaattaaatgcaggagaatcgagattctcctgatagtttaaggaaaagaaaaattcacacaagcaaacgggcaaccctttgaatgttttccgacgacgtggtgctttaggatctgaaagatgcgacttggtttttgttgttgttgttgttgttgttgttgtttttgagacggagtttccgctcttgttgcccaggctggagtgcaatggcgcgatctcggctcaccgcaacctccgcctcccaggttcaagcgattctcctgcctcggcctcccgagtagctgggattacattacaggcatgagccaccatgcccggctaattttgtatttgtagtagagacggggtttctccatgttggtcaggctggtctcgaactacgatctcaggtgatccgcctgcctcggcctcctaaagtgcttagattacaggcatgagccaccgcgcccggctaattttgtatgtttagtagagacggggtttctccttgttggtcaggctggtctcgaactccgacctcaggtgatccgcctggctcggcctcccaaagtgctgggattacaggcgtgaaccaccgcgcccggccgcgacttgtttttgttacaaggttcctcatttcatttgcaacgttcagacgcagtctgactagatttccatccggagtaaggaagagcagctcaagggcagtcacggaggccgcaggtgcggcttcttcacccgcggtgctggagttctctcaagtggaagcccaggacgatgaaaacctcataggtaggctgctgcttacacacagcagccgccacggcgcaaaataaactacaaaactacaagcctttaccttttcaaacacactgacgcgggccagccccagccctacgcccgcaggggcacgcagaaaagacttagttaccacggccaagtaggaagccttcgagatagcgttcttcttaccctacgtaaacacgcagtttcccgagctcgacaatcggctagccactcctgatagcgttcggcgctcgcctctcggcccttgctcctgcgtactacggcttcttccagtcacctcggcccggatcgggaagtgtcaagcgggcgctcccccatctccgccgctattaccactgaacccggaccccctacccaggtccagggccagccgccatgacgaacgtgtactccttggatgggattctggtgtttggtttgctctttgtttgcacctgtgcctacttcaagaaagtacctcgtctcaaaacctggctgctatcagagaagaagggtgtttggggtgtgttttacaaagccgctgtgattggaaccaggctgcatgctgctgtggcaattgcttgtgttgtaatggccttttacgtcctgtttataaaatgaattccaaagcacccaagtcatcaactgccaaccaaggggacggggatgaagaacctgttggagacctgaacccagtgtaggagagttcagctgaaatcatcggtccccaggatgacaccacagcatctgcccctgctatatgtggggaaaactcatggtcacgaacattatttatgcttcaggggactacagaaagccagcttcctttgatctatgtgtaaatcagtccttggcagagtgcatataatgtccggataaattacacccctcggtgataagattacatacctccttcataaaaacctgtcatcctgttttgttcttcagctcctcatcaggatcttttcaaactgaggctcattagggaaggaactaggctgtgttcagacttcttttgaagagagagaattttcaagacttcttttcactctttgatttggatctggcaaattggggaggggatgctgggtgggaaacagttatgaaatgccaagaaattctttggctttagaaatttatctttcatgtacccatccgggaacataaaagagaggcatagtgctcattgcaaaaagagaacagatgaagtagctgtgttatgtgctggtatcttgagagttttgccaagaaaatctgggcctacataaaatttgagaattatctgtgtgatgagaccagaaagcagtggcttagacttcacttgatcagatggtatatgaaaaatgaatcaactattgctatttcgtaaaacctttttatattttctaaatttacttagtgctaaatactgttactcagttttaaatgccacgactaggggaaaaagaaactattgaagaaataattgtttagtatatttgcagttggggtagaagaaagaaatctagtatattgattcatatactagtaaattcatctagtataagaacttgtgatgttagattgaagttttgtcatcttataaaagacaacaaacttattttctgtttaagtctgagtgttatggcaatttttagttgattacttatttttcttagccaaattttaattttcttcatattgcattgctctttagttgtctctggaaattctatttactttaaggacatgagaaattcaaatgagagaagttgctgatattcatcagtgtgtttggacagttcatagggtccacaaatcaaatgaggttgtttcctgaagtagaagaaaacagaactttgcaattgatactgaagtactttgccatggagttagtaactcctgagcagaccattttagatggctcagcatttggcaggaagacttctccattccctgcttatatctatggaaggatcagctgttggatgtctagaacttctctatttaaaaaaaaagagtaggtctaaaattaaattattataagcaagcatagacatgggtcttccagttgaattgtccattaccgtaaaacttaatggtggacaagttagctgtggttgattcctgtgtggcagtaaattgtcttctgtctgcttactccaaataataaaagctgctaggaagtttagattttgaaataggcagtttaatgctttgagggtttctagaaatacagaaagtcatcaagtaaacactgcatgtctaatcatctcagagttgtggctgttatctcttcaggaattggtccacagggtaaatttcaacaattcatacgttttccattgtcatttctgaggacctttgagatgagagaaaggaaatctagtggaacaggaaagagagttacaccttgtgggtgtgagtttgggacctgttggcagaagggaatgtcactccctggaaacaggttcagcatgtttgcacttgttattttgtagctttaatgatttttgttttctaatagggcaaatgtctctaagcttggtgtttagagctgcttcatattttaaactagttccattccacagttctagttcaaaccagtttttacagcctcctgggtgggtcgtcttgacccaaactcttgtgttgttacattttgagaggttttcataccagaatgtaccaaaaagtgcacaaggtaaaggtaatttacagccagaaacaaatatacatttgtttcatttcttgactttccctaagcagataagcagaaacttgtttaactcattactttgtttgatgtgtcttacatatttttgactaaaagttatagaatgttattcctctgggggaatcttttacaggtggaggaatggggatagcagtattgcctcagattcaaactggcatcaccataaaccctgtaggccagggtggaatgaagtcagctcctttttatagttgaaatacaattttttattcaccattgtctgcacaaatccttgaaaataaacctttttttccctaa

SEQ ID NO: 450847 - DNA, 4435 bp, Homo sapiens
ggtggtcttgaactcctgacctcaggtaatccgcctgcctcggcctcccaaagtgctgggattacaggcgtgagccgcgcccggccagctgctgctgttttagacaatggttgatgaaggattcgaaggcctaaacaatagagcttttgttctgttttgtttttgagtggtcctgaacagttcttttgggcaggggaatttgtctgtgtgtgaatgtgcaaacatatatataatctgagtggctgcctggccttgtcctaggttttgtcccgtatatacgccgtctttttttttttttctttctgcatgtatgtatattttctcaaggcatctgtcctgcactagactttggcttgtctttccaggccagcttccagaggatgctttggcagttttccctctgggtaaccaagcaggctgcagccagcagatggcactgcagcagaaaggggcagagtccctttaggcccttgacaagcacggcggattagtaaccgtataatttaaccctccagttagccttggaggactcggtgtcgcacttccgcccgaactctaataaagcgggccgagttgtgtgcaattaaggatttcagtatgcaaatctgaatctgtacttttgtctcctccaccccacccccatcattagactggcaatgtcttttgtcacgttgtcaaagtgtcctcagagaagcggtgtctagatatcgccgatttctggttaaagtggctgaagtgatcccagcattaattaaatgcaggagaatcgagattctcctgatagtttaaggaaaagaaaaattcacacaagcaaacgggcaaccctttgaatgttttccgacgacgtggtgctttaggatctgaaagatgcgacttggtttttgttgttgttgttgttgttgttgttgtttttgagacggagtttccgctcttgttgcccaggctggagtgcaatggcgcgatctcggctcaccgcaacctccgcctcccaggttcaagcgattctcctgcctcggcctcccgagtagctgggattacattacaggcatgagccaccatgcccggctaattttgtatttgtagtagagacggggtttctccatgttggtcaggctggtctcgaactacgatctcaggtgatccgcctgcctcggcctcctaaagtgcttagattacaggcatgagccaccgcgcccggctaattttgtatgtttagtagagacggggtttctccttgttggtcaggctggtctcgaactccgacctcaggtgatccgcctggctcggcctcccaaagtgctgggattacaggcgtgaaccaccgcgcccggccgcgacttgtttttgttacaaggttcctcatttcatttgcaacgttcagacgcagtctgactagatttccatccggagtaaggaagagcagctcaagggcagtcacggaggccgcaggtgcggcttcttcacccgcggtgctggagttctctcaagtggaagcccaggacgatgaaaacctcataggtaggctgctgcttacacacagcagccgccacggcgcaaaataaactacaaaactacaagcctttaccttttcaaacacactgacgcgggccagccccagccctacgcccgcaggggcacgcagaaaagacttagttaccacggccaagtaggaagccttcgagatagcgttcttcttaccctacgtaaacacgcagtttcccgagctcgacaatcggctagccactcctgatagcgttcggcgctcgcctctcggcccttgctcctgcgtactacggcttcttccagtcacctcggcccggatcgggaagtgtcaagcgggcgctcccccatctccgccgctattaccactgaacccggaccccctacccaggtccagggccagccgccatgacgaacgccgctgtgattggaaccaggctgcatgctgctgtggcaattgcttgtgttgtaatggccttttacgtcctgtttataaaatgaattccaaagcacccaagtcatcaactgccaaccaaggggacggggatgaagaacctgttggagacctgaacccagtgtaggagagttcagctgaaatcatcggtccccaggatgacaccacagcatctgcccctgctatatgtggggaaaactcatggtcacgaacattatttatgcttcaggggactacagaaagccagcttcctttgatctatgtgtaaatcagtccttggcagagtgcatataatgtccggataaattacacccctcggtgataagattacatacctccttcataaaaacctgtcatcctgttttgttcttcagctcctcatcaggatcttttcaaactgaggctcattagggaaggaactaggctgtgttcagacttcttttgaagagagagaattttcaagacttcttttcactctttgatttggatctggcaaattggggaggggatgctgggtgggaaacagttatgaaatgccaagaaattctttggctttagaaatttatctttcatgtacccatccgggaacataaaagagaggcatagtgctcattgcaaaaagagaacagatgaagtagctgtgttatgtgctggtatcttgagagttttgccaagaaaatctgggcctacataaaatttgagaattatctgtgtgatgagaccagaaagcagtggcttagacaagaaaaaatctttctgttcaccagtatcctcaaatggagacttcacttgatcagatggtatatgaaaaatgaatcaactattgctatttcgtaaaacctttttatattttctaaatttacttagtgctaaatactgttactcagttttaaatgccacgactaggggaaaaagaaactattgaagaaataattgtttagtatatttgcagttggggtagaagaaagaaatctagtatattgattcatatactagtaaattcatctagtataagaacttgtgatgttagattgaagttttgtcatcttataaaagacaacaaacttattttctgtttaagtctgagtgttatggcaatttttagttgattacttatttttcttagccaaattttaattttcttcatattgcattgctctttagttgtctctggaaattctatttactttaaggacatgagaaattcaaatgagagaagttgctgatattcatcagtgtgtttggacagttcatagggtccacaaatcaaatgaggttgtttcctgaagtagaagaaaacagaactttgcaattgatactgaagtactttgccatggagttagtaactcctgagcagaccattttagatggctcagcatttggcaggaagacttctccattccctgcttatatctatggaaggatcagctgttggatgtctagaacttctctatttaaaaaaaaagagtaggtctaaaattaaattattataagcaagcatagacatgggtcttccagttgaattgtccattaccgtaaaacttaatggtggacaagttagctgtggttgattcctgtgtggcagtaaattgtcttctgtctgcttactccaaataataaaagctgctaggaagtttagattttgaaataggcagtttaatgctttgagggtttctagaaatacagaaagtcatcaagtaaacactgcatgtctaatcatctcagagttgtggctgttatctcttcaggaattggtccacagggtaaatttcaacaattcatacgttttccattgtcatttctgaggacctttgagatgagagaaaggaaatctagtggaacaggaaagagagttacaccttgtgggtgtgagtttgggacctgttggcagaagggaatgtcactccctggaaacaggttcagcatgtttgcacttgttattttgtagctttaatgatttttgttttctaatagggcaaatgtctctaagcttggtgtttagagctgcttcatattttaaactagttccattccacagttctagttcaaaccagtttttacagcctcctgggtgggtcgtcttgacccaaactcttgtgttgttacattttgagaggttttcataccagaatgtaccaaaaagtgcacaaggtaaaggtaatttacagccagaaacaaatatacatttgtttcatttcttgactttccctaagcagataagcagaaacttgtttaactcattactttgtttgatgtgtcttacatatttttgactaaaagttatagaatgttattcctctgggggaatcttttacaggtggaggaatggggatagcagtattgcctcagattcaaactggcatcaccataaaccctgtaggccagggtggaatgaagtcagctcctttttatagttgaaatacaattttttattcaccattgtctgcacaaatccttgaaaataaacctttttttccctaa

SEQ ID NO: 450848 - DNA, 4513 bp, Homo sapiens
ggtggtcttgaactcctgacctcaggtaatccgcctgcctcggcctcccaaagtgctgggattacaggcgtgagccgcgcccggccagctgctgctgttttagacaatggttgatgaaggattcgaaggcctaaacaatagagcttttgttctgttttgtttttgagtggtcctgaacagttcttttgggcaggggaatttgtctgtgtgtgaatgtgcaaacatatatataatctgagtggctgcctggccttgtcctaggttttgtcccgtatatacgccgtctttttttttttttctttctgcatgtatgtatattttctcaaggcatctgtcctgcactagactttggcttgtctttccaggccagcttccagaggatgctttggcagttttccctctgggtaaccaagcaggctgcagccagcagatggcactgcagcagaaaggggcagagtccctttaggcccttgacaagcacggcggattagtaaccgtataatttaaccctccagttagccttggaggactcggtgtcgcacttccgcccgaactctaataaagcgggccgagttgtgtgcaattaaggatttcagtatgcaaatctgaatctgtacttttgtctcctccaccccacccccatcattagactggcaatgtcttttgtcacgttgtcaaagtgtcctcagagaagcggtgtctagatatcgccgatttctggttaaagtggctgaagtgatcccagcattaattaaatgcaggagaatcgagattctcctgatagtttaaggaaaagaaaaattcacacaagcaaacgggcaaccctttgaatgttttccgacgacgtggtgctttaggatctgaaagatgcgacttggtttttgttgttgttgttgttgttgttgttgtttttgagacggagtttccgctcttgttgcccaggctggagtgcaatggcgcgatctcggctcaccgcaacctccgcctcccaggttcaagcgattctcctgcctcggcctcccgagtagctgggattacattacaggcatgagccaccatgcccggctaattttgtatttgtagtagagacggggtttctccatgttggtcaggctggtctcgaactacgatctcaggtgatccgcctgcctcggcctcctaaagtgcttagattacaggcatgagccaccgcgcccggctaattttgtatgtttagtagagacggggtttctccttgttggtcaggctggtctcgaactccgacctcaggtgatccgcctggctcggcctcccaaagtgctgggattacaggcgtgaaccaccgcgcccggccgcgacttgtttttgttacaaggttcctcatttcatttgcaacgttcagacgcagtctgactagatttccatccggagtaaggaagagcagctcaagggcagtcacggaggccgcaggtgcggcttcttcacccgcggtgctggagttctctcaagtggaagcccaggacgatgaaaacctcataggtaggctgctgcttacacacagcagccgccacggcgcaaaataaactacaaaactacaagcctttaccttttcaaacacactgacgcgggccagccccagccctacgcccgcaggggcacgcagaaaagacttagttaccacggccaagtaggaagccttcgagatagcgttcttcttaccctacgtaaacacgcagtttcccgagctcgacaatcggctagccactcctgatagcgttcggcgctcgcctctcggcccttgctcctgcgtactacggcttcttccagtcacctcggcccggatcgggaagtgtcaagcgggcgctcccccatctccgccgctattaccactgaacccggaccccctacccaggtccagggccagccgccatgacgaacgtgtactccttggatgggattctggtgtttggtttgctctttgtttgcacctgtgcctacttcaagaaagtacctcgtctcaaaacctggctgctatcagagaagaagggtgtttggggtgtgttttacaaagccgctgtgattggaaccaggctgcatgctgctgtggcaattgcttgtgttgtaatggccttttacgtcctgtttatgaagaacctgttggagacctgaacccagtgtaggagagttcagctgaaatcatcggtccccaggatgacaccacagcatctgcccctgctatatgtggggaaaactcatggtcacgaacattatttatgcttcaggggactacagaaagccagcttcctttgatctatgtgtaaatcagtccttggcagagtgcatataatgtccggataaattacacccctcggtgataagattacatacctccttcataaaaacctgtcatcctgttttgttcttcagctcctcatcaggatcttttcaaactgaggctcattagggaaggaactaggctgtgttcagacttcttttgaagagagagaattttcaagacttcttttcactctttgatttggatctggcaaattggggaggggatgctgggtgggaaacagttatgaaatgccaagaaattctttggctttagaaatttatctttcatgtacccatccgggaacataaaagagaggcatagtgctcattgcaaaaagagaacagatgaagtagctgtgttatgtgctggtatcttgagagttttgccaagaaaatctgggcctacataaaatttgagaattatctgtgtgatgagaccagaaagcagtggcttagacaagaaaaaatctttctgttcaccagtatcctcaaatggagacttcacttgatcagatggtatatgaaaaatgaatcaactattgctatttcgtaaaacctttttatattttctaaatttacttagtgctaaatactgttactcagttttaaatgccacgactaggggaaaaagaaactattgaagaaataattgtttagtatatttgcagttggggtagaagaaagaaatctagtatattgattcatatactagtaaattcatctagtataagaacttgtgatgttagattgaagttttgtcatcttataaaagacaacaaacttattttctgtttaagtctgagtgttatggcaatttttagttgattacttatttttcttagccaaattttaattttcttcatattgcattgctctttagttgtctctggaaattctatttactttaaggacatgagaaattcaaatgagagaagttgctgatattcatcagtgtgtttggacagttcatagggtccacaaatcaaatgaggttgtttcctgaagtagaagaaaacagaactttgcaattgatactgaagtactttgccatggagttagtaactcctgagcagaccattttagatggctcagcatttggcaggaagacttctccattccctgcttatatctatggaaggatcagctgttggatgtctagaacttctctatttaaaaaaaaagagtaggtctaaaattaaattattataagcaagcatagacatgggtcttccagttgaattgtccattaccgtaaaacttaatggtggacaagttagctgtggttgattcctgtgtggcagtaaattgtcttctgtctgcttactccaaataataaaagctgctaggaagtttagattttgaaataggcagtttaatgctttgagggtttctagaaatacagaaagtcatcaagtaaacactgcatgtctaatcatctcagagttgtggctgttatctcttcaggaattggtccacagggtaaatttcaacaattcatacgttttccattgtcatttctgaggacctttgagatgagagaaaggaaatctagtggaacaggaaagagagttacaccttgtgggtgtgagtttgggacctgttggcagaagggaatgtcactccctggaaacaggttcagcatgtttgcacttgttattttgtagctttaatgatttttgttttctaatagggcaaatgtctctaagcttggtgtttagagctgcttcatattttaaactagttccattccacagttctagttcaaaccagtttttacagcctcctgggtgggtcgtcttgacccaaactcttgtgttgttacattttgagaggttttcataccagaatgtaccaaaaagtgcacaaggtaaaggtaatttacagccagaaacaaatatacatttgtttcatttcttgactttccctaagcagataagcagaaacttgtttaactcattactttgtttgatgtgtcttacatatttttgactaaaagttatagaatgttattcctctgggggaatcttttacaggtggaggaatggggatagcagtattgcctcagattcaaactggcatcaccataaaccctgtaggccagggtggaatgaagtcagctcctttttatagttgaaatacaattttttattcaccattgtctgcacaaatccttgaaaataaacctttttttccctaa

SEQ ID NO: 450849 - DNA, 4514 bp, Homo sapiens
ggtggtcttgaactcctgacctcaggtaatccgcctgcctcggcctcccaaagtgctgggattacaggcgtgagccgcgcccggccagctgctgctgttttagacaatggttgatgaaggattcgaaggcctaaacaatagagcttttgttctgttttgtttttgagtggtcctgaacagttcttttgggcaggggaatttgtctgtgtgtgaatgtgcaaacatatatataatctgagtggctgcctggccttgtcctaggttttgtcccgtatatacgccgtctttttttttttttctttctgcatgtatgtatattttctcaaggcatctgtcctgcactagactttggcttgtctttccaggccagcttccagaggatgctttggcagttttccctctgggtaaccaagcaggctgcagccagcagatggcactgcagcagaaaggggcagagtccctttaggcccttgacaagcacggcggattagtaaccgtataatttaaccctccagttagccttggaggactcggtgtcgcacttccgcccgaactctaataaagcgggccgagttgtgtgcaattaaggatttcagtatgcaaatctgaatctgtacttttgtctcctccaccccacccccatcattagactggcaatgtcttttgtcacgttgtcaaagtgtcctcagagaagcggtgtctagatatcgccgatttctggttaaagtggctgaagtgatcccagcattaattaaatgcaggagaatcgagattctcctgatagtttaaggaaaagaaaaattcacacaagcaaacgggcaaccctttgaatgttttccgacgacgtggtgctttaggatctgaaagatgcgacttggtttttgttgttgttgttgttgttgttgttgtttttgagacggagtttccgctcttgttgcccaggctggagtgcaatggcgcgatctcggctcaccgcaacctccgcctcccaggttcaagcgattctcctgcctcggcctcccgagtagctgggattacattacaggcatgagccaccatgcccggctaattttgtatttgtagtagagacggggtttctccatgttggtcaggctggtctcgaactacgatctcaggtgatccgcctgcctcggcctcctaaagtgcttagattacaggcatgagccaccgcgcccggctaattttgtatgtttagtagagacggggtttctccttgttggtcaggctggtctcgaactccgacctcaggtgatccgcctggctcggcctcccaaagtgctgggattacaggcgtgaaccaccgcgcccggccgcgacttgtttttgttacaaggttcctcatttcatttgcaacgttcagacgcagtctgactagatttccatccggagtaaggaagagcagctcaagggcagtcacggaggccgcaggtgcggcttcttcacccgcggtgctggagttctctcaagtggaagcccaggacgatgaaaacctcataggtaggctgctgcttacacacagcagccgccacggcgcaaaataaactacaaaactacaagcctttaccttttcaaacacactgacgcgggccagccccagccctacgcccgcaggggcacgcagaaaagacttagttaccacggccaagtaggaagccttcgagatagcgttcttcttaccctacgtaaacacgcagtttcccgagctcgacaatcggctagccactcctgatagcgttcggcgctcgcctctcggcccttgctcctgcgtactacggcttcttccagtcacctcggcccggatcgggaagtgtcaagcgggcgctcccccatctccgccgctattaccactgaacccggaccccctacccaggtccagggccagccgccatgacgaacgtgtactccttggatgggattctggtgtttggtttgctctttgtttgcacctgtgcctacttcaagaaagtacctcgtctcaaaacctggctgctatcagagaagaagggtgtttggggtgtgttttacaaagccgctgtgattggaaccaggctgcatgctgctgtggcaattgcttgtgttgtaatggccttttacgtcctgtttataaaatgaattccaaagcacccaagtcatcaactgccaaccaaggggacggggatgaagaacctgttggagacctgaacccagtgtaggagagttcagctgaaatcatcggtccccaggatgacaccacagcatctgcccctgctatatgtggggcttcctttgatctatgtgtaaatcagtccttggcagagtgcatataatgtccggataaattacacccctcggtgataagattacatacctccttcataaaaacctgtcatcctgttttgttcttcagctcctcatcaggatcttttcaaactgaggctcattagggaaggaactaggctgtgttcagacttcttttgaagagagagaattttcaagacttcttttcactctttgatttggatctggcaaattggggaggggatgctgggtgggaaacagttatgaaatgccaagaaattctttggctttagaaatttatctttcatgtacccatccgggaacataaaagagaggcatagtgctcattgcaaaaagagaacagatgaagtagctgtgttatgtgctggtatcttgagagttttgccaagaaaatctgggcctacataaaatttgagaattatctgtgtgatgagaccagaaagcagtggcttagacaagaaaaaatctttctgttcaccagtatcctcaaatggagacttcacttgatcagatggtatatgaaaaatgaatcaactattgctatttcgtaaaacctttttatattttctaaatttacttagtgctaaatactgttactcagttttaaatgccacgactaggggaaaaagaaactattgaagaaataattgtttagtatatttgcagttggggtagaagaaagaaatctagtatattgattcatatactagtaaattcatctagtataagaacttgtgatgttagattgaagttttgtcatcttataaaagacaacaaacttattttctgtttaagtctgagtgttatggcaatttttagttgattacttatttttcttagccaaattttaattttcttcatattgcattgctctttagttgtctctggaaattctatttactttaaggacatgagaaattcaaatgagagaagttgctgatattcatcagtgtgtttggacagttcatagggtccacaaatcaaatgaggttgtttcctgaagtagaagaaaacagaactttgcaattgatactgaagtactttgccatggagttagtaactcctgagcagaccattttagatggctcagcatttggcaggaagacttctccattccctgcttatatctatggaaggatcagctgttggatgtctagaacttctctatttaaaaaaaaagagtaggtctaaaattaaattattataagcaagcatagacatgggtcttccagttgaattgtccattaccgtaaaacttaatggtggacaagttagctgtggttgattcctgtgtggcagtaaattgtcttctgtctgcttactccaaataataaaagctgctaggaagtttagattttgaaataggcagtttaatgctttgagggtttctagaaatacagaaagtcatcaagtaaacactgcatgtctaatcatctcagagttgtggctgttatctcttcaggaattggtccacagggtaaatttcaacaattcatacgttttccattgtcatttctgaggacctttgagatgagagaaaggaaatctagtggaacaggaaagagagttacaccttgtgggtgtgagtttgggacctgttggcagaagggaatgtcactccctggaaacaggttcagcatgtttgcacttgttattttgtagctttaatgatttttgttttctaatagggcaaatgtctctaagcttggtgtttagagctgcttcatattttaaactagttccattccacagttctagttcaaaccagtttttacagcctcctgggtgggtcgtcttgacccaaactcttgtgttgttacattttgagaggttttcataccagaatgtaccaaaaagtgcacaaggtaaaggtaatttacagccagaaacaaatatacatttgtttcatttcttgactttccctaagcagataagcagaaacttgtttaactcattactttgtttgatgtgtcttacatatttttgactaaaagttatagaatgttattcctctgggggaatcttttacaggtggaggaatggggatagcagtattgcctcagattcaaactggcatcaccataaaccctgtaggccagggtggaatgaagtcagctcctttttatagttgaaatacaattttttattcaccattgtctgcacaaatccttgaaaataaacctttttttccctaa

SEQ ID NO: 450850 - DNA, 4966 bp, Homo sapiens
ggtggtcttgaactcctgacctcaggtaatccgcctgcctcggcctcccaaagtgctgggattacaggcgtgagccgcgcccggccagctgctgctgttttagacaatggttgatgaaggattcgaaggcctaaacaatagagcttttgttctgttttgtttttgagtggtcctgaacagttcttttgggcaggggaatttgtctgtgtgtgaatgtgcaaacatatatataatctgagtggctgcctggccttgtcctaggttttgtcccgtatatacgccgtctttttttttttttctttctgcatgtatgtatattttctcaaggcatctgtcctgcactagactttggcttgtctttccaggccagcttccagaggatgctttggcagttttccctctgggtaaccaagcaggctgcagccagcagatggcactgcagcagaaaggggcagagtccctttaggcccttgacaagcacggcggattagtaaccgtataatttaaccctccagttagccttggaggactcggtgtcgcacttccgcccgaactctaataaagcgggccgagttgtgtgcaattaaggatttcagtatgcaaatctgaatctgtacttttgtctcctccaccccacccccatcattagactggcaatgtcttttgtcacgttgtcaaagtgtcctcagagaagcggtgtctagatatcgccgatttctggttaaagtggctgaagtgatcccagcattaattaaatgcaggagaatcgagattctcctgatagtttaaggaaaagaaaaattcacacaagcaaacgggcaaccctttgaatgttttccgacgacgtggtgctttaggatctgaaagatgcgacttggtttttgttgttgttgttgttgttgttgttgtttttgagacggagtttccgctcttgttgcccaggctggagtgcaatggcgcgatctcggctcaccgcaacctccgcctcccaggttcaagcgattctcctgcctcggcctcccgagtagctgggattacattacaggcatgagccaccatgcccggctaattttgtatttgtagtagagacggggtttctccatgttggtcaggctggtctcgaactacgatctcaggtgatccgcctgcctcggcctcctaaagtgcttagattacaggcatgagccaccgcgcccggctaattttgtatgtttagtagagacggggtttctccttgttggtcaggctggtctcgaactccgacctcaggtgatccgcctggctcggcctcccaaagtgctgggattacaggcgtgaaccaccgcgcccggccgcgacttgtttttgttacaaggttcctcatttcatttgcaacgttcagacgcagtctgactagatttccatccggagtaaggaagagcagctcaagggcagtcacggaggccgcaggtgcggcttcttcacccgcggtgctggagttctctcaagtggaagcccaggacgatgaaaacctcataggtaggctgctgcttacacacagcagccgccacggcgcaaaataaactacaaaactacaagcctttaccttttcaaacacactgacgcgggccagccccagccctacgcccgcaggggcacgcagaaaagacttagttaccacggccaagtaggaagccttcgagatagcgttcttcttaccctacgtaaacacgcagtttcccgagctcgacaatcggctagccactcctgatagcgttcggcgctcgcctctcggcccttgctcctgcgtactacggcttcttccagtcacctcggcccggatcgggaagtgtcaagcgggcgctcccccatctccgccgctattaccactgaacccggaccccctacccaggtccagggccagccgccatgacgaacgtgtactccttggatgggattctggtgtttggtttgctctttgtttgcacctgtgcctacttcaagaaagtacctcgtctcaaaacctggctgctatcagagaagaagggtgtttggggtgtgttttacaaagccgctgtgattggaaccaggctgcatgctgctgtggcaattgcttgtgttgtaatggccttttacgtcctgtttataaaatgaattccaaagcacccaagtcatcaactgccaaccaaggggacggggatgaagaacctgttggagacctgaacccagtgtaggagagttcagctgaaatcatcggtccccaggatgacaccacagcatctgcccctgctatatgtggggaaaactcatggtcacgaacattatttatgcttcaggggactacagaaagccagcttcctttgatctatgtgtaaatcagtccttggcagagtgcatataatgtccggataaattacacccctcggtgataagattacatacctccttcataaaaacctgtcatcctgttttgttcttcagctcctcatcaggatcttttcaaactgaggctcattagggaaggaactaggctgtgttcagacttcttttgaagagagagaattttcaagacttcttttcactctttgatttggatctggcaaattggggaggggatgctgggtgggaaacagttatgaaatgccaagaaattctttggctttagaaatttatctttcatgtacccatccgggaacataaaagagaggcatagtgctcattgcaaaaagagaacagatgaagtagctgtgttatgtgctggtatcttgagagttttgccaagaaaatctgggcctacataaaatttgagaattatctgtgtgatgagaccagaaagcagtggcttagacaagaaaaaatctttctgttcaccagtatcctcaaatggagacttcacttgatcagatggtatatgaaaaatgaatcaactattgctatttcgtaaaacctttttatattttctaaatttacttagtgctaaatactgttactcagttttaaatgccacgactaggggaaaaagaaactattgaagaaataattgtttagtatatttgcagttggggtagaagaaagaaatctagtatattgattcatatactagtaaattcatctagtataagaacttgtgatgttagattgaagttttgtcatcttataaaagacaacaaacttattttctgtttaagtctgagtgttatggcaatttttagttgattacttatttttcttagccaaattttaattttcttcatattgcattgctctttagttgtctctggaaattctatttactttaaggacatgagaaattcaaatgagagaagttgctgatattcatcagtgtgtttggacagttcatagggtccacaaatcaaatgaggttgtttcctgaagtagaagaaaacagaactttgcaattgatactgaagtactttgccatggagttagtaactcctgagcagaccattttagatggctcagcatttggcaggaagacttctccattccctgcttatatctatggaaggatcagctgttggatgtctagaacttctctatttaaaaaaaaagagtaggtctaaaattaaattattataagcaagcatagacatgggtcttccagttgaattgtccattaccgtaaaacttaatggtggacaagttagctgtggttgattcctgtgtggcagtaaattgtcttctgtctgcttactccaaataataaaagctgctaggaagtttagattttgaaataggcagtttaatgctttgagggtttctagaaatacagaaagtcatcaagtaaacactgcatgtctaatcatctcagagttgtggctgttatctcttcaggaattggtccacagggtaaatttcaacaattcatacgttttccattgtcatttctgaggacctttgagatgagagaaaggaaatctagtggaacaggaaagagagttacaccttgtgggtgtgagtttgggacctgttggcagaagggaatgtcactccctggaaacaggttcagcatgtttgcacttgttattttgtagctttaatgatttttgttttctaatagggcaaatgtctctaagcttggtgtttagagctgcttcatattttaaactagttccattccacagttctagttcaaaccagtttttacagcctcctgggtgggtcgtcttgacccaaactcttgtgttgttacattttgagaggttttcataccagaatgtaccaaaaagtgcacaaggtaaaggtaatttacagccagaaacaaatatacatttgtttcatttcttgactttccctaagcagataagcagaaacttgtttaactcattactttgtttgatgtgtcttacatatttttgactaaaagttatagaatgttattcctctgggggaatcttttacaggtggaggaatggggatagcagtattgcctcagattcaaactggcatcaccataaaccctgtaggccagggtggaatgaagtcagctcctttttatagttgaaatacaattttttattcaccattgtctgcacaaatccttgaaaataaacctttttttccctaaccttaaaatgaaaaacaacacgacaaccacaaaaaataacaacaaacacacaacaaaaatcacacagcagcaagaacaacaaagagggggggcgcgccgcacgaaaaagcacgccccaggggtgggagcaccacgagaagaagcgagaagacacacgggactactcagatgcacaaaaagggcgcgcccccaaataggaagcgagcatcttatataaaaacccacacccgaacaacgcgccaccacacattacaaaaaaaaacaatcaaagcaaaagacgtgaaacaaacatcggcacacaatggagcaacaccggtgcgacagagaagaccccacaagcaaacggagaagagtgaacaaaacagacgcgagaaaacgacaacacgagctacaggcaca

SEQ ID NO: 450851 - DNA, 2504 bp, Homo sapiens
ggtggtcttgaactcctgacctcaggtaatccgcctgcctcggcctcccaaagtgctgggattacaggcgtgagccgcgcccggccagctgctgctgttttagacaatggttgatgaaggattcgaaggcctaaacaatagagcttttgttctgttttgtttttgagtggtcctgaacagttcttttgggcaggggaatttgtctgtgtgtgaatgtgcaaacatatatataatctgagtggctgcctggccttgtcctaggttttgtcccgtatatacgccgtctttttttttttttctttctgcatgtatgtatattttctcaaggcatctgtcctgcactagactttggcttgtctttccaggccagcttccagaggatgctttggcagttttccctctgggtaaccaagcaggctgcagccagcagatggcactgcagcagaaaggggcagagtccctttaggcccttgacaagcacggcggattagtaaccgtataatttaaccctccagttagccttggaggactcggtgtcgcacttccgcccgaactctaataaagcgggccgagttgtgtgcaattaaggatttcagtatgcaaatctgaatctgtacttttgtctcctccaccccacccccatcattagactggcaatgtcttttgtcacgttgtcaaagtgtcctcagagaagcggtgtctagatatcgccgatttctggttaaagtggctgaagtgatcccagcattaattaaatgcaggagaatcgagattctcctgatagtttaaggaaaagaaaaattcacacaagcaaacgggcaaccctttgaatgttttccgacgacgtggtgctttaggatctgaaagatgcgacttggtttttgttgttgttgttgttgttgttgttgtttttgagacggagtttccgctcttgttgcccaggctggagtgcaatggcgcgatctcggctcaccgcaacctccgcctcccaggttcaagcgattctcctgcctcggcctcccgagtagctgggattacattacaggcatgagccaccatgcccggctaattttgtatttgtagtagagacggggtttctccatgttggtcaggctggtctcgaactacgatctcaggtgatccgcctgcctcggcctcctaaagtgcttagattacaggcatgagccaccgcgcccggctaattttgtatgtttagtagagacggggtttctccttgttggtcaggctggtctcgaactccgacctcaggtgatccgcctggctcggcctcccaaagtgctgggattacaggcgtgaaccaccgcgcccggccgcgacttgtttttgttacaaggttcctcatttcatttgcaacgttcagacgcagtctgactagatttccatccggagtaaggaagagcagctcaagggcagtcacggaggccgcaggtgcggcttcttcacccgcggtgctggagttctctcaagtggaagcccaggacgatgaaaacctcataggtaggctgctgcttacacacagcagccgccacggcgcaaaataaactacaaaactacaagcctttaccttttcaaacacactgacgcgggccagccccagccctacgcccgcaggggcacgcagaaaagacttagttaccacggccaagtaggaagccttcgagatagcgttcttcttaccctacgtaaacacgcagtttcccgagctcgacaatcggctagccactcctgatagcgttcggcgctcgcctctcggcccttgctcctgcgtactacggcttcttccagtcacctcggcccggatcgggaagtgtcaagcgggcgctcccccatctccgccgctattaccactgaacccggaccccctacccaggtccagggccagccgccatgacgaacgtgtactccttggatgggattctggtgtttggtttgctctttgtttgcacctgtgcctacttcaagaaagtacctcgtctcaaaacctggctgctatcagagaagaagggtgtttggggtgtgttttacaaaggtgaggccatgtctggacagggagaagagactgccatctctggacagtgtggagctacaaagtagggagtacagtgagctgggattatatttggtttcatttttagaaaaaaatccctccgattgggtctgagagtctggaaaattaatcattctccaaagttgagggaagaggtaaaagttaaaatttgctgggtgtgatggctcatgcctataatctcagcactttggggggccaaggcaggaggattgcttgtgtccaggagttgtagatcagcccgggcaacacagtgagaccccatttctacaaaatatacaaaaattagccaggtatggtggcacgtgcctgtagtcccagttactcaggagactgaggtgggaggattgcttgagcctaggaggttgaggctgcagtgagccatggtggagccactgcactccagcccaggtgacag

SEQ ID NO: 450852 - DNA, 4588 bp, Homo sapiens
ggtggtcttgaactcctgacctcaggtaatccgcctgcctcggcctcccaaagtgctgggattacaggcgtgagccgcgcccggccagctgctgctgttttagacaatggttgatgaaggattcgaaggcctaaacaatagagcttttgttctgttttgtttttgagtggtcctgaacagttcttttgggcaggggaatttgtctgtgtgtgaatgtgcaaacatatatataatctgagtggctgcctggccttgtcctaggttttgtcccgtatatacgccgtctttttttttttttctttctgcatgtatgtatattttctcaaggcatctgtcctgcactagactttggcttgtctttccaggccagcttccagaggatgctttggcagttttccctctgggtaaccaagcaggctgcagccagcagatggcactgcagcagaaaggggcagagtccctttaggcccttgacaagcacggcggattagtaaccgtataatttaaccctccagttagccttggaggactcggtgtcgcacttccgcccgaactctaataaagcgggccgagttgtgtgcaattaaggatttcagtatgcaaatctgaatctgtacttttgtctcctccaccccacccccatcattagactggcaatgtcttttgtcacgttgtcaaagtgtcctcagagaagcggtgtctagatatcgccgatttctggttaaagtggctgaagtgatcccagcattaattaaatgcaggagaatcgagattctcctgatagtttaaggaaaagaaaaattcacacaagcaaacgggcaaccctttgaatgttttccgacgacgtggtgctttaggatctgaaagatgcgacttggtttttgttgttgttgttgttgttgttgttgtttttgagacggagtttccgctcttgttgcccaggctggagtgcaatggcgcgatctcggctcaccgcaacctccgcctcccaggttcaagcgattctcctgcctcggcctcccgagtagctgggattacattacaggcatgagccaccatgcccggctaattttgtatttgtagtagagacggggtttctccatgttggtcaggctggtctcgaactacgatctcaggtgatccgcctgcctcggcctcctaaagtgcttagattacaggcatgagccaccgcgcccggctaattttgtatgtttagtagagacggggtttctccttgttggtcaggctggtctcgaactccgacctcaggtgatccgcctggctcggcctcccaaagtgctgggattacaggcgtgaaccaccgcgcccggccgcgacttgtttttgttacaaggttcctcatttcatttgcaacgttcagacgcagtctgactagatttccatccggagtaaggaagagcagctcaagggcagtcacggaggccgcaggtgcggcttcttcacccgcggtgctggagttctctcaagtggaagcccaggacgatgaaaacctcataggtaggctgctgcttacacacagcagccgccacggcgcaaaataaactacaaaactacaagcctttaccttttcaaacacactgacgcgggccagccccagccctacgcccgcaggggcacgcagaaaagacttagttaccacggccaagtaggaagccttcgagatagcgttcttcttaccctacgtaaacacgcagtttcccgagctcgacaatcggctagccactcctgatagcgttcggcgctcgcctctcggcccttgctcctgcgtactacggcttcttccagtcacctcggcccggatcgggaagtgtcaagcgggcgctcccccatctccgccgctattaccactgaacccggaccccctacccaggtccagggccagccgccatgacgaacgtgtactccttggatgggattctggtgtttggtttgctctttgtttgcacctgtgcctacttcaagaaagtacctcgtctcaaaacctggctgctatcagagaagaagggtgtttggggtgtgttttacaaagccgctgtgattggaaccaggctgcatgctgctgtggcaattgcttgtgttgtaatggccttttacgtcctgtttataaaatgaattccaaagcacccaagtcatcaactgccaaccaaggggacggggatgaagaacctgttggagacctgaacccagtgtaggagagttcagctgaaatcatcggtccccaggatgacaccacagcatctgcccctgctatatgtggggaaaactcatggtcacgaacattatttatgcttcaggggactacagaaagccagcttcctttgatctatgtgtaaatcagtccttggcagagtgcatataatgtccggataaattacacccctcggtgataagattacatacctccttcataaaaacctgtcatcctgttttgttcttcagctcctcatcaggatcttttcaaactgaggctcattagggaaggaactaggctgtgttcagacttcttttgaagagagagaattttcaagacttcttttcactctttgatttggatctggcaaattggggaggggatgctgggtgggaaacagttatgaaatgccaagaaattctttggctttagaaatttatctttcatgtacccatccgggaacataaaagagaggcatagtgctcattgcaaaaagagaacagatgaagtagctgtgttatgtgctggtatcttgagagttttgccaagaaaatctgggcctacataaaatttgagaattatctgtgtgatgagaccagaaagcagtggcttagacaagaaaaaatctttctgttcaccagtatcctcaaatggagacttcacttgatcagatggtatatgaaaaatgaatcaactattgctatttcgtaaaacctttttatattttctaaatttacttagtgctaaatactgttactcagttttaaatgccacgactaggggaaaaagaaactattgaagaaataattgtttagtatatttgcagttggggtagaagaaagaaatctagtatattgattcatatactagtaaattcatctagtataagaacttgtgatgttagattgaagttttgtcatcttataaaagacaacaaacttattttctgtttaagtctgagtgttatggcaatttttagttgattacttatttttcttagccaaattttaattttcttcatattgcattgctctttagttgtctctggaaattctatttactttaaggacatgagaaattcaaatgagagaagttgctgatattcatcagtgtgtttggacagttcatagggtccacaaatcaaatgaggttgtttcctgaagtagaagaaaacagaactttgcaattgatactgaagtactttgccatggagttagtaactcctgagcagaccattttagatggctcagcatttggcaggaagacttctccattccctgcttatatctatggaaggatcagctgttggatgtctagaacttctctatttaaaaaaaaagagtaggtctaaaattaaattattataagcaagcatagacatgggtcttccagttgaattgtccattaccgtaaaacttaatggtggacaagttagctgtggttgattcctgtgtggcagtaaattgtcttctgtctgcttactccaaataataaaagctgctaggaagtttagattttgaaataggcagtttaatgctttgagggtttctagaaatacagaaagtcatcaagtaaacactgcatgtctaatcatctcagagttgtggctgttatctcttcaggaattggtccacagggtaaatttcaacaattcatacgttttccattgtcatttctgaggacctttgagatgagagaaaggaaatctagtggaacaggaaagagagttacaccttgtgggtgtgagtttgggacctgttggcagaagggaatgtcactccctggaaacaggttcagcatgtttgcacttgttattttgtagctttaatgatttttgttttctaatagggcaaatgtctctaagcttggtgtttagagctgcttcatattttaaactagttccattccacagttctagttcaaaccagtttttacagcctcctgggtgggtcgtcttgacccaaactcttgtgttgttacattttgagaggttttcataccagaatgtaccaaaaagtgcacaaggtaaaggtaatttacagccagaaacaaatatacatttgtttcatttcttgactttccctaagcagataagcagaaacttgtttaactcattactttgtttgatgtgtcttacatatttttgactaaaagttatagaatgttattcctctgggggaatcttttacaggtggaggaatggggatagcagtattgcctcagattcaaactggcatcaccataaaccctgtaggccagggtggaatgaagtcagctcctttttatagttgaaatacaattttttattcaccattgtctgcacaaatccttgaaaataaacctttttttccctaaaaaataatgataaagaaaaaa

SEQ ID NO: 450853 - DNA, 1885 bp, Homo sapiens
tgtcattgggtatgcttccatctgcattgagcattctggtaatttgttgatatcccctcttctgttttctcacaaccagtcttttgttggtgtagatttattctattctatagttgttttcttttcatagtggagtgtttttagagagacacgaagtatctgctcagtctgccttgttgaatcagaaacacctcacctattctttttttactgtgtgctattagggaattgtattagcaagctaatttaggatttcttttataataacgttatattaaaagtaaaagctttaatgacagagaacaatgttaaattctagtaattcgataagtaatttataaagcatttttattctgtttttcagaaacggtgggagcccagagtatatgagatgtcttcagaggctcatctaactctgtccttacatactcaatgcatatatgaaaacaatactaaataaacatctgatctgtataaaaatgtaaattagtttgacactgcttttttgataggtgtggtcatttctccccatggtagtttaaaacatcagaaactgaattctggacagatttaagccttgacacactgtgttttttttttttttcccccttcttttttgggtcttgatttttttccccattgtgatgtttggtaacgaatttaaaatgtagttttaaataaagtttggacttatctataaagtatcttttttggaaattatattgaattctatacagcaagtcaatgttttatataactttaggctgctcagagaagagcaatggttaagagttagttagagaaatatattatttgttataaagcccatccattaggccagtcttccaactaatgccagtgttgctgctgttgggtctgatgttcttcttttagatacctgcaggtcctattcctgtgcaagaatagggcagattatcaagatatccaggatacctatgaagttattatagaatatttattaatccattgaaattggataataagtttagaacataggttctcagtatctagaacttacatcattatctgtttgttaggatttgaaattctggaaaatatttatctacatcgcctcagactaaaagtaaaaaaaataagctttctataattagggagatttctgcacagagaagtaacattgtggttaattttaaatgaaaaacttaactttttcaagtggggataaataatacaactaaatttctgtaatagtaagattctatatgccttcagataaacttgcctattgagatggtaatttaaagccaaagcatagcagtttcttttgtgtgtagtgaggttgaagcagatttgcagggtgaagtattgaaagtttatgtgactttaagtcagcttttgaaaagtgatttgctttttatcccaaactgtccatatacccagtaaggcttcaaaaaaccagtcaacaatgagtaagtcaatcttatagattcttcttcctcgaataaaatacaaagaattagttccaataagtattttaactttgttaacaactgaaataccccataaaaaaagaactcgttgagagtatttctttaaaatggttacttgctgcccaggcaccatggctcactcctgtaatcccagcaccttgggaggccgaggcgggcagatcacgaggtcaagagattgagaccatcctgcccaacatgggggaaaccccgtctctactaaaaataaaaaaattagctgggagaggtggcacgtgcctgtagtcctagctacttgggaggctaaggcaggagaatagcctgaacccgggaggtggaggttgcaggttgcagtgagccgagatcatgccactgcactccagcctggcaacagagcgagactctgtctcaaaaaa

SEQ ID NO: 450854 - DNA, 434 bp, Homo sapiens
aagaaaacgaaatgtgatagaattactgagaaaataattcactatttctttacatggatgactggtttggatctagagtatgtatttttttttttcattacattacaggaagcagaatctggtaatataagtcaaaagtctgatgaagaagattttgtaaaagttgaagatttaccactgaaactgacaatatattcagaggcagatctaagaaagaaaatggtagaagaagaacagaaaaaccatttatctggtgaaatatgtgaaatgcagaccgaagaattagctggaaattctgagacactaaaagaacctgaaacggtgggagcccagagtatatgagatgtcttcagaggctcatctaactctgtccttacatactcaatgcatatatgaaaacaatactaaataaacatctgatctgtataaaaatg

SEQ ID NO: 450855 - DNA, 482 bp, Homo sapiens
tgtcattgggtatgcttccatctgcattgagcattctggtaatttgttgatatcccctcttctgttttctcacaaccagtcttttgttggtgtagatttattctattctatagttgttttcttttcatagtggagtgtttttagagagacacgaagtatctgctcagtctgccttgttgaatcagaaacacctcacctattctttttttactgtgtgctattagggaattgtattagcaagctaatttaggatttcttttataataacgttatattaaaagtaaaagctttaatgacagagaacaatgttaaattctagtaattcgataagtaatttataaagcatttttattctgtttttcagaaacggtgggagcccagagtatatgagatgtcttcagaggctcatctaactctgtccttacatactcaatgcatatatgaaaacaatactaaataaacatctgatctgtataaaaatg

SEQ ID NO: 450856 - DNA, 6575 bp, Homo sapiens
tgccgcttccgcggtcacatgactccagtctagctcgcattgcgctcccgccggcgagttctccccgcgcgccgttgcgaggagacggcgcatgtccgccgcgcttgcccctctgcagtaccccgcccctcttctcccaccacaatgagatgctaagatggcggtggctgcggcggttggcgctgcgtagctgaggtcgaaaaggcggccactggggccgaggcagccaggaaacgtgtgggcctctctgctgcggtctccgagggccgaccgctgccggcggcgggtcgtgggggctgactgtcgctctgcctttgacaggagaggctgcttcttgtagaggaaacagctttgaagtgtggagcgggaaaggagcagtttctgagctgcaaaaactagtttctaaacagagagttaattgttaaatccagtatggccacaggaggaggtccctttgaagatggcatgaatgatcaggatttaccaaactggagtaatgagaatgttgatgacaggctcaacaatatggattggggtgcccaacagaagaaagcaaatagatcatcagaaaagaataagaaaaagtttggtgtagaaagtgataaaagagtaaccaatgatatttctccggagtcgtcaccaggagttggaaggcgaagaacaaagactccacatacgttcccacacagtagatacatgagtcagatgtctgtcccagagcaggcagaattagagaaactgaaacagcggataaacttcagtgatttagatcagagaagcattggaagtgattcccaaggtagagcaacagctgctaacaacaaacgtcagcttagtgaaaaccgaaagcccttcaactttttgcctatgcagattaatactaacaagagcaaagatgcatctacaagtcccccaaacagagaaacgattggatcagcacagtgtaaagagttgtttgcttctgctttaagtaatgacctcttgcaaaactgtcaggtgtctgaagaagatgggaggggagaacctgcaatggagagcagccagattgtaagcaggcttgttcaaattcgcgattatattactaaagctagttccatgcgggaagatcttgtagagaaaaatgagagatctgctaatgttgagcgccttactcatctaatagatcaccttaaagaacaagagaagtcatatatgaaatttcttaaaaaaatccttgccagagatcctcagcaggagcctatggaagagatagaaaatttgaagaaacaacatgatttattaaaaagaatgttacaacagcaggagcaactaagagctctacagggacggcaggctgcacttctagctctgcaacataaagcagagcaagctattgcagtgatggatgattctgttgttgcagaaactgcaggtagcttatctggcgtcagtatcacatctgaactaaatgaagaattgaatgacttaattcagcgttttcataatcagcttcgtgattctcagcctccagctgttccagacaatagaagacaggcagaaagtctttcattaactagggaggtttcccagagcaggaaaccatcagcttcagaacgtttacctgatgagaaagtcgaactttttagcaaaatgagagtgctacaggaaaagaaacaaaaaatggacaaattgcttggagaacttcatacacttcgagatcagcatcttaacaattcatcatcctctccacaaaggagtgtcgatcagagaagtacttcagctccctctgcttctgtaggcttggcaccggttgtcaatggagaatccaatagcctcacatcatctgttccttatcctactgcttctctagtatctcagaatgagagtgaaaacgaaggccacctcaatccatctgaaaaactccagaagttaaatgaagttcgaaagagattgaatgagctaagagaattagttcattattatgaacaaacgtcagacatgatgacagatgctgtgaatgaaaacaggaaagatgaagaaactgaagagtcagaatatgattctgagcatgaaaattccgagcctgttactaacattcgaaatccacaagtagcttccacttggaatgaagtaaatagtcatagtaatgcacagtgtgtttctaataatagagatgggcgaacagttaattctaattgtgaaattaacaacagatctgctgccaacataagggctctaaacgtgcctccttctttagattgtcgatataatagagaaggggaacaggagattcatgttgcacaaggtgaagatgatgaggaggaggaggaagaagcagaagaggagggagtcagtggagcttcattatctagtcacaggagcagtctggttgatgagcatccagaagatgctgaatttgaacagaagatcaaccgacttatggctgcaaaacagaaacttagacagttacaagatcttgttgctatggtacaggatgatgatgcagctcaaggagttatctctgccagtgcatcaaatttggatgatttctacccagcagaagaagacaccaagcaaaattcaaataacactagaggaaatgccaataaaacacagaaagatactggagtaaatgaaaaggcaagagagaaattttatgaggctaaactacagcagcaacagagagagctaaaacaattgcaggaagaaagaaagaaactgattgacattcaggagaaaattcaagcattgcaaacggcatgccctgacttacagctgtcagctgctagtgtgggtaactgtcccaccaaaaaatatatgccagctgttacttcaaccccaactgttaatcaacacgagaccagtacaagcaaatctgtttttgagcctgaagattcttcaatagtagataatgagttgtggtcagaaatgagaagacatgaaatgttgagggaggagctgcgacagagaagaaagcagcttgaagctctgatggctgaacatcagaggaggcaaggtctagctgaaactgcatctccagtggctgtgtcattgagaagtgatggatctgagaacctatgtactcctcagcaaagtagaacagaaaaaacgatggcaacttggggagggtctacccagtgtgcactagatgaagaaggagatgaagacggttacctttctgaaggaattgttcggacagatgaagaggaggaagaagagcaagatgccagttccaatgataacttttctgtgtgtccttctaacagtgtgaatcataactcctacaatcgaaaggaaactaaaaatacgtggaagaacaattgccctttttcggcagatgaaaattatcgtcctttagccaagacaaggcaacagaatatcagcatgcaacggcaagaaaaccttcgttgggtgtcagagctctcttacgtagaagagaaagaacaatggcaagaacaaatcaatcagctaaagaaacagcttgattttagtgtcagtatttgtcagactttgatgcaagaccagcagactctatcttgtctgctacaaactcttctcacgggtccttacagtgttatgcccagcaatgttgcatctcctcaagtacacttcataatgcaccagttgaaccagtgctatactcagctaacatggcaacagaataatgttcagaggttgaaacaaatgctaaatgaacttatgcgccagcaaaatcagcatccagaaaaacctggaggcaaggaaagaggcagtagtgcatcgcaccctccttctcccagtttattttgtcctttcagctttccaacacagcctgtaaatctcttcaatatacctggatttactaacttttcatcatttgcaccaggtatgaatttcagccctttatttccttctaattttggagatttttctcagaatatctctacacccagtgaacagcagcaacccttagcccagaattcttcaggaaaaacagaatatatggcttttccaaaaccttttgaaagcagttcctctattggagcagagaaaccaaggaataaaaaactgcctgaagaggaggtggaaagcagtaggacaccatggttatatgaacaagaaggtgaagtagagaaaccatttatcaagactggattttcagtgtctgtagaaaaatctacaagtagtaaccgcaaaaatcaattagatacaaacggaagaagacgccagtttgatgaagaatcactggaaagctttagcagtatgcctgatccagtagatccaacaacagtgactaaaacattcaagacaagaaaagcgtctgcacaggccagcctggcatctaaagataaaactcccaagtcaaaaagtaagaagaggaattctactcagctgaaaagcagagttaaaaacatcaggtatgaaagtgccagtatgtctagcacatgtgaaccttgcaaaagtaggaacagacattcagcccagactgaagagcctgttcaagcaaaagtattcagcagaaagaatcatgagcaactggaaaaaataataaaatgtaataggtctacagaaatatcttcagaaactgggagtgatttttccatgtttgaagctttgcgagatactatttattctgaagtagctacattaatttctcaaaatgaatctcgtccacattttcttattgaactcttccatgagctgcagctactaaacacagactacttgagacagagggctttatatgcattgcaggacatagtatccagacatatttctgagagccatgaaaaaggagaaaatgtaaagtcagtaaactctggtacttggatagcatcaaactcagaacttactcctagtgagagccttgctactactgatgatgaaacttttgagaagaactttgaaagagaaacccataaaataagtgagcaaaatgatgctgataatgctagtgtcctgtctgtatcatcaaattttgagccttttgcaacagatgatctaggtaacaccgtgattcacttagatcaagcattagccagaatgagagaatatgagcgtatgaagactgaggctgaaagtaactcaaatatgagatgcatctgcaggattattgaggatggagatggtgctggtgcagaaactcccgttattgaaaatcgtagttcacaacaacctgtaagtgaagtttctaccatcccatgtcctagaattgatactcagcagctggaccggcaaattaaagcaattatgaaagaagtcattccttttttgaaggagcacatggatgaagtatgctcctcgcagcttctaacttcagtaaggcgcatggttttgacccttacccagcaaaatgatgagagcaaagagtttgtaaagttctttcataaacaacttggaagtatattacaggattcactggcaaaatttgctggcagaaaactgaaagactgtggagaagatcttcttgtagagatatctgaagtgttgttcaatgaattggctttctttaagcttatgcaagatttggataataatagtataactgttaaacagagatgcaaaaggaaaatagaagcaactggagtgatacaatcttgtgccaaagaggctaaaaggattcttgaagatcatggctcacctgctggagagattgatgatgaagacaaagacaaggatgaaactgaaacagttaagcagactcaaacatctgaggtgtatgatggtcccaaaaatgtaagatctgatatttctgatcaagaggaagatgaagaaagtgaaggatgtccagtgtctattaatttgtctaaagctgaaactcaggctttaactaattatggaagtggagaagatgaaaatgaggatgaagaaatggaagaatttgaagaaggccctgtggatgtccagacttccctccaggctaacactgaagctactgaagaaaatgaacatgatgaacaggtcctacaacgtgactttaaaaagacagcagaaagcaaaaatgtcccattggaacgagaagccactagtaaaaatgaccaaaataactgtcctgtgaaaccctgttacctcaatatcttggaagatgagcaacctttaaatagtgctgcccataaggagtcacctcctactgttgattcaactcaacagcctaaccctttgccgttacgtttacctgaaatggaacccttagtgcctagagtcaaagaagttaaatctgctcaggaaactcctgaaagctctctggctggaagtcctgatactgaatctccagtgttagtgaatgactatgaagcagaatctggtaatataagtcaaaagtctgatgaagaagattttgtaaaagttgaagatttaccactgaaactgacaatatattcagaggcagatctaagaaagaaaatggtagaagaagaacagaaaaaccatttatctggtgaaatatgtgaaatgcagaccgaagaattagctggaaattctgagacactaaaagaacctgaaacggtgggagcccagagtatatgagatgtcttcagaggctcatctaactctgtccttacatactcaatgcatatatgaaaacaatactaaataaacatctgatctgtataaaaatg

SEQ ID NO: 450857 - DNA, 7978 bp, Homo sapiens
tgccgcttccgcggtcacatgactccagtctagctcgcattgcgctcccgccggcgagttctccccgcgcgccgttgcgaggagacggcgcatgtccgccgcgcttgcccctctgcagtaccccgcccctcttctcccaccacaatgagatgctaagatggcggtggctgcggcggttggcgctgcgtagctgaggtcgaaaaggcggccactggggccgaggcagccaggaaacgtgtgggcctctctgctgcggtctccgagggccgaccgctgccggcggcgggtcgtgggggctgactgtcgctctgcctttgacaggagaggctgcttcttgtagaggaaacagctttgaagtgtggagcgggaaaggagcagtttctgagctgcaaaaactagtttctaaacagagagttaattgttaaatccagtatggccacaggaggaggtccctttgaagatggcatgaatgatcaggatttaccaaactggagtaatgagaatgttgatgacaggctcaacaatatggattggggtgcccaacagaagaaagcaaatagatcatcagaaaagaataagaaaaagtttggtgtagaaagtgataaaagagtaaccaatgatatttctccggagtcgtcaccaggagttggaaggcgaagaacaaagactccacatacgttcccacacagtagatacatgagtcagatgtctgtcccagagcaggcagaattagagaaactgaaacagcggataaacttcagtgatttagatcagagaagcattggaagtgattcccaaggtagagcaacagctgctaacaacaaacgtcagcttagtgaaaaccgaaagcccttcaactttttgcctatgcagattaatactaacaagagcaaagatgcatctacaagtcccccaaacagagaaacgattggatcagcacagtgtaaagagttgtttgcttctgctttaagtaatgacctcttgcaaaactgtcaggtgtctgaagaagatgggaggggagaacctgcaatggagagcagccagattgtaagcaggcttgttcaaattcgcgattatattactaaagctagttccatgcgggaagatcttgtagagaaaaatgagagatctgctaatgttgagcgccttactcatctaatagatcaccttaaagaacaagagaagtcatatatgaaatttcttaaaaaaatccttgccagagatcctcagcaggagcctatggaagagatagaaaatttgaagaaacaacatgatttattaaaaagaatgttacaacagcaggagcaactaagagctctacagggacggcaggctgcacttctagctctgcaacataaagcagagcaagctattgcagtgatggatgattctgttgttgcagaaactgcaggtagcttatctggcgtcagtatcacatctgaactaaatgaagaattgaatgacttaattcagcgttttcataatcagcttcgtgattctcagcctccagctgttccagacaatagaagacaggcagaaagtctttcattaactagggaggtttcccagagcaggaaaccatcagcttcagaacgtttacctgatgagaaagtcgaactttttagcaaaatgagagtgctacaggaaaagaaacaaaaaatggacaaattgcttggagaacttcatacacttcgagatcagcatcttaacaattcatcatcctctccacaaaggagtgtcgatcagagaagtacttcagctccctctgcttctgtaggcttggcaccggttgtcaatggagaatccaatagcctcacatcatctgttccttatcctactgcttctctagtatctcagaatgagagtgaaaacgaaggccacctcaatccatctgaaaaactccagaagttaaatgaagttcgaaagagattgaatgagctaagagaattagttcattattatgaacaaacgtcagacatgatgacagatgctgtgaatgaaaacaggaaagatgaagaaactgaagagtcagaatatgattctgagcatgaaaattccgagcctgttactaacattcgaaatccacaagtagcttccacttggaatgaagtaaatagtcatagtaatgcacagtgtgtttctaataatagagatgggcgaacagttaattctaattgtgaaattaacaacagatctgctgccaacataagggctctaaacgtgcctccttctttagattgtcgatataatagagaaggggaacaggagattcatgttgcacaaggtgaagatgatgaggaggaggaggaagaagcagaagaggagggagtcagtggagcttcattatctagtcacaggagcagtctggttgatgagcatccagaagatgctgaatttgaacagaagatcaaccgacttatggctgcaaaacagaaacttagacagttacaagatcttgttgctatggtacaggatgatgatgcagctcaaggagttatctctgccagtgcatcaaatttggatgatttctacccagcagaagaagacaccaagcaaaattcaaataacactagaggaaatgccaataaaacacagaaagatactggagtaaatgaaaaggcaagagagaaattttatgaggctaaactacagcagcaacagagagagctaaaacaattgcaggaagaaagaaagaaactgattgacattcaggagaaaattcaagcattgcaaacggcatgccctgacttacagctgtcagctgctagtgtgggtaactgtcccaccaaaaaatatatgccagctgttacttcaaccccaactgttaatcaacacgagaccagtacaagcaaatctgtttttgagcctgaagattcttcaatagtagataatgagttgtggtcagaaatgagaagacatgaaatgttgagggaggagctgcgacagagaagaaagcagcttgaagctctgatggctgaacatcagaggaggcaaggtctagctgaaactgcatctccagtggctgtgtcattgagaagtgatggatctgagaacctatgtactcctcagcaaagtagaacagaaaaaacgatggcaacttggggagggtctacccagtgtgcactagatgaagaaggagatgaagacggttacctttctgaaggaattgttcggacagatgaagaggaggaagaagagcaagatgccagttccaatgataacttttctgtgtgtccttctaacagtgtgaatcataactcctacaatcgaaaggaaactaaaaatacgtggaagaacaattgccctttttcggcagatgaaaattatcgtcctttagccaagacaaggcaacagaatatcagcatgcaacggcaagaaaaccttcgttgggtgtcagagctctcttacgtagaagagaaagaacaatggcaagaacaaatcaatcagctaaagaaacagcttgattttagtgtcagtatttgtcagactttgatgcaagaccagcagactctatcttgtctgctacaaactcttctcacgggtccttacagtgttatgcccagcaatgttgcatctcctcaagtacacttcataatgcaccagttgaaccagtgctatactcagctaacatggcaacagaataatgttcagaggttgaaacaaatgctaaatgaacttatgcgccagcaaaatcagcatccagaaaaacctggaggcaaggaaagaggcagtagtgcatcgcaccctccttctcccagtttattttgtcctttcagctttccaacacagcctgtaaatctcttcaatatacctggatttactaacttttcatcatttgcaccaggtatgaatttcagccctttatttccttctaattttggagatttttctcagaatatctctacacccagtgaacagcagcaacccttagcccagaattcttcaggaaaaacagaatatatggcttttccaaaaccttttgaaagcagttcctctattggagcagagaaaccaaggaataaaaaactgcctgaagaggaggtggaaagcagtaggacaccatggttatatgaacaagaaggtgaagtagagaaaccatttatcaagactggattttcagtgtctgtagaaaaatctacaagtagtaaccgcaaaaatcaattagatacaaacggaagaagacgccagtttgatgaagaatcactggaaagctttagcagtatgcctgatccagtagatccaacaacagtgactaaaacattcaagacaagaaaagcgtctgcacaggccagcctggcatctaaagataaaactcccaagtcaaaaagtaagaagaggaattctactcagctgaaaagcagagttaaaaacatcaggtatgaaagtgccagtatgtctagcacatgtgaaccttgcaaaagtaggaacagacattcagcccagactgaagagcctgttcaagcaaaagtattcagcagaaagaatcatgagcaactggaaaaaataataaaatgtaataggtctacagaaatatcttcagaaactgggagtgatttttccatgtttgaagctttgcgagatactatttattctgaagtagctacattaatttctcaaaatgaatctcgtccacattttcttattgaactcttccatgagctgcagctactaaacacagactacttgagacagagggctttatatgcattgcaggacatagtatccagacatatttctgagagccatgaaaaaggagaaaatgtaaagtcagtaaactctggtacttggatagcatcaaactcagaacttactcctagtgagagccttgctactactgatgatgaaacttttgagaagaactttgaaagagaaacccataaaataagtgagcaaaatgatgctgataatgctagtgtcctgtctgtatcatcaaattttgagccttttgcaacagatgatctaggtaacaccgtgattcacttagatcaagcattagccagaatgagagaatatgagcgtatgaagactgaggctgaaagtaactcaaatatgagatgcatctgcaggattattgaggatggagatggtgctggtgcagaaactcccgttattgaaaatcgtagttcacaacaacctgtaagtgaagtttctaccatcccatgtcctagaattgatactcagcagctggaccggcaaattaaagcaattatgaaagaagtcattccttttttgaaggagcacatggatgaagtatgctcctcgcagcttctaacttcagtaaggcgcatggttttgacccttacccagcaaaatgatgagagcaaagagtttgtaaagttctttcataaacaacttggaagtatattacaggattcactggcaaaatttgctggcagaaaactgaaagactgtggagaagatcttcttgtagagatatctgaagtgttgttcaatgaattggctttctttaagcttatgcaagatttggataataatagtataactgttaaacagagatgcaaaaggaaaatagaagcaactggagtgatacaatcttgtgccaaagaggctaaaaggattcttgaagatcatggctcacctgctggagagattgatgatgaagacaaagacaaggatgaaactgaaacagttaagcagactcaaacatctgaggtgtatgatggtcccaaaaatgtaagatctgatatttctgatcaagaggaagatgaagaaagtgaaggatgtccagtgtctattaatttgtctaaagctgaaactcaggctttaactaattatggaagtggagaagatgaaaatgaggatgaagaaatggaagaatttgaagaaggccctgtggatgtccagacttccctccaggctaacactgaagctactgaagaaaatgaacatgatgaacaggtcctacaacgtgactttaaaaagacagcagaaagcaaaaatgtcccattggaacgagaagccactagtaaaaatgaccaaaataactgtcctgtgaaaccctgttacctcaatatcttggaagatgagcaacctttaaatagtgctgcccataaggagtcacctcctactgttgattcaactcaacagcctaaccctttgccgttacgtttacctgaaatggaacccttagtgcctagagtcaaagaagttaaatctgctcaggaaactcctgaaagctctctggctggaagtcctgatactgaatctccagtgttagtgaatgactatgaagcagaatctggtaatataagtcaaaagtctgatgaagaagattttgtaaaagttgaagatttaccactgaaactgacaatatattcagaggcagatctaagaaagaaaatggtagaagaagaacagaaaaaccatttatctggtgaaatatgtgaaatgcagaccgaagaattagctggaaattctgagacactaaaagaacctgaaacggtgggagcccagagtatatgagatgtcttcagaggctcatctaactctgtccttacatactcaatgcatatatgaaaacaatactaaataaacatctgatctgtataaaaatgtaaattagtttgacactgcttttttgataggtgtggtcatttctccccatggtagtttaaaacatcagaaactgaattctggacagatttaagccttgacacactgtgttttttttttttttcccccttcttttttgggtcttgatttttttccccattgtgatgtttggtaacgaatttaaaatgtagttttaaataaagtttggacttatctataaagtatcttttttggaaattatattgaattctatacagcaagtcaatgttttatataactttaggctgctcagagaagagcaatggttaagagttagttagagaaatatattatttgttataaagcccatccattaggccagtcttccaactaatgccagtgttgctgctgttgggtctgatgttcttcttttagatacctgcaggtcctattcctgtgcaagaatagggcagattatcaagatatccaggatacctatgaagttattatagaatatttattaatccattgaaattggataataagtttagaacataggttctcagtatctagaacttacatcattatctgtttgttaggatttgaaattctggaaaatatttatctacatcgcctcagactaaaagtaaaaaaaataagctttctataattagggagatttctgcacagagaagtaacattgtggttaattttaaatgaaaaacttaactttttcaagtggggataaataatacaactaaatttctgtaatagtaagattctatatgccttcagataaacttgcctattgagatggtaatttaaagccaaagcatagcagtttcttttgtgtgtagtgaggttgaagcagatttgcagggtgaagtattgaaagtttatgtgactttaagtcagcttttgaaaagtgatttgctttttatcccaaactgtccatatacccagtaaggcttcaaaaaaccagtcaacaatgagtaagtcaatcttatagattcttcttcctcgaataaaatacaaagaattagttccaataagtattttaactttgttaacaactgaaataccccataaaaaaagaactcgttgagagtatttctttaaaatggttacttgctgcccaggcaccatggctcactcctgtaatcccagcaccttgggaggccgaggcgggcagatcacgaggtcaagagattgagaccatcctgcccaacatgggggaaaccccgtctctactaaaaataaaaaaattagctgggagaggtggcacgtgcctgtagtcctagctacttgggaggctaaggcaggagaatagcctgaacccgggaggtggaggttgcaggttgcagtgagccgagatcatgccactgcactccagcctggcaacagagcgagactctgtctcaaaaaa

SEQ ID NO: 450858 - DNA, 6692 bp, Homo sapiens
tgccgcttccgcggtcacatgactccagtctagctcgcattgcgctcccgccggcgagttctccccgcgcgccgttgcgaggagacggcgcatgtccgccgcgcttgcccctctgcagtaccccgcccctcttctcccaccacaatgagatgctaagatggcggtggctgcggcggttggcgctgcgtagctgaggtcgaaaaggcggccactggggccgaggcagccaggaaacgtgtgggcctctctgctgcggtctccgagggccgaccgctgccggcggcgggtcgtgggggctgactgtcgctctgcctttgacaggagaggctgcttcttgtagaggaaacagctttgaagtgtggagcgggaaaggagcagtttctgagctgcaaaaactagtttctaaacagagagttaattgttaaatccagtatggccacaggaggaggtccctttgaagatggcatgaatgatcaggatttaccaaactggagtaatgagaatgttgatgacaggctcaacaatatggattggggtgcccaacagaagaaagcaaatagatcatcagaaaagaataagaaaaagtttggtgtagaaagtgataaaagagtaaccaatgatatttctccggagtcgtcaccaggagttggaaggcgaagaacaaagactccacatacgttcccacacagtagatacatgagtcagatgtctgtcccagagcaggcagaattagagaaactgaaacagcggataaacttcagtgatttagatcagagaagcattggaagtgattcccaaggtagagcaacagctgctaacaacaaacgtcagcttagtgaaaaccgaaagcccttcaactttttgcctatgcagattaatactaacaagagcaaagatgcatctacaagtcccccaaacagagaaacgattggatcagcacagtgtaaagagttgtttgcttctgctttaagtaatgacctcttgcaaaactgtcaggtgtctgaagaagatgggaggggagaacctgcaatggagagcagccagattgtaagcaggcttgttcaaattcgcgattatattactaaagctagttccatgcgggaagatcttgtagagaaaaatgagagatctgctaatgttgagcgccttactcatctaatagatcaccttaaagaacaagagaagtcatatatgaaatttcttaaaaaaatccttgctagagaaaatgaggaggaggatgttcggactatagattcagctgtgggatctggttctgtagctgagagcacatcgctaaacatagatgtgcagtctgaggcttcagataccacggccagagatcctcagcaggagcctatggaagagatagaaaatttgaagaaacaacatgatttattaaaaagaatgttacaacagcaggagcaactaagagctctacagggacggcaggctgcacttctagctctgcaacataaagcagagcaagctattgcagtgatggatgattctgttgttgcagaaactgcaggtagcttatctggcgtcagtatcacatctgaactaaatgaagaattgaatgacttaattcagcgttttcataatcagcttcgtgattctcagcctccagctgttccagacaatagaagacaggcagaaagtctttcattaactagggaggtttcccagagcaggaaaccatcagcttcagaacgtttacctgatgagaaagtcgaactttttagcaaaatgagagtgctacaggaaaagaaacaaaaaatggacaaattgcttggagaacttcatacacttcgagatcagcatcttaacaattcatcatcctctccacaaaggagtgtcgatcagagaagtacttcagctccctctgcttctgtaggcttggcaccggttgtcaatggagaatccaatagcctcacatcatctgttccttatcctactgcttctctagtatctcagaatgagagtgaaaacgaaggccacctcaatccatctgaaaaactccagaagttaaatgaagttcgaaagagattgaatgagctaagagaattagttcattattatgaacaaacgtcagacatgatgacagatgctgtgaatgaaaacaggaaagatgaagaaactgaagagtcagaatatgattctgagcatgaaaattccgagcctgttactaacattcgaaatccacaagtagcttccacttggaatgaagtaaatagtcatagtaatgcacagtgtgtttctaataatagagatgggcgaacagttaattctaattgtgaaattaacaacagatctgctgccaacataagggctctaaacgtgcctccttctttagattgtcgatataatagagaaggggaacaggagattcatgttgcacaaggtgaagatgatgaggaggaggaggaagaagcagaagaggagggagtcagtggagcttcattatctagtcacaggagcagtctggttgatgagcatccagaagatgctgaatttgaacagaagatcaaccgacttatggctgcaaaacagaaacttagacagttacaagatcttgttgctatggtacaggatgatgatgcagctcaaggagttatctctgccagtgcatcaaatttggatgatttctacccagcagaagaagacaccaagcaaaattcaaataacactagaggaaatgccaataaaacacagaaagatactggagtaaatgaaaaggcaagagagaaattttatgaggctaaactacagcagcaacagagagagctaaaacaattgcaggaagaaagaaagaaactgattgacattcaggagaaaattcaagcattgcaaacggcatgccctgacttacagctgtcagctgctagtgtgggtaactgtcccaccaaaaaatatatgccagctgttacttcaaccccaactgttaatcaacacgagaccagtacaagcaaatctgtttttgagcctgaagattcttcaatagtagataatgagttgtggtcagaaatgagaagacatgaaatgttgagggaggagctgcgacagagaagaaagcagcttgaagctctgatggctgaacatcagaggaggcaaggtctagctgaaactgcatctccagtggctgtgtcattgagaagtgatggatctgagaacctatgtactcctcagcaaagtagaacagaaaaaacgatggcaacttggggagggtctacccagtgtgcactagatgaagaaggagatgaagacggttacctttctgaaggaattgttcggacagatgaagaggaggaagaagagcaagatgccagttccaatgataacttttctgtgtgtccttctaacagtgtgaatcataactcctacaatcgaaaggaaactaaaaatacgtggaagaacaattgccctttttcggcagatgaaaattatcgtcctttagccaagacaaggcaacagaatatcagcatgcaacggcaagaaaaccttcgttgggtgtcagagctctcttacgtagaagagaaagaacaatggcaagaacaaatcaatcagctaaagaaacagcttgattttagtgtcagtatttgtcagactttgatgcaagaccagcagactctatcttgtctgctacaaactcttctcacgggtccttacagtgttatgcccagcaatgttgcatctcctcaagtacacttcataatgcaccagttgaaccagtgctatactcagctaacatggcaacagaataatgttcagaggttgaaacaaatgctaaatgaacttatgcgccagcaaaatcagcatccagaaaaacctggaggcaaggaaagaggcagtagtgcatcgcaccctccttctcccagtttattttgtcctttcagctttccaacacagcctgtaaatctcttcaatatacctggatttactaacttttcatcatttgcaccaggtatgaatttcagccctttatttccttctaattttggagatttttctcagaatatctctacacccagtgaacagcagcaacccttagcccagaattcttcaggaaaaacagaatatatggcttttccaaaaccttttgaaagcagttcctctattggagcagagaaaccaaggaataaaaaactgcctgaagaggaggtggaaagcagtaggacaccatggttatatgaacaagaaggtgaagtagagaaaccatttatcaagactggattttcagtgtctgtagaaaaatctacaagtagtaaccgcaaaaatcaattagatacaaacggaagaagacgccagtttgatgaagaatcactggaaagctttagcagtatgcctgatccagtagatccaacaacagtgactaaaacattcaagacaagaaaagcgtctgcacaggccagcctggcatctaaagataaaactcccaagtcaaaaagtaagaagaggaattctactcagctgaaaagcagagttaaaaacatcaggtatgaaagtgccagtatgtctagcacatgtgaaccttgcaaaagtaggaacagacattcagcccagactgaagagcctgttcaagcaaaagtattcagcagaaagaatcatgagcaactggaaaaaataataaaatgtaataggtctacagaaatatcttcagaaactgggagtgatttttccatgtttgaagctttgcgagatactatttattctgaagtagctacattaatttctcaaaatgaatctcgtccacattttcttattgaactcttccatgagctgcagctactaaacacagactacttgagacagagggctttatatgcattgcaggacatagtatccagacatatttctgagagccatgaaaaaggagaaaatgtaaagtcagtaaactctggtacttggatagcatcaaactcagaacttactcctagtgagagccttgctactactgatgatgaaacttttgagaagaactttgaaagagaaacccataaaataagtgagcaaaatgatgctgataatgctagtgtcctgtctgtatcatcaaattttgagccttttgcaacagatgatctaggtaacaccgtgattcacttagatcaagcattagccagaatgagagaatatgagcgtatgaagactgaggctgaaagtaactcaaatatgagatgcatctgcaggattattgaggatggagatggtgctggtgcagaaactcccgttattgaaaatcgtagttcacaacaacctgtaagtgaagtttctaccatcccatgtcctagaattgatactcagcagctggaccggcaaattaaagcaattatgaaagaagtcattccttttttgaaggagcacatggatgaagtatgctcctcgcagcttctaacttcagtaaggcgcatggttttgacccttacccagcaaaatgatgagagcaaagagtttgtaaagttctttcataaacaacttggaagtatattacaggattcactggcaaaatttgctggcagaaaactgaaagactgtggagaagatcttcttgtagagatatctgaagtgttgttcaatgaattggctttctttaagcttatgcaagatttggataataatagtataactgttaaacagagatgcaaaaggaaaatagaagcaactggagtgatacaatcttgtgccaaagaggctaaaaggattcttgaagatcatggctcacctgctggagagattgatgatgaagacaaagacaaggatgaaactgaaacagttaagcagactcaaacatctgaggtgtatgatggtcccaaaaatgtaagatctgatatttctgatcaagaggaagatgaagaaagtgaaggatgtccagtgtctattaatttgtctaaagctgaaactcaggctttaactaattatggaagtggagaagatgaaaatgaggatgaagaaatggaagaatttgaagaaggccctgtggatgtccagacttccctccaggctaacactgaagctactgaagaaaatgaacatgatgaacaggtcctacaacgtgactttaaaaagacagcagaaagcaaaaatgtcccattggaacgagaagccactagtaaaaatgaccaaaataactgtcctgtgaaaccctgttacctcaatatcttggaagatgagcaacctttaaatagtgctgcccataaggagtcacctcctactgttgattcaactcaacagcctaaccctttgccgttacgtttacctgaaatggaacccttagtgcctagagtcaaagaagttaaatctgctcaggaaactcctgaaagctctctggctggaagtcctgatactgaatctccagtgttagtgaatgactatgaagcagaatctggtaatataagtcaaaagtctgatgaagaagattttgtaaaagttgaagatttaccactgaaactgacaatatattcagaggcagatctaagaaagaaaatggtagaagaagaacagaaaaaccatttatctggtgaaatatgtgaaatgcagaccgaagaattagctggaaattctgagacactaaaagaacctgaaacggtgggagcccagagtatatgagatgtcttcagaggctcatctaactctgtccttacatactcaatgcatatatgaaaacaatactaaataaacatctgatctgtataaaaatg

SEQ ID NO: 450859 - DNA, 6507 bp, Homo sapiens
tgccgcttccgcggtcacatgactccagtctagctcgcattgcgctcccgccggcgagttctccccgcgcgccgttgcgaggagacggcgcatgtccgccgcgcttgcccctctgcagtaccccgcccctcttctcccaccacaatgagatgctaagatggcggtggctgcggcggttggcgctgcgtagctgaggtcgaaaaggcggccactggggccgaggcagccaggaaacgtgtgggcctctctgctgcggtctccgagggccgaccgctgccggcggcgggtcgtgggggctgactgtcgctctgcctttgacaggagaggctgcttcttgtagagagagttaattgttaaatccagtatggccacaggaggaggtccctttgaagatggcatgaatgatcaggatttaccaaactggagtaatgagaatgttgatgacaggctcaacaatatggattggggtgcccaacagaagaaagcaaatagatcatcagaaaagaataagaaaaagtttggtgtagaaagtgataaaagagtaaccaatgatatttctccggagtcgtcaccaggagttggaaggcgaagaacaaagactccacatacgttcccacacagtagatacatgagtcagatgtctgtcccagagcaggcagaattagagaaactgaaacagcggataaacttcagtgatttagatcagagaagcattggaagtgattcccaaggtagagcaacagctgctaacaacaaacgtcagcttagtgaaaaccgaaagcccttcaactttttgcctatgcagattaatactaacaagagcaaagatgcatctacaagtcccccaaacagagaaacgattggatcagcacagtgtaaagagttgtttgcttctgctttaagtaatgacctcttgcaaaactgtcaggtgtctgaagaagatgggaggggagaacctgcaatggagagcagccagattgtaagcaggcttgttcaaattcgcgattatattactaaagctagttccatgcgggaagatcttgtagagaaaaatgagagatctgctaatgttgagcgccttactcatctaatagatcaccttaaagaacaagagaagtcatatatgaaatttcttaaaaaaatccttgccagagatcctcagcaggagcctatggaagagatagaaaatttgaagaaacaacatgatttattaaaaagaatgttacaacagcaggagcaactaagagctctacagggacggcaggctgcacttctagctctgcaacataaagcagagcaagctattgcagtgatggatgattctgttgttgcagaaactgcaggtagcttatctggcgtcagtatcacatctgaactaaatgaagaattgaatgacttaattcagcgttttcataatcagcttcgtgattctcagcctccagctgttccagacaatagaagacaggcagaaagtctttcattaactagggaggtttcccagagcaggaaaccatcagcttcagaacgtttacctgatgagaaagtcgaactttttagcaaaatgagagtgctacaggaaaagaaacaaaaaatggacaaattgcttggagaacttcatacacttcgagatcagcatcttaacaattcatcatcctctccacaaaggagtgtcgatcagagaagtacttcagctccctctgcttctgtaggcttggcaccggttgtcaatggagaatccaatagcctcacatcatctgttccttatcctactgcttctctagtatctcagaatgagagtgaaaacgaaggccacctcaatccatctgaaaaactccagaagttaaatgaagttcgaaagagattgaatgagctaagagaattagttcattattatgaacaaacgtcagacatgatgacagatgctgtgaatgaaaacaggaaagatgaagaaactgaagagtcagaatatgattctgagcatgaaaattccgagcctgttactaacattcgaaatccacaagtagcttccacttggaatgaagtaaatagtcatagtaatgcacagtgtgtttctaataatagagatgggcgaacagttaattctaattgtgaaattaacaacagatctgctgccaacataagggctctaaacgtgcctccttctttagattgtcgatataatagagaaggggaacaggagattcatgttgcacaaggtgaagatgatgaggaggaggaggaagaagcagaagaggagggagtcagtggagcttcattatctagtcacaggagcagtctggttgatgagcatccagaagatgctgaatttgaacagaagatcaaccgacttatggctgcaaaacagaaacttagacagttacaagatcttgttgctatggtacaggatgatgatgcagctcaaggagttatctctgccagtgcatcaaatttggatgatttctacccagcagaagaagacaccaagcaaaattcaaataacactagaggaaatgccaataaaacacagaaagatactggagtaaatgaaaaggcaagagagaaattttatgaggctaaactacagcagcaacagagagagctaaaacaattgcaggaagaaagaaagaaactgattgacattcaggagaaaattcaagcattgcaaacggcatgccctgacttacagctgtcagctgctagtgtgggtaactgtcccaccaaaaaatatatgccagctgttacttcaaccccaactgttaatcaacacgagaccagtacaagcaaatctgtttttgagcctgaagattcttcaatagtagataatgagttgtggtcagaaatgagaagacatgaaatgttgagggaggagctgcgacagagaagaaagcagcttgaagctctgatggctgaacatcagaggaggcaaggtctagctgaaactgcatctccagtggctgtgtcattgagaagtgatggatctgagaacctatgtactcctcagcaaagtagaacagaaaaaacgatggcaacttggggagggtctacccagtgtgcactagatgaagaaggagatgaagacggttacctttctgaaggaattgttcggacagatgaagaggaggaagaagagcaagatgccagttccaatgataacttttctgtgtgtccttctaacagtgtgaatcataactcctacaatcgaaaggaaactaaaaatacgtggaagaacaattgccctttttcggcagatgaaaattatcgtcctttagccaagacaaggcaacagaatatcagcatgcaacggcaagaaaaccttcgttgggtgtcagagctctcttacgtagaagagaaagaacaatggcaagaacaaatcaatcagctaaagaaacagcttgattttagtgtcagtatttgtcagactttgatgcaagaccagcagactctatcttgtctgctacaaactcttctcacgggtccttacagtgttatgcccagcaatgttgcatctcctcaagtacacttcataatgcaccagttgaaccagtgctatactcagctaacatggcaacagaataatgttcagaggttgaaacaaatgctaaatgaacttatgcgccagcaaaatcagcatccagaaaaacctggaggcaaggaaagaggcagtagtgcatcgcaccctccttctcccagtttattttgtcctttcagctttccaacacagcctgtaaatctcttcaatatacctggatttactaacttttcatcatttgcaccaggtatgaatttcagccctttatttccttctaattttggagatttttctcagaatatctctacacccagtgaacagcagcaacccttagcccagaattcttcaggaaaaacagaatatatggcttttccaaaaccttttgaaagcagttcctctattggagcagagaaaccaaggaataaaaaactgcctgaagaggaggtggaaagcagtaggacaccatggttatatgaacaagaaggtgaagtagagaaaccatttatcaagactggattttcagtgtctgtagaaaaatctacaagtagtaaccgcaaaaatcaattagatacaaacggaagaagacgccagtttgatgaagaatcactggaaagctttagcagtatgcctgatccagtagatccaacaacagtgactaaaacattcaagacaagaaaagcgtctgcacaggccagcctggcatctaaagataaaactcccaagtcaaaaagtaagaagaggaattctactcagctgaaaagcagagttaaaaacatcaggtatgaaagtgccagtatgtctagcacatgtgaaccttgcaaaagtaggaacagacattcagcccagactgaagagcctgttcaagcaaaagtattcagcagaaagaatcatgagcaactggaaaaaataataaaatgtaataggtctacagaaatatcttcagaaactgggagtgatttttccatgtttgaagctttgcgagatactatttattctgaagtagctacattaatttctcaaaatgaatctcgtccacattttcttattgaactcttccatgagctgcagctactaaacacagactacttgagacagagggctttatatgcattgcaggacatagtatccagacatatttctgagagccatgaaaaaggagaaaatgtaaagtcagtaaactctggtacttggatagcatcaaactcagaacttactcctagtgagagccttgctactactgatgatgaaacttttgagaagaactttgaaagagaaacccataaaataagtgagcaaaatgatgctgataatgctagtgtcctgtctgtatcatcaaattttgagccttttgcaacagatgatctaggtaacaccgtgattcacttagatcaagcattagccagaatgagagaatatgagcgtatgaagactgaggctgaaagtaactcaaatatgagatgcatctgcaggattattgaggatggagatggtgctggtgcagaaactcccgttattgaaaatcgtagttcacaacaacctgtaagtgaagtttctaccatcccatgtcctagaattgatactcagcagctggaccggcaaattaaagcaattatgaaagaagtcattccttttttgaaggagcacatggatgaagtatgctcctcgcagcttctaacttcagtaaggcgcatggttttgacccttacccagcaaaatgatgagagcaaagagtttgtaaagttctttcataaacaacttggaagtatattacaggattcactggcaaaatttgctggcagaaaactgaaagactgtggagaagatcttcttgtagagatatctgaagtgttgttcaatgaattggctttctttaagcttatgcaagatttggataataatagtataactgttaaacagagatgcaaaaggaaaatagaagcaactggagtgatacaatcttgtgccaaagaggctaaaaggattcttgaagatcatggctcacctgctggagagattgatgatgaagacaaagacaaggatgaaactgaaacagttaagcagactcaaacatctgaggtgtatgatggtcccaaaaatgtaagatctgatatttctgatcaagaggaagatgaagaaagtgaaggatgtccagtgtctattaatttgtctaaagctgaaactcaggctttaactaattatggaagtggagaagatgaaaatgaggatgaagaaatggaagaatttgaagaaggccctgtggatgtccagacttccctccaggctaacactgaagctactgaagaaaatgaacatgatgaacaggtcctacaacgtgactttaaaaagacagcagaaagcaaaaatgtcccattggaacgagaagccactagtaaaaatgaccaaaataactgtcctgtgaaaccctgttacctcaatatcttggaagatgagcaacctttaaatagtgctgcccataaggagtcacctcctactgttgattcaactcaacagcctaaccctttgccgttacgtttacctgaaatggaacccttagtgcctagagtcaaagaagttaaatctgctcaggaaactcctgaaagctctctggctggaagtcctgatactgaatctccagtgttagtgaatgactatgaagcagaatctggtaatataagtcaaaagtctgatgaagaagattttgtaaaagttgaagatttaccactgaaactgacaatatattcagaggcagatctaagaaagaaaatggtagaagaagaacagaaaaaccatttatctggtgaaatatgtgaaatgcagaccgaagaattagctggaaattctgagacactaaaagaacctgaaacggtgggagcccagagtatatgagatgtcttcagaggctcatctaactctgtccttacatactcaatgcatatatgaaaacaatactaaataaacatctgatctgtataaaaatg

SEQ ID NO: 450860 - DNA, 2820 bp, Homo sapiens
acatgtttaattaaaactgtcttttaatttcattttaaagctaaagacatttatttatttttctcttacccattgcttttactgattaggtatgaatttcagccctttatttccttctaattttggagatttttctcagaatatctctacacccagtgaacagcagcaacccttagcccagaattcttcaggaaaaacagaatatatggcttttccaaaaccttttgaaagcagttcctctattggagcagagaaaccaaggaataaaaaactgcctgaagaggaggtggaaagcagtaggacaccatggttatatgaacaagaaggtgaagtagagaaaccatttatcaagactggattttcagtgtctgtagaaaaatctacaagtagtaaccgcaaaaatcaattagatacaaacggaagaagacgccagtttgatgaagaatcactggaaagctttagcagtatgcctgatccagtagatccaacaacagtgactaaaacattcaagacaagaaaagcgtctgcacaggccagcctggcatctaaagataaaactcccaagtcaaaaagtaagaagaggaattctactcagctgaaaagcagagttaaaaacatcaggtatgaaagtgccagtatgtctagcacatgtgaaccttgcaaaagtaggaacagacattcagcccagactgaagagcctgttcaagcaaaagtattcagcagaaagaatcatgagcaactggaaaaaataataaaatgtaataggtctacagaaatatcttcagaaactgggagtgatttttccatgtttgaagctttgcgagatactatttattctgaagtagctacattaatttctcaaaatgaatctcgtccacattttcttattgaactcttccatgagctgcagctactaaacacagactacttgagacagagggctttatatgcattgcaggacatagtatccagacatatttctgagagccatgaaaaaggagaaaatgtaaagtcagtaaactctggtacttggatagcatcaaactcagaacttactcctagtgagagccttgctactactgatgatgaaacttttgagaagaactttgaaagagaaacccataaaataagtgagcaaaatgatgctgataatgctagtgtcctgtctgtatcatcaaattttgagccttttgcaacagatgatctaggtaacaccgtgattcacttagatcaagcattagccagaatgagagaatatgagcgtatgaagactgaggctgaaagtaactcaaatatgagatgcatctgcaggattattgaggatggagatggtgctggtgcagaaactcccgttattgaaaatcgtagttcacaacaacctgtaagtgaagtttctaccatcccatgtcctagaattgatactcagcagctggaccggcaaattaaagcaattatgaaagaagtcattccttttttgaaggagcacatggatgaagtatgctcctcgcagcttctaacttcagtaaggcgcatggttttgacccttacccagcaaaatgatgagagcaaagagtttgtaaagttctttcataaacaacttggaagtatattacaggattcactggcaaaatttgctggcagaaaactgaaagactgtggagaagatcttcttgtagagatatctgaagtgttgttcaatgaattggctttctttaagcttatgcaagatttggataataatagtataactgttaaacagagatgcaaaaggaaaatagaagcaactggagtgatacaatcttgtgccaaagaggctaaaaggattcttgaagatcatggctcacctgctggagagattgatgatgaagacaaagacaaggatgaaactgaaacagttaagcagactcaaacatctgaggtgtatgatggtcccaaaaatgtaagatctgatatttctgatcaagaggaagatgaagaaagtgaaggatgtccagtgtctattaatttgtctaaagctgaaactcaggctttaactaattatggaagtggagaagatgaaaatgaggatgaagaaatggaagaatttgaagaaggccctgtggatgtccagacttccctccaggctaacactgaagctactgaagaaaatgaacatgatgaacaggtcctacaacgtgactttaaaaagacagcagaaagcaaaaatgtcccattggaacgagaagccactagtaaaaatgaccaaaataactgtcctgtgaaaccctgttacctcaatatcttggaagatgagcaacctttaaatagtgctgcccataaggagtcacctcctactgttgattcaactcaacagcctaaccctttgccgttacgtttacctgaaatggaacccttagtgcctagagtcaaagaagttaaatctgctcaggaaactcctgaaagctctctggctggaagtcctgatactgaatctccagtgttagtgaatgactatgaagcagaatctggtaatataagtcaaaagtctgatgaagaagattttgtaaaagttgaagatttaccactgaaactgacaatatattcagaggcagatctaagaaagaaaatggtagaagaagaacagaaaaaccatttatctggtgaaatatgtgaaatgcagaccgaagaattagctggaaattctgagacactaaaagaacctgaaacggtgggagcccagagtatatgagatgtcttcagaggctcatctaactctgtccttacatactcaatgcatatatgaaaacaatactaaataaacatctgatctgtataaaaatg

SEQ ID NO: 450861 - DNA, 7975 bp, Homo sapiens
tgccgcttccgcggtcacatgactccagtctagctcgcattgcgctcccgccggcgagttctccccgcgcgccgttgcgaggagacggcgcatgtccgccgcgcttgcccctctgcagtaccccgcccctcttctcccaccacaatgagatgctaagatggcggtggctgcggcggttggcgctgcgtagctgaggtcgaaaaggcggccactggggccgaggcagccaggaaacgtgtgggcctctctgctgcggtctccgagggccgaccgctgccggcggcgggtcgtgggggctgactgtcgctctgcctttgacaggagaggctgcttcttgtagaggaaacagctttgaagtgtggagcgggaaaggagcagtttctgagctgcaaaaactagtttctaaacagagagttaattgttaaatccagtatggccacaggaggaggtccctttgaagatggcatgaatgatcaggatttaccaaactggagtaatgagaatgttgatgacaggctcaacaatatggattggggtgcccaacagaagaaagcaaatagatcatcagaaaagaataagaaaaagtttggtgtagaaagtgataaaagagtaaccaatgatatttctccggagtcgtcaccaggagttggaaggcgaagaacaaagactccacatacgttcccacacagtagatacatgagtcagatgtctgtcccagagcaggcagaattagagaaactgaaacagcggataaacttcagtgatttagatcagagaagcattggaagtgattcccaaggtagagcaacagctgctaacaacaaacgtcagcttagtgaaaaccgaaagcccttcaactttttgcctatgcagattaatactaacaagagcaaagatgcatctacaagtcccccaaacagagaaacgattggatcagcacagtgtaaagagttgtttgcttctgctttaagtaatgacctcttgcaaaactgtcaggtgtctgaagaagatgggaggggagaacctgcaatggagagcagccagattgtaagcaggcttgttcaaattcgcgattatattactaaagctagttccatgcgggaagatcttgtagagaaaaatgagagatctgctaatgttgagcgccttactcatctaatagatcaccttaaagaacaagagaagtcatatatgaaatttcttaaaaaaatccttgccagagatcctcagcaggagcctatggaagagatagaaaatttgaagaaacaacatgatttattaaaaagaatgttacaacagcaggagcaactaagagctctacagggacggcaggctgcacttctagctctgcaacataaagcagagcaagctattgcagtgatggatgattctgttgttgcagaaactgcaggtagcttatctggcgtcagtatcacatctgaactaaatgaagaattgaatgacttaattcagcgttttcataatcagcttcgtgattctcagcctccagctgttccagacaatagaagacaggcagaaagtctttcattaactagggaggtttcccagagcaggaaaccatcagcttcagaacgtttacctgatgagaaagtcgaactttttagcaaaatgagagtgctacaggaaaagaaacaaaaaatggacaaattgcttggagaacttcatacacttcgagatcagcatcttaacaattcatcatcctctccacaaaggagtgtcgatcagagaagtacttcagctccctctgcttctgtaggcttggcaccggttgtcaatggagaatccaatagcctcacatcatctgttccttatcctactgcttctctagtatctcagaatgagagtgaaaacgaaggccacctcaatccatctgaaaaactccagaagttaaatgaagttcgaaagagattgaatgagctaagagaattagttcattattatgaacaaacgtcagacatgatgacagatgctgtgaatgaaaacaggaaagatgaagaaactgaagagtcagaatatgattctgagcatgaaaattccgagcctgttactaacattcgaaatccacaagtagcttccacttggaatgaagtaaatagtcatagtaatgcacagtgtgtttctaataatagagatgggcgaacagttaattctaattgtgaaattaacaacagatctgctgccaacataagggctctaaacgtgcctccttctttagattgtcgatataatagagaaggggaacaggagattcatgttgcacaaggtgaagatgatgaggaggaggaggaagaagcagaagaggagggagtcagtggagcttcattatctagtcacaggagcagtctggttgatgagcatccagaagatgctgaatttgaacagaagatcaaccgacttatggctgcaaaacagaaacttagacagttacaagatcttgttgctatggtacaggatgatgatgcagctcaaggagttatctctgccagtgcatcaaatttggatgatttctacccagcagaagaagacaccaagcaaaattcaaataacactagaggaaatgccaataaaacacagaaagatactggagtaaatgaaaaggcaagagagaaattttatgaggctaaactacagcagcaacagagagagctaaaacaattgcaggaagaaagaaagaaactgattgacattcaggagaaaattcaagcattgcaaacggcatgccctgacttacagctgtcagctgctagtgtgggtaactgtcccaccaaaaaatatatgccagctgttacttcaaccccaactgttaatcaacacgagaccagtacaagcaaatctgtttttgagcctgaagattcttcaatagtagataatgagttgtggtcagaaatgagaagacatgaaatgttgagggaggagctgcgacagagaagaaagcagcttgaagctctgatggctgaacatcagaggaggcaaggtctagctgaaactgcatctccagtggctgtgtcattgagaagtgatggatctgagaacctatgtactcctcagcaaagtagaacagaaaaaacgatggcaacttggggagggtctacccagtgtgcactagatgaagaaggagatgaagacggttacctttctgaaggaattgttcggacagatgaagaggaggaagaagagcaagatgccagttccaatgataacttttctgtgtgtccttctaacagtgtgaatcataactcctacaatcgaaaggaaactaaaaatacgtggaagaacaattgccctttttcggcagatgaaaattatcgtcctttagccaagacaaggcaacagaatatcagcatgcaacggcaagaaaaccttcgttgggtgtcagagctctcttacgtagaagagaaagaacaatggcaagaacaaatcaatcagctaaagaaacagcttgattttagtgtcagtatttgtcagactttgatgcaagaccagcagactctatcttgtctgctacaaactcttctcacgggtccttacagtgttatgcccagcaatgttgcatctcctcaagtacacttcataatgcaccagttgaaccagtgctatactcagctaacatggcaacagaataatgttcagaggttgaaacaaatgctaaatgaacttatgcgccagcaaaatcagcatccagaaaaacctggaggcaaggaaagaggcagtagtgcatcgcaccctccttctcccagtttattttgtcctttcagctttccaacacagcctgtaaatctcttcaatatacctggatttactaacttttcatcatttgcaccaggtatgaatttcagccctttatttccttctaattttggagatttttctcagaatatctctacacccagtgaacagcagcaacccttagcccagaattcttcaggaaaaacagaatatatggcttttccaaaaccttttgaaagcagttcctctattggagcagagaaaccaaggaataaaaaactgcctgaagaggaggtggaaagcagtaggacaccatggttatatgaacaagaaggtgaagtagagaaaccatttatcaagactggattttcagtgtctgtagaaaaatctacaagtagtaaccgcaaaaatcaattagatacaaacggaagaagacgccagtttgatgaagaatcactggaaagctttagcagtatgcctgatccagtagatccaacaacagtgactaaaacattcaagacaagaaaagcgtctgcacaggccagcctggcatctaaagataaaactcccaagtcaaaaagtaagaagaggaattctactcagctgaaaagcagagttaaaaacatcaggtatgaaagtgccagtatgtctagcacatgtgaaccttgcaaaagtaggaacagacattcagcccagactgaagagcctgttcaagcaaaagtattcagcagaaagaatcatgagcaactggaaaaaataataaaatgtaataggtctacagaaatatcttcagaaactgggagtgatttttccatgtttgaagctttgcgagatactatttattctgaagtagctacattaatttctcaaaatgaatctcgtccacattttcttattgaactcttccatgagctgcagctactaaacacagactacttgagacagagggctttatatgcattgcaggacatagtatccagacatatttctgagagccatgaaaaaggagaaaatgtaaagtcagtaaactctggtacttggatagcatcaaactcagaacttactcctagtgagagccttgctactactgatgatgaaacttttgagaagaactttgaaagagaaacccataaaataagtgagcaaaatgatgctgataatgctagtgtcctgtctgtatcatcaaattttgagccttttgcaacagatgatctaggtaacaccgtgattcacttagatcaagcattagccagaatgagagaatatgagcgtatgaagactgaggctgaaagtaactcaaatatgagatgcatctgcaggattattgaggatggagatggtgctggtgcagaaactcccgttattgaaaatcgtagttcacaacaacctgtaagtgaagtttctaccatcccatgtcctagaattgatactcagcagctggaccggcaaattaaagcaattatgaaagaagtcattccttttttgaaggagcacatggatgaagtatgctcctcgcagcttctaacttcagtaaggcgcatggttttgacccttacccagcaaaatgatgagagcaaagagtttgtaaagttctttcataaacaacttggaagtatattacaggattcactggcaaaatttgctggcagaaaactgaaagactgtggagaagatcttcttgtagagatatctgaagtgttgttcaatgaattggctttctttaagcttatgcaagatttggataataatagtataactgttaaacagagatgcaaaaggaaaatagaagcaactggagtgatacaatcttgtgccaaagaggctaaaaggattcttgaagatcatggctcacctgctggagagattgatgatgaagacaaagacaaggatgaaactgaaacagttaagcagactcaaacatctgaggtgtatgatggtcccaaaaatgtaagatctgatatttctgatcaagaggaagatgaagaaagtgaaggatgtccagtgtctattaatttgtctaaagctgaaactcaggctttaactaattatggaagtggagaagatgaaaatgaggatgaagaaatggaagaatttgaagaaggccctgtggatgtccagacttccctccaggctaacactgaagctactgaagaaaatgaacatgatgaacaggtcctacaacgtgactttaaaaagacagcagaaagcaaaaatgtcccattggaacgagaagccactagtaaaaatgaccaaaataactgtcctgtgaaaccctgttacctcaatatcttggaagatgagcaacctttaaatagtgctgcccataaggagtcacctcctactgttgattcaactcaacagcctaaccctttgccgttacgtttacctgaaatggaacccttagtgcctagagtcaaagaagttaaatctgctcaggaaactcctgaaagctctctggctggaagtcctgatactgaatctccagtgttagtgaatgactatgaagcagaatctggtaatataagtcaaaagtctgatgaagaagattttgtaaaagttgaagatttaccactgaaactgacaatatattcagaggcagatctaagaaagaaaatggtagaagaagaacagaaaaaccatttatctggtgaaatatgtgaaatgcagaccgaagaattagctgaattttctaaaatttttttttcttccctttttaccttcatatattcctgggttgtcttcagaggctcatctaactctgtccttacatactcaatgcatatatgaaaacaatactaaataaacatctgatctgtataaaaatgtaaattagtttgacactgcttttttgataggtgtggtcatttctccccatggtagtttaaaacatcagaaactgaattctggacagatttaagccttgacacactgtgttttttttttttttcccccttcttttttgggtcttgatttttttccccattgtgatgtttggtaacgaatttaaaatgtagttttaaataaagtttggacttatctataaagtatcttttttggaaattatattgaattctatacagcaagtcaatgttttatataactttaggctgctcagagaagagcaatggttaagagttagttagagaaatatattatttgttataaagcccatccattaggccagtcttccaactaatgccagtgttgctgctgttgggtctgatgttcttcttttagatacctgcaggtcctattcctgtgcaagaatagggcagattatcaagatatccaggatacctatgaagttattatagaatatttattaatccattgaaattggataataagtttagaacataggttctcagtatctagaacttacatcattatctgtttgttaggatttgaaattctggaaaatatttatctacatcgcctcagactaaaagtaaaaaaaataagctttctataattagggagatttctgcacagagaagtaacattgtggttaattttaaatgaaaaacttaactttttcaagtggggataaataatacaactaaatttctgtaatagtaagattctatatgccttcagataaacttgcctattgagatggtaatttaaagccaaagcatagcagtttcttttgtgtgtagtgaggttgaagcagatttgcagggtgaagtattgaaagtttatgtgactttaagtcagcttttgaaaagtgatttgctttttatcccaaactgtccatatacccagtaaggcttcaaaaaaccagtcaacaatgagtaagtcaatcttatagattcttcttcctcgaataaaatacaaagaattagttccaataagtattttaactttgttaacaactgaaataccccataaaaaaagaactcgttgagagtatttctttaaaatggttacttgctgcccaggcaccatggctcactcctgtaatcccagcaccttgggaggccgaggcgggcagatcacgaggtcaagagattgagaccatcctgcccaacatgggggaaaccccgtctctactaaaaataaaaaaattagctgggagaggtggcacgtgcctgtagtcctagctacttgggaggctaaggcaggagaatagcctgaacccgggaggtggaggttgcaggttgcagtgagccgagatcatgccactgcactccagcctggcaacagagcgagactctgtctcaaaaaa

SEQ ID NO: 450862 - DNA, 6526 bp, Homo sapiens
tgccgcttccgcggtcacatgactccagtctagctcgcattgcgctcccgccggcgagttctccccgcgcgccgttgcgaggagacggcgcatgtccgccgcgcttgcccctctgcagtaccccgcccctcttctcccaccacaatgagatgctaagatggcggtggctgcggcggttggcgctgcgtagctgaggtcgaaaaggcggccactggggccgaggcagccaggaaacgtgtgggcctctctgctgcggtctccgagggccgaccgctgccggcggcgggtcgtgggggctgactgtcgctctgcctttgacaggagaggctgcttcttgtagaggaaacagctttgaagtgtggagcgggaaaggagcagtttctgagctgcaaaaactagtttctaaacagagagttaattgttaaatccagtatggccacaggaggaggtccctttgaagatggcatgaatgatcaggatttaccaaactggagtaatgagaatgttgatgacaggctcaacaatatggattggggtgcccaacagaagaaagcaaatagatcatcagaaaagaataagaaaaagtttggtgtagaaagtgataaaagagtaaccaatgatatttctccggagtcgtcaccaggagttggaaggcgaagaacaaagactccacatacgttcccacacagtagatacatgagtcagatgtctgtcccagagcaggcagaattagagaaactgaaacagcggataaacttcagtgatttagatcagagaagcattggaagtgattcccaaggtagagcaacagctgctaacaacaaacgtcagcttagtgaaaaccgaaagcccttcaactttttgcctatgcagattaatactaacaagagcaaagatgcatctacaagtcccccaaacagagaaacgattggatcagcacagtgtaaagagttgtttgcttctgctttaagtaatgacctcttgcaaaactgtcaggtgtctgaagaagatgggaggggagaacctgcaatggagagcagccagattgtaagcaggcttgttcaaattcgcgattatattactaaagctagttccatgcgggaagatcttgtagagaaaaatgagagatctgctaatgttgagcgccttactcatctaatagatcaccttaaagaacaagagaagtcatatatgaaatttcttaaaaaaatccttgccagagatcctcagcaggagcctatggaagagatagaaaatttgaagaaacaacatgatttattaaaaagaatgttacaacagcaggagcaactaagagctctacagggacggcaggctgcacttctagctctgcaacataaagcagagcaagctattgcagtgatggatgattctgttgttgcagaaactgcaggtagcttatctggcgtcagtatcacatctgaactaaatgaagaattgaatgacttaattcagcgttttcataatcagcttcgtgattctcagcctccagctgttccagacaatagaagacaggcagaaagtctttcattaactagggaggtttcccagagcaggaaaccatcagcttcagaacgtttacctgatgagaaagtcgaactttttagcaaaatgagagtgctacaggaaaagaaacaaaaaatggacaaattgcttggagaacttcatacacttcgagatcagcatcttaacaattcatcatcctctccacaaaggagtgtcgatcagagaagtacttcagctccctctgcttctgtaggcttggcaccggttgtcaatggagaatccaatagcctcacatcatctgttccttatcctactgcttctctagtatctcagaatgagagtgaaaacgaaggccacctcaatccatctgaaaaactccagaagttaaatgaagttcgaaagagattgaatgagctaagagaattagttcattattatgaacaaacgtcagacatgatgacagatgctgtgaatgaaaacaggaaagatgaagaaactgaagagtcagaatatgattctgagcatgaaaattccgagcctgttactaacattcgaaatccacaagtagcttccacttggaatgaagtaaatagtcatagtaatgcacagtgtgtttctaataatagagatgggcgaacagttaattctaattgtgaaattaacaacagatctgctgccaacataagggctctaaacgtgcctccttctttagattgtcgatataatagagaaggggaacaggagattcatgttgcacaaggtgaagatgatgaggaggaggaggaagaagcagaagaggagggagtcagtggagcttcattatctagtcacaggagcagtctggttgatgagcatccagaagatgctgaatttgaacagaagatcaaccgacttatggctgcaaaacagaaacttagacagttacaagatcttgttgctatggtacaggatgatgatgcagctcaaggagttatctctgccagtgcatcaaatttggatgatttctacccagcagaagaagacaccaagcaaaattcaaataacactagaggaaatgccaataaaacacagaaagatactggagtaaatgaaaaggcaagagagaaattttatgaggctaaactacagcagcaacagagagagctaaaacaattgcaggaagaaagaaagaaactgattgacattcaggagaaaattcaagcattgcaaacggcatgccctgacttacagctgtcagctgctagtgtgggtaactgtcccaccaaaaaatatatgccagctgttacttcaaccccaactgttaatcaacacgagaccagtacaagcaaatctgtttttgagcctgaagattcttcaatagtagataatgagttgtggtcagaaatgagaagacatgaaatgttgagggaggagctgcgacagagaagaaagcagcttgaagctctgatggctgaacatcagaggaggcaaggtctagctgaaactgcatctccagtggctgtgtcattgagaagtgatggatctgagaacctatgtactcctcagcaaagtagaacagaaaaaacgatggcaacttggggagggtctacccagtgtgcactagatgaagaaggagatgaagacggttacctttctgaaggaattgttcggacagatgaagaggaggaagaagagcaagatgccagttccaatgataacttttctgtgtgtccttctaacagtgtgaatcataactcctacaatcgaaaggaaactaaaaatacgtggaagaacaattgccctttttcggcagatgaaaattatcgtcctttagccaagacaaggcaacagaatatcagcatgcaacggcaagaaaaccttcgttgggtgtcagagctctcttacgtagaagagaaagaacaatggcaagaacaaatcaatcagctaaagaaacagcttgattttagtgtcagtatttgtcagactttgatgcaagaccagcagactctatcttgtctgctacaaactcttctcacgggtccttacagtgttatgcccagcaatgttgcatctcctcaagtacacttcataatgcaccagttgaaccagtgctatactcagctaacatggcaacagaataatgttcagaggttgaaacaaatgctaaatgaacttatgcgccagcaaaatcagcatccagaaaaacctggaggcaaggaaagaggcagtagtgcatcgcaccctccttctcccagtttattttgtcctttcagctttccaacacagcctgtaaatctcttcaatatacctggatttactaacttttcatcatttgcaccaggtatgaatttcagccctttatttccttctaattttggagatttttctcagaatatctctacacccagtgaacagcagcaacccttagcccagaattcttcaggaaaaacagaatatatggcttttccaaaaccttttgaaagcagttcctctattggagcagagaaaccaaggaataaaaaactgcctgaagaggaggtggaaagcagtaggacaccatggttatatgaacaagaaggtgaagtagagaaaccatttatcaagactggattttcagtgtctgtagaaaaatctacaagtagtaaccgcaaaaatcaattagatacaaacggaagaagacgccagtttgatgaagaatcactggaaagctttagcagtatgcctgatccagtagatccaacaacagtgactaaaacattcaagacaagaaaagcgtctgcacaggccagcctggcatctaaagataaaactcccaagtcaaaaagtaagaagaggaattctactcagctgaaaagcagagttaaaaacatcaggtatgaaagtgccagtatgtctagcacatgtgaaccttgcaaaagtaggaacagacattcagcccagactgaagagcctgttcaagcaaaagtattcagcagaaagaatcatgagcaactggaaaaaataataaaatgtaataggtctacagaaatatcttcagaaactgggagtgatttttccatgtttgaagctttgcgagatactatttattctgaagtagctacattaatttctcaaaatgaatctcgtccacattttcttattgaactcttccatgagctgcagctactaaacacagactacttgagacagagggctttatatgcattgcaggacatagtatccagacatatttctgagagccatgaaaaaggagaaaatgtaaagtcagtaaactctggtacttggatagcatcaaactcagaacttactcctagtgagagccttgctactactgatgatgaaacttttgagaagaactttgaaagagaaacccataaaataagtgagcaaaatgatgctgataatgctagtgtcctgtctgtatcatcaaattttgagccttttgcaacagatgatctaggtaacaccgtgattcacttagatcaagcattagccagaatgagagaatatgagcgtatgaagactgaggctgaaagtaactcaaatatgagatgcatctgcaggattattgaggatggagatggtgctggtgcagaaactcccgttattgaaaatcgtagttcacaacaacctgtaagtgaagtttctaccatcccatgtcctagaattgatactcagcagctggaccggcaaattaaagcaattatgaaagaagtcattccttttttgaaggagcacatggatgaagtatgctcctcgcagcttctaacttcagtaaggcgcatggttttgacccttacccagcaaaatgatgagagcaaagagtttgtaaagttctttcataaacaacttggaagtatattacaggattcactggcaaaatttgctggcagaaaactgaaagactgtggagaagatcttcttgtagagatatctgaagtgttgttcaatgaattggctttctttaagcttatgcaagatttggataataatagtataactgttaaacagagatgcaaaaggaaaatagaagcaactggagtgatacaatcttgtgccaaagaggctaaaaggattcttgaagatcatggctcacctgctggagagattgatgatgaagacaaagacaaggatgaaactgaaacagttaagcagactcaaacatctgaggtgtatgatggtcccaaaaatgtaagatctgatatttctgatcaagaggaagatgaagaaagtgaaggatgtccagtgtctattaatttgtctaaagctgaaactcaggctttaactaattatggaagtggagaagatgaaaatgaggatgaagaaatggaagaatttgaagaaggccctgtggatgtccagacttccctccaggctaacactgaagctactgaagaaaatgaacatgatgaacaggtcctacaacgtgactttaaaaagacagcagaaagcaaaaatgtcccattggaacgagaagccactagtaaaaatgaccaaaataactgtcctgtgaaaccctgttacctcaatatcttggaagatgagcaacctttaaatagtgctgcccataaggagtcacctcctactgttgattcaactcaacagcctaaccctttgccgttacgtttacctgaaatggaacccttagtgcctagagtcaaagaagttaaatctgctcaggaaactcctgaaagctctctggctggaagtcctgatactgaatctccagtgttagtgaatgactatgaagcagaatctggtaatataagtcaaaagtctgatgaagttgaagatttaccactgaaactgacaatatattcagaggcagatctaagaaagaaaatggtagaagaagaacagaaaaaccatgtgaaatgcagaccgaagaattagctggaaattctgagacactaaaagaacctgaaacggtgggagcccagagtatatgagataactctgtccttacatactcaatgcatatatgaaaacaatactaaataaacatctgatctgtataaaaatg

SEQ ID NO: 450863 - DNA, 6346 bp, Homo sapiens
tgccgcttccgcggtcacatgactccagtctagctcgcattgcgctcccgccggcgagttctccccgcgcgccgttgcgaggagacggcgcatgtccgccgcgcttgcccctctgcagtaccccgcccctcttctcccaccacaatgagatgctaagatggcggtggctgcggcggttggcgctgcgtagctgaggtcgaaaaggcggccactggggccgaggcagccaggaaacgtgtgggcctctctgctgcggtctccgagggccgaccgctgccggcggcgggtcgtgggggctgactgtcgctctgcctttgacaggagaggctgcttcttgtagaggaaacagctttgaagtgtggagcgggaaaggagcagtttctgagctgcaaaaactagtttctaaacagagagttaattgttaaatccagtatggccacaggaggaggtccctttgaagatggcatgaatgatcaggatttaccaaactggagtaatgagaatgttgatgacaggctcaacaatatggattggggtgcccaacagaagaaagcaaatagatcatcagaaaagaataagaaaaagtttggtgtagaaagtgataaaagagtaaccaatgatatttctccggagtcgtcaccaggagttggaaggcgaagaacaaagactccacatacgttcccacacagtagatacatgagtcagatgtctgtcccagagcaggcagaattagagaaactgaaacagcggataaacttcagtgatttagatcagagaagcattggaagtgattcccaaggtagagcaacagctgctaacaacaaacgtcagcttagtgaaaaccgaaagcccttcaactttttgcctatgcagattaatactaacaagagcaaagatgcatctacaagtcccccaaacagagaaacgattggatcagcacagtgtaaagagttgtttgcttctgctttaagtaatgacctcttgcaaaactgtcaggtgtctgaagaagatgggaggggagaacctgcaatggagagcagccagattgtaagcaggcttgttcaaattcgcgattatattactaaagctagttccatgcgggaagatcttgtagagaaaaatgagagatctgctaatgttgagcgccttactcatctaatagatcaccttaaagaacaagagaagtcatatatgaaatttcttaaaaaaatccttgccagagatcctcagcaggagcctatggaagagatagaaaatttgaagaaacaacatgatttattaaaaagaatgttacaacagcaggagcaactaagagctctacagggacggcaggctgcacttctagctctgcaacataaagcagagcaagctattgcagtgatggatgattctgttgttgcagaaactgcaggtagcttatctggcgtcagtatcacatctgaactaaatgaagaattgaatgacttaattcagcgttttcataatcagcttcgtgattctcagcctccagctgttccagacaatagaagacaggcagaaagtctttcattaactagggaggtttcccagagcaggaaaccatcagcttcagaacgtttacctgatgagaaagtcgaactttttagcaaaatgagagtgctacaggaaaagaaacaaaaaatggacaaattgcttggagaacttcatacacttcgagatcagcatcttaacaattcatcatcctctccacaaaggagtgtcgatcagagaagtacttcagctccctctgcttctgtaggcttggcaccggttgtcaatggagaatccaatagcctcacatcatctgttccttatcctactgcttctctagtatctcagaatgagagtgaaaacgaaggccacctcaatccatctgaaaaactccagaagttaaatgaagttcgaaagagattgaatgagctaagagaattagttcattattatgaacaaacgtcagacatgatgacagatgctgtgaatgaaaacaggaaagatgaagaaactgaagagtcagaatatgattctgagcatgaaaattccgagcctgttactaacattcgaaatccacaagtagcttccacttggaatgaagtaaatagtcatagtaatgcacagtgtgtttctaataatagagatgggcgaacagttaattctaattgtgaaattaacaacagatctgctgccaacataagggctctaaacgtgcctccttctttagattgtcgatataatagagaaggggaacaggagattcatgttgcacaaggtgaagatgatgaggaggaggaggaagaagcagaagaggagggagtcagtggagcttcattatctagtcacaggagcagtctggttgatgagcatccagaagatgctgaatttgaacagaagatcaaccgacttatggctgcaaaacagaaacttagacagttacaagatcttgttgctatggtacaggatgatgatgcagctcaaggagttatctctgccagtgcatcaaatttggatgatttctacccagcagaagaagacaccaagcaaaattcaaataacactagaggaaatgccaataaaacacagaaagatactggagtaaatgaaaaggcaagagagaaattttatgaggctaaactacagcagcaacagagagagctaaaacaattgcaggaagaaagaaagaaactgattgacattcaggagaaaattcaagcattgcaaacggcatgccctgacttacagctgtcagctgctagtgtgggtaactgtcccaccaaaaaatatatgccagctgttacttcaaccccaactgttaatcaacacgagaccagtacaagcaaatctgtttttgagcctgaagattcttcaatagtagataatgagttgtggtcagaaatgagaagacatgaaatgttgagggaggagctgcgacagagaagaaagcagcttgaagctctgatggctgaacatcagaggaggcaaggtctagctgaaactgcatctccagtggctgtgtcattgagaagtgatggatctgagaacctatgtactcctcagcaaagtagaacagaaaaaacgatggcaacttggggagggtctacccagtgtgcactagatgaagaaggagatgaagacggttacctttctgaaggaattgttcggacagatgaagaggaggaagaagagcaagatgccagttccaatgataacttttctgtgtgtccttctaacagtgtgaatcataactcctacaatcgaaaggaaactaaaaatacgtggaagaacaattgccctttttcggcagatgaaaattatcgtcctttagccaagacaaggcaacagaatatcagcatgcaacggcaagaaaaccttcgttgggtgtcagagctctcttacgtagaagagaaagaacaatggcaagaacaaatcaatcagctaaagaaacagcttgattttagtgtcagtatttgtcagactttgatgcaagaccagcagactctatcttgtctgctacaaactcttctcacgggtccttacagtgttatgcccagcaatgttgcatctcctcaagtacacttcataatgcaccagttgaaccagtgctatactcagctaacatggcaacagaataatgttcagaggttgaaacaaatgctaaatgaacttatgcgccagcaaaatcagcatccagaaaaacctggaggcaaggaaagaggcagtagtgcatcgcaccctccttctcccagtttattttgtcctttcagctttccaacacagcctgtaaatctcttcaatatacctggatttactaacttttcatcatttgcaccaggtatgaatttcagccctttatttccttctaattttggagatttttctcagaatatctctacacccagtgaacagcagcaacccttagcccagaattcttcaggaaaaacagaatatatggcttttccaaaaccttttgaaagcagttcctctattggagcagagaaaccaaggaataaaaaactgcctgaagaggaggtggaaagcagtaggacaccatggttatatgaacaagaaggtgaagtagagaaaccatttatcaagactggattttcagtgtctgtagaaaaatctacaagtagtaaccgcaaaaatcaattagatacaaacggaagaagacgccagtttgatgaagaatcactggaaagctttagcagtatgcctgatccagtagatccaacaacagtgactaaaacattcaagacaagaaaagcgtctgcacaggccagcctggcatctaaagataaaactcccaagtcaaaaagtaagaagaggaattctactcagctgaaaagcagagttaaaaacatcaggtatgaaagtgccagtatgtctagcacatgtgaaccttgcaaaagtaggaacagacattcagcccagactgaagagcctgttcaagcaaaagtattcagcagaaagaatcatgagcaactggaaaaaataataaaatgtaataggtctacagaaatatcttcagaaactgggagtgatttttccatgtttgaagctttgcgagatactatttattctgaagtagctacattaatttctcaaaatgaatctcgtccacattttcttattgaactcttccatgagctgcagctactaaacacagactacttgagacagagggctttatatgcattgcaggacatagtatccagacatatttctgagagccatgaaaaaggagaaaatgtaaagtcagtaaactctggtacttggatagcatcaaactcagaacttactcctagtgagagccttgctactactgatgatgaaacttttgagaagaactttgaaagagaaacccataaaataagtgagcaaaatgatgctgataatgctagtgtcctgtctgtatcatcaaattttgagccttttgcaacagatgatctaggtaacaccgtgattcacttagatcaagcattagccagaatgagagaatatgagcgtatgaagactgaggctgaaagtaactcaaatatgagatgcatctgcaggattattgaggatggagatggtgctggtgcagaaactcccgttattgaaaatcgtagttcacaacaacctgtaagtgaagtttctaccatcccatgtcctagaattgatactcagcagctggaccggcaaattaaagcaattatgaaagaagtcattccttttttgaaggagcacatggatgaagtatgctcctcgcagcttctaacttcagtaaggcgcatggttttgacccttacccagcaaaatgatgagagcaaagagtttgtaaagttctttcataaacaacttggaagtatattacaggattcactggcaaaatttgctggcagaaaactgaaagactgtggagaagatcttcttgtagagatatctgaagtgttgttcaatgaattggctttctttaagcttatgcaagatttggataataatagtataactgttaaacagagatgcaaaaggaaaatagaagcaactggagtgatacaatcttgtgccaaagaggctaaaaggattcttgaagatcatggctcacctgctggagagattgatgatgaagacaaagacaaggatgaaactgaaacagttaagcagactcaaacatctgaggtgtatgatggtcccaaaaatgtaagatctgatatttctgatcaagaggaagatgaagaaagtgaaggatgtccagtgtctattaatttgtctaaagctgaaactcaggctttaactaattatggaagtggagaagatgaaaatgaggatgaagaaatggaagaatttgaagaaggccctgtggatgtccagacttccctccaggctaacactgaagctactgaagaaaatgaacatgatgaacaggtcctacaacgtgactttaaaaagacagcagaaagcaaaaatgtcccattggaacgagaagccactagtaaaaatgaccaaaataactgtcctgtgaaaccctgttacctcaatatcttggaagatgagcaacctttaaatagtgctgcccataaggagtcacctcctactgttgattcaactcaacagcctaaccctttgccgttacgtttacctgaaatggaacccttagtgcctagagtcaaagaagttaaatctgctcaggaaactcctgaaagctctctggctggaagtcctgatactgaatctccagtgttagtgaatgactatatttgtcttttacagtttggtgtcagagtaggatttgaaagagaccccctgtggcctctggaagcatcgaggaaccaggcaaaaggtgtccattgtg

SEQ ID NO: 450864 - DNA, 2185 bp, Homo sapiens
agaagatacttttaaatttctttgtatgaaggtcttgggttggacaaaaactacacactagtaatcatctcttttatagtgaccatatatttcaggccctgctattaaaacatttttcccttctaggtcctacaacgtgactttaaaaagacagcagaaagcaaaaatgtcccattggaacgagaagccactagtaaaaatgaccaaaataactgtcctgtgaaaccctgttacctcaatatcttggaagatgagcaacctttaaatagtgctgcccataaggagtcacctcctactgttgattcaactcaacagcctaaccctttgccgttacgtttacctgaaatggaacccttagtgcctagagtcaaagaagttaaatctgctcaggaaactcctgaaagctctctggctggaagtcctgatactgaatctccagtgttagtgaatgactatgaagcagaatctggtaatataagtcaaaagtctgatgaagaagattttgtaaaagttgaagatttaccactgaaactgacaatatattcagaggcagatctaagaaagaaaatggtagaagaagaacagaaaaaccatttatctggtgaaatatgtgaaatgcagaccgaagaattagctggaaattctgagacactaaaagaacctgaaacggtgggagcccagagtatatgagatgtcttcagaggctcatctaactctgtccttacatactcaatgcatatatgaaaacaatactaaataaacatctgatctgtataaaaatgtaaattagtttgacactgcttttttgataggtgtggtcatttctccccatggtagtttaaaacatcagaaactgaattctggacagatttaagccttgacacactgtgttttttttttttttcccccttcttttttgggtcttgatttttttccccattgtgatgtttggtaacgaatttaaaatgtagttttaaataaagtttggacttatctataaagtatcttttttggaaattatattgaattctatacagcaagtcaatgttttatataactttaggctgctcagagaagagcaatggttaagagttagttagagaaatatattatttgttataaagcccatccattaggccagtcttccaactaatgccagtgttgctgctgttgggtctgatgttcttcttttagatacctgcaggtcctattcctgtgcaagaatagggcagattatcaagatatccaggatacctatgaagttattatagaatatttattaatccattgaaattggataataagtttagaacataggttctcagtatctagaacttacatcattatctgtttgttaggatttgaaattctggaaaatatttatctacatcgcctcagactaaaagtaaaaaaaataagctttctataattagggagatttctgcacagagaagtaacattgtggttaattttaaatgaaaaacttaactttttcaagtggggataaataatacaactaaatttctgtaatagtaagattctatatgccttcagataaacttgcctattgagatggtaatttaaagccaaagcatagcagtttcttttgtgtgtagtgaggttgaagcagatttgcagggtgaagtattgaaagtttatgtgactttaagtcagcttttgaaaagtgatttgctttttatcccaaactgtccatatacccagtaaggcttcaaaaaaccagtcaacaatgagtaagtcaatcttatagattcttcttcctcgaataaaatacaaagaattagttccaataagtattttaactttgttaacaactgaaataccccataaaaaaagaactcgttgagagtatttctttaaaatggttacttgctgcccaggcaccatggctcactcctgtaatcccagcaccttgggaggccgaggcgggcagatcacgaggtcaagagattgagaccatcctgcccaacatgggggaaaccccgtctctactaaaaataaaaaaattagctgggagaggtggcacgtgcctgtagtcctagctacttgggaggctaaggcaggagaatagcctgaacccgggaggtggaggttgcaggttgcagtgagccgagatcatgccactgcactccagcctggcaacagagcgagactctgtctcaaaaaa

SEQ ID NO: 450865 - DNA, 5236 bp, Homo sapiens
tgccgcttccgcggtcacatgactccagtctagctcgcattgcgctcccgccggcgagttctccccgcgcgccgttgcgaggagacggcgcatgtccgccgcgcttgcccctctgcagtaccccgcccctcttctcccaccacaatgagatgctaagatggcggtggctgcggcggttggcgctgcgtagctgaggtcgaaaaggcggccactggggccgaggcagccaggaaacgtgtgggcctctctgctgcggtctccgagggccgaccgctgccggcggcgggtcgtgggggctgactgtcgctctgcctttgacaggagaggctgcttcttgtagaggaaacagctttgaagtgtggagcgggaaaggagcagtttctgagctgcaaaaactagtttctaaacagagagttaattgttaaatccagtatggccacaggaggaggtccctttgaagatggcatgaatgatcaggatttaccaaactggagtaatgagaatgttgatgacaggctcaacaatatggattggggtgcccaacagaagaaagcaaatagatcatcagaaaagaataagaaaaagtttggtgtagaaagtgataaaagagtaaccaatgatatttctccggagtcgtcaccaggagttggaaggcgaagaacaaagactccacatacgttcccacacagtagatacatgagtcagatgtctgtcccagagcaggcagaattagagaaactgaaacagcggataaacttcagtgatttagatcagagaagcattggaagtgattcccaaggtagagcaacagctgctaacaacaaacgtcagcttagtgaaaaccgaaagcccttcaactttttgcctatgcagattaatactaacaagagcaaagatgcatctacaagtcccccaaacagagaaacgattggatcagcacagtgtaaagagttgtttgcttctgctttaagtaatgacctcttgcaaaactgtcaggtgtctgaagaagatgggaggggagaacctgcaatggagagcagccagattgtaagcaggcttgttcaaattcgcgattatattactaaagctagttccatgcgggaagatcttgtagagaaaaatgagagatctgctaatgttgagcgccttactcatctaatagatcaccttaaagaacaagagaagtcatatatgaaatttcttaaaaaaatccttgccagagatcctcagcaggagcctatggaagagatagaaaatttgaagaaacaacatgatttattaaaaagaatgttacaacagcaggagcaactaagagctctacagggacggcaggctgcacttctagctctgcaacataaagcagagcaagctattgcagtgatggatgattctgttgttgcagaaactgcaggtagcttatctggcgtcagtatcacatctgaactaaatgaagaattgaatgacttaattcagcgttttcataatcagcttcgtgattctcagcctccagctgttccagacaatagaagacaggcagaaagtctttcattaactagggaggtttcccagagcaggaaaccatcagcttcagaacgtttacctgatgagaaagtcgaactttttagcaaaatgagagtgctacaggaaaagaaacaaaaaatggacaaattgcttggagaacttcatacacttcgagatcagcatcttaacaattcatcatcctctccacaaaggagtgtcgatcagagaagtacttcagctccctctgcttctgtaggcttggcaccggttgtcaatggagaatccaatagcctcacatcatctgttccttatcctactgcttctctagtatctcagaatgagagtgaaaacgaaggccacctcaatccatctgaaaaactccagaagttaaatgaagttcgaaagagattgaatgagctaagagaattagttcattattatgaacaaacgtcagacatgatgacagatgctgtgaatgaaaacaggaaagatgaagaaactgaagagtcagaatatgattctgagcatgaaaattccgagcctgttactaacattcgaaatccacaagtagcttccacttggaatgaagtaaatagtcatagtaatgcacagtgtgtttctaataatagagatgggcgaacagttaattctaattgtgaaattaacaacagatctgctgccaacataagggctctaaacgtgcctccttctttagattgtcgatataatagagaaggggaacaggagattcatgttgcacaaggtgaagatgatgaggaggaggaggaagaagcagaagaggagggagtcagtggagcttcattatctagtcacaggagcagtctggttgatgagcatccagaagatgctgaatttgaacagaagatcaaccgacttatggctgcaaaacagaaacttagacagttacaagatcttgttgctatggtacaggatgatgatgcagctcaaggagttatctctgccagtgcatcaaatttggatgatttctacccagcagaagaagacaccaagcaaaattcaaataacactagaggaaatgccaataaaacacagaaagatactggagtaaatgaaaaggcaagagagaaattttatgaggctaaactacagcagcaacagagagagctaaaacaattgcaggaagaaagaaagaaactgattgacattcaggagaaaattcaagcattgcaaacggcatgccctgacttacagctgtcagctgctagtgtgggtaactgtcccaccaaaaaatatatgccagctgttacttcaaccccaactgttaatcaacacgagaccagtacaagcaaatctgtttttgagcctgaagattcttcaatagtagataatgagttgtggtcagaaatgagaagacatgaaatgttgagggaggagctgcgacagagaagaaagcagcttgaagctctgatggctgaacatcagaggaggcaaggtctagctgaaactgcatctccagtggctgtgtcattgagaagtgatggatctgagaacctatgtactcctcagcaaagtagaacagaaaaaacgatggcaacttggggagggtctacccagtgtgcactagatgaagaaggagatgaagacggttacctttctgaaggaattgttcggacagatgaagaggaggaagaagagcaagatgccagttccaatgataacttttctgtgtgtccttctaacagtgtgaatcataactcctacaatcgaaaggaaactaaaaatacgtggaagaacaattgccctttttcggcagatgaaaattatcgtcctttagccaagacaaggcaacagaatatcagcatgcaacggcaagaaaaccttcgttgggtgtcagagctctcttacgtagaagagaaagaacaatggcaagaacaaatcaatcagctaaagaaacagcttgattttagtgtcagtatttgtcagactttgatgcaagaccagcagactctatcttgtctgctacaaactcttctcacgggtccttacagtgttatgcccagcaatgttgcatctcctcaagtacacttcataatgcaccagttgaaccagtgctatactcagctaacatggcaacagaataatgttcagaggttgaaacaaatgctaaatgaacttatgcgccagcaaaatcagcatccagaaaaacctggaggcaaggaaagaggcagtagtgcatcgcaccctccttctcccagtttattttgtcctttcagctttccaacacagcctgtaaatctcttcaatatacctggatttactaacttttcatcatttgcaccaggtatgaatttcagccctttatttccttctaattttggagatttttctcagaatatctctacacccagtgaacagcagcaacccttagcccagaattcttcaggaaaaacagaatatatggcttttccaaaaccttttgaaagcagttcctctattggagcagagaaaccaaggaataaaaaactgcctgaagaggaggtggaaagcagtaggacaccatggttatatgaacaagaaggtgaagtagagaaaccatttatcaagactggattttcagtgtctgtagaaaaatctacaagtagtaaccgcaaaaatcaattagatacaaacggaagaagacgccagtttgatgaagaatcactggaaagctttagcagtatgcctgatccagtagatccaacaacagtgactaaaacattcaagacaagaaaagcgtctgcacaggccagcctggcatctaaagataaaactcccaagtcaaaaagtaagaagaggaattctactcagctgaaaagcagagttaaaaacatcaggtatgaaagtgccagtatgtctagcacatgtgaaccttgcaaaagtaggaacagacattcagcccagactgaagagcctgttcaagcaaaagtattcagcagaaagaatcatgagcaactggaaaaaataataaaatgtaataggtctacagaaatatcttcagaaactgggagtgatttttccatgtttgaagctttgcgagatactatttattctgaagtagctacattaatttctcaaaatgaatctcgtccacattttcttattgaactcttccatgagctgcagctactaaacacagactacttgagacagagggctttatatgcattgcaggacatagtatccagacatatttctgagagccatgaaaaaggagaaaatgtaaagtcagtaaactctggtacttggatagcatcaaactcagaacttactcctagtgagagccttgctactactgatgatgtaagctgataatgattagtgaattgtagatataattttagtatgcagtaaataaaagttaaatagattattgtcaaattgtaggtagacctaatatatttgattttcagctttttttaaaacttgggtataatgtgttattttattttgagggcgagatataatatgcaatcaaaatatggtagcaaacaccaaaaattatgtatgtatgatagattatgaggtctgagatagccatatttatgttgttattacccagtataggggctgactcttaaaagacatttacaaatgtatgttgtatttatttaagacattcagtaaaacaggtatcagattacagtaaaaacacttgaatgaataaatacaggataaatcaggtctttgggttaaa

SEQ ID NO: 450866 - DNA, 2272 bp, Homo sapiens
tgccgcttccgcggtcacatgactccagtctagctcgcattgcgctcccgccggcgagttctccccgcgcgccgttgcgaggagacggcgcatgtccgccgcgcttgcccctctgcagtaccccgcccctcttctcccaccacaatgagatgctaagatggcggtggctgcggcggttggcgctgcgtagctgaggtcgaaaaggcggccactggggccgaggcagccaggaaacgtgtgggcctctctgctgcggtctccgagggccgaccgctgccggcggcgggtcgtgggggctgactgtcgctctgcctttgacaggagaggctgcttcttgtagaggaaacagctttgaagtgtggagcgggaaaggagcagtttctgagctgcaaaaactagtttctaaacagagagttaattgttaaatccagtatggccacaggaggaggtccctttgaagatggcatgaatgatcaggatttaccaaactggagtaatgagaatgttgatgacaggctcaacaatatggattggggtgcccaacagaagaaagcaaatagatcatcagaaaagaataagaaaaagtttggtgtagaaagtgataaaagagtaaccaatgatatttctccggagtcgtcaccaggagttggaaggcgaagaacaaagactccacatacgttcccacacagtagatacatgagtcagatgtctgtcccagagcaggcagaattagagaaactgaaacagcggataaacttcagtgatttagatcagagaagcattggaagtgattcccaaggtagagcaacagctgctaacaacaaacgtcagcttagtgaaaaccgaaagcccttcaactttttgcctatgcagattaatactaacaagagcaaagatgcatctacaagtcccccaaacagagaaacgattggatcagcacagtgtaaagagttgtttgcttctgctttaagtaatgacctcttgcaaaactgtcaggtgtctgaagaagatgggaggggagaacctgcaatggagagcagccagattgtaagcaggcttgttcaaattcgcgattatattactaaagctagttccatgcgggaagatcttgtagagaaaaatgagagatctgctaatgttgagcgccttactcatctaatagatcaccttaaagaacaagagaagtcatatatgaaatttcttaaaaaaatccttgctagagaaaatgaggaggaggatgttcggactatagattcagctgtgggatctggttctgtagctgagagcacatcgctaaacatagatgtgcagtctgaggcttcagataccacggccagagatcctcagcaggagcctatggaagagatagaaaatttgaagaaacaacatgatttattaaaaagaatgttacaacagcaggagcaactaagagctctacagggacggcaggctgcacttctagctctgcaacataaagcagagcaagctattgcagtgatggatgattctgttgttgcagaaactgcaggtagcttatctggcgtcagtatcacatctgaactaaatgaagaattgaatgacttaattcagcgttttcataatcagcttcgtgattctcagcctccagctgttccagacaatagaagacaggcagaaagtctttcattaactagggaggtttcccagagcaggaaaccatcagcttcagaacgtttacctgatgagaaagtcgaactttttagcaaaatgagagtgctacaggaaaagaaacaaaaaatggacaaattgcttggagaacttcatacacttcgagatcagcatcttaacaattcatcatcctctccacaaaggagtgtcgatcagagaagtacttcagctccctctgcttctgtaggcttggcaccggttgtcaatggagaatccaatagcctcacatcatctgttccttatcctactgcttctctagtatctcagaatgagagtgaaaacgaaggccacctcaatccatctgaaaaactccagtaaaacatttataatcattgtttacatgaagttaaataatagggataaattctgtttttttttttatgttgaaaattctgcaaaacgagatttatttaatattgttgtaaacattcttaagggataggtagaagaggcgtgtgtgtgttgtgtgggcataatttgagttgtctaagagatgtgatgtaacatagtttctgtgaactgatgttactttcttgtttttcaaataaaggatcaaaaataaaaa

SEQ ID NO: 450867 - DNA, 509 bp, Homo sapiens
tgccgcttccgcggtcacatgactccagtctagctcgcattgcgctcccgccggcgagttctccccgcgcgccgttgcgaggagacggcgcatgtccgccgcgcttgcccctctgcagtaccccgcccctcttctcccaccacaatgagatgctaagatggcggtggctgcggcggttggcgctgcgtagctgaggtcgaaaaggcggccactggggccgaggcagccaggaaacgtgtgggcctctctgctgcggtctccgagggccgaccgctgccggcggcgggtcgtgggggctgactgtcgctctgcctttgacaggagaggctgcttcttgtagagagagttaattgttaaatccagtatggccacaggaggaggtccctttgaagatggcatgaatgatcaggatttaccaaactggagtaatgagaatgtaagcccgtgggcgattatgagaatgaatgcgtccggtgaagcttacagggggtatacatgcgaagggctcg

SEQ ID NO: 450868 - DNA, 521 bp, Homo sapiens
ttctttttaacattaacaaaatatacaaacttccttttctgtaatgaagtccatattagcaaaagcaaaaaagaaattagcacttagcttatttctaagtgttgaaagattttcactgatttttcctataaaatgtataatattttctgtatattttatatgatcagaaataaacatggttcttagtaatgctaggtaatgttattcattaaagtttcatttttagtataaaatgcatatcttgatattttaagattttatttatcttggtaatattaagcttcttttctactttaaaagctctgaaatagaattgtctaaaatagaatttttagataatttaaagctgagagtaatgatactagctaataaaagttgtcatgaaggtacttcatcaatattaactttctggtcttttatgtattccagaaactgggagtgatttttccatgtttgaagctttgcgagatactatttattctgaagtagctacattaatttctcaaaatgaatctcgtcca

SEQ ID NO: 450869 - DNA, 727 bp, Homo sapiens
agttttcagtatatcgatggactttagttaatgtataatagcatccagttactatatacttgttttcaatctttcgctatttagaaacaatgcaccaaagaatatacttgcacaagcttttgtgcatttgtgttttttaagaaggatttggagaagtggaactactatgtcagttggtgtacattttaaaggacacaacttaattggtctctagaacaattagttttctagagagcaattttctatatgtatttccgtatgtatttatatttctatatgtatagaatttttgatatgtattcatatttttctatatgtattttttatattttaagcagtggtatgtgagagttcgtttctccacacccttgattgtgttttattttattgatataccgtagcttgtttaaccattactggaattggccttttccaaatttcccaattataagaagagttattgaggtgagataaacatgtatgcaaatacaaacgtgtgtaaacaaatatatattgaacacgtgtacacatgtatacaaacgtgctttctttactgctttaatctttttatgtaaattttacagactagtggtatttactaaggtatgaattggataatgtcttgaggtatcaagattgttttaatgtaatgatgctctttcaggatgatgatgcagctcaaggagttatctctgccagtgcatcaaatttggatgatttctaccca

SEQ ID NO: 450870 - DNA, 405 bp, Homo sapiens
acagagaaacgattggatcagcacagtgtaaagagttgtttgcttctgctttaagtaatgacctcttgcaaaactgtcaggtgtctgaagaagatgggaggggagaacctgcaatggagagcagccaggtgataacgtttgtttcttttgctcattctttacacaaacctcaaaataccaacagtaaggtttagaaaattaggttacgcacacaggaattttagttgggtggaattaaagtgcttcactgacctcctttgttaatctgccagatttacttaaaatagagtaaatttctgtttatccaaaaatattttagaaatggcatattcaggttagttaaaggcttctgtttatttacaaaatagcatattgccagtttttagtaaagggggattggaagga

SEQ ID NO: 450871 - DNA, 345 bp, Homo sapiens
tgggtcaaaatagccaagcctctcaatacgtatgaataaagtaggagtgtggcttttcttatgaatggatatttctaaacagacatctgaaaattgaggagcatctacggcaagaaaattaaaaattaacatttggtattatatggattgattttctttttttaaacaataggtaagtttatattctaaccaactaggatttttctcaggagcacatggatgaagtatgctcctcgcagcttctaacttcagtaaggcgcatggttttgacccttacccagcaaaatgatgagagcaaagagtttgtaaagttctttcataaacaacttggaagtatattacagg

SEQ ID NO: 450872 - DNA, 316 bp, Homo sapiens
taaacaataggtaagtttatattctaaccaactaggatttttctcaggagcacatggatgaagtatgctcctcgcagcttctaacttcagtaaggcgcatggttttgacccttacccagcaaaatgatgagagcaaagagtttgtaaagttctttcataaacaacttggaagtatattacaggtaagagtttatacttgtatgatttaccaatatgtactgtgtggtaaggttttttttcggggggtgggtgaggcattttcttgcattacacaatttattctggtggacatccaatctagcgtccatttgggatg

SEQ ID NO: 450873 - DNA, 607 bp, Homo sapiens
acgttttttgtgaattcctttttagctgtcagctgctagtgtgggtaactgtcccaccaaaaaatatatgccagctgttacttcaaccccaactgttaatcaacacgagaccagtacaagcaaatctgtttttgagcctgaagattcttcaatagtagataatgaggtattgtaaattgtactctcttgttcctgagttagtcttttgttttcctttttttttcttcaataaggcacatctcaggaaaggaaactgaatatccttgaaacatgtttgtaaatagtagtctgctttgtgccttttttagtagacacaaaaatgtaatagattataataatataagaaagataaaacattttaatttttaaactttaattgaaaagttttaaataattttttctaaaaagtaattatcttttaaaaatatccatgttctttgttagtaaatatttgacagaaatatataggggggtagttgcagcaaatagtaatcatttcagttagaaagacctatcctttgacattttatttatatgtggtttgtagaaaatataatttttcctaaataatttctgaagtatatttgagttctacttgtttctatta

SEQ ID NO: 450874 - DNA, 6599 bp, Homo sapiens
tgccgcttccgcggtcacatgactccagtctagctcgcattgcgctcccgccggcgagttctccccgcgcgccgttgcgaggagacggcgcatgtccgccgcgcttgcccctctgcagtaccccgcccctcttctcccaccacaatgagatgctaagatggcggtggctgcggcggttggcgctgcgtagctgaggtcgaaaaggcggccactggggccgaggcagccaggaaacgtgtgggcctctctgctgcggtctccgagggccgaccgctgccggcggcgggtcgtgggggctgactgtcgctctgcctttgacaggagaggctgcttcttgtagaggaaacagctttgaagtgtggagcgggaaaggagcagtttctgagctgcaaaaactagtttctaaacagagagttaattgttaaatccagtatggccacaggaggaggtccctttgaagatggcatgaatgatcaggatttaccaaactggagtaatgagaatgttgatgacaggctcaacaatatggattggggtgcccaacagaagaaagcaaatagatcatcagaaaagaataagaaaaagtttggtgtagaaagtgataaaagagtaaccaatgatatttctccggagtcgtcaccaggagttggaaggcgaagaacaaagactccacatacgttcccacacagtagatacatgagtcagatgtctgtcccagagcaggcagaattagagaaactgaaacagcggataaacttcagtgatttagatcagagaagcattggaagtgattcccaaggtagagcaacagctgctaacaacaaacgtcagcttagtgaaaaccgaaagcccttcaactttttgcctatgcagattaatactaacaagagcaaagatgcatctacaagtcccccaaacagagaaacgattggatcagcacagtgtaaagagttgtttgcttctgctttaagtaatgacctcttgcaaaactgtcaggtgtctgaagaagatgggaggggagaacctgcaatggagagcagccagattgtaagcaggcttgttcaaattcgcgattatattactaaagctagttccatgcgggaagatcttgtagagaaaaatgagagatctgctaatgttgagcgccttactcatctaatagatcaccttaaagaacaagagaagtcatatatgaaatttcttaaaaaaatccttgccagagatcctcagcaggagcctatggaagagatagaaaatttgaagaaacaacatgatttattaaaaagaatgttacaacagcaggagcaactaagagctctacagggacggcaggctgcacttctagctctgcaacataaagcagagcaagctattgcagtgatggatgattctgttgttgcagaaactgcaggtagcttatctggcgtcagtatcacatctgaactaaatgaagaattgaatgacttaattcagcgttttcataatcagcttcgtgattctcagcctccagctgttccagacaatagaagacaggcagaaagtctttcattaactagggaggtttcccagagcaggaaaccatcagcttcagaacgtttacctgatgagaaagtcgaactttttagcaaaatgagagtgctacaggaaaagaaacaaaaaatggacaaattgcttggagaacttcatacacttcgagatcagcatcttaacaattcatcatcctctccacaaaggagtgtcgatcagagaagtacttcagctccctctgcttctgtaggcttggcaccggttgtcaatggagaatccaatagcctcacatcatctgttccttatcctactgcttctctagtatctcagaatgagagtgaaaacgaaggccacctcaatccatctgaaaaactccagaagttaaatgaagttcgaaagagattgaatgagctaagagaattagttcattattatgaacaaacgtcagacatgatgacagatgctgtgaatgaaaacaggaaagatgaagaaactgaagagtcagaatatgattctgagcatgaaaattccgagcctgttactaacattcgaaatccacaagtagcttccacttggaatgaagtaaatagtcatagtaatgcacagtgtgtttctaataatagagatgggcgaacagttaattctaattgtgaaattaacaacagatctgctgccaacataagggctctaaacgtgcctccttctttagattgtcgatataatagagaaggggaacaggagattcatgttgcacaaggtgaagatgatgaggaggaggaggaagaagcagaagaggagggagtcagtggagcttcattatctagtcacaggagcagtctggttgatgagcatccagaagatgctgaatttgaacagaagatcaaccgacttatggctgcaaaacagaaacttagacagttacaagatcttgttgctatggtacaggatgatgatgcagctcaaggagttatctctgccagtgcatcaaatttggatgatttctacccagcagaagaagacaccaagcaaaattcaaataacactagaggaaatgccaataaaacacagaaagatactggagtaaatgaaaaggcaagagagaaattttatgaggctaaactacagcagcaacagagagagctaaaacaattgcaggaagaaagaaagaaactgattgacattcaggagaaaattcaagcattgcaaacggcatgccctgacttacagctgtcagctgctagtgtgggtaactgtcccaccaaaaaatatatgccagctgttacttcaaccccaactgttaatcaacacgagaccagtacaagcaaatctgtttttgagcctgaagattcttcaatagtagataatgagttgtggtcagaaatgagaagacatgaaatgttgagggaggagctgcgacagagaagaaagcagcttgaagctctgatggctgaacatcagaggaggcaaggtctagctgaaactgcatctccagtggctgtgtcattgagaagtgatggatctgagaacctatgtactcctcagcaaagtagaacagaaaaaacgatggcaacttggggagggtctacccagtgtgcactagatgaagaaggagatgaagacggttacctttctgaaggaattgttcggacagatgaagaggaggaagaagagcaagatgccagttccaatgataacttttctgtgtgtccttctaacagtgtgaatcataactcctacaatcgaaaggaaactaaaaatacgtggaagaacaattgccctttttcggcagatgaaaattatcgtcctttagccaagacaaggcaacagaatatcagcatgcaacggcaagaaaaccttcgttgggtgtcagagctctcttacgtagaagagaaagaacaatggcaagaacaaatcaatcagctaaagaaacagcttgattttagtgtcagtatttgtcagactttgatgcaagaccagcagactctatcttgtctgctacaaactcttctcacgggtccttacagtgttatgcccagcaatgttgcatctcctcaagtacacttcataatgcaccagttgaaccagtgctatactcagctaacatggcaacagaataatgttcagaggttgaaacaaatgctaaatgaacttatgcgccagcaaaatcagcatccagaaaaacctggaggcaaggaaagaggcagtagtgcatcgcaccctccttctcccagtttattttgtcctttcagctttccaacacagcctgtaaatctcttcaatatacctggatttactaacttttcatcatttgcaccaggtatgaatttcagccctttatttccttctaattttggagatttttctcagaatatctctacacccagtgaacagcagcaacccttagcccagaattcttcaggaaaaacagaatatatggcttttccaaaaccttttgaaagcagttcctctattggagcagagaaaccaaggaataaaaaactgcctgaagaggaggtggaaagcagtaggacaccatggttatatgaacaagaaggtgaagtagagaaaccatttatcaagactggattttcagtgtctgtagaaaaatctacaagtagtaaccgcaaaaatcaattagatacaaacggaagaagacgccagtttgatgaagaatcactggaaagctttagcagtatgcctgatccagtagatccaacaacagtgactaaaacattcaagacaagaaaagcgtctgcacaggccagcctggcatctaaagataaaactcccaagtcaaaaagtaagaagaggaattctactcagctgaaaagcagagttaaaaacatcaggtatgaaagtgccagtatgtctagcacatgtgaaccttgcaaaagtaggaacagacattcagcccagactgaagagcctgttcaagcaaaagtattcagcagaaagaatcatgagcaactggaaaaaataataaaatgtaataggtctacagaaatatcttcagaaactgggagtgatttttccatgtttgaagctttgcgagatactatttattctgaagtagctacattaatttctcaaaatgaatctcgtccacattttcttattgaactcttccatgagctgcagctactaaacacagactacttgagacagagggctttatatgcattgcaggacatagtatccagacatatttctgagagccatgaaaaaggagaaaatgtaaagtcagtaaactctggtacttggatagcatcaaactcagaacttactcctagtgagagccttgctactactgatgatgaaacttttgagaagaactttgaaagagaaacccataaaataagtgagcaaaatgatgctgataatgctagtgtcctgtctgtatcatcaaattttgagccttttgcaacagatgatctaggtaacaccgtgattcacttagatcaagcattagccagaatgagagaatatgagcgtatgaagactgaggctgaaagtaactcaaatatgagatgcatctgcaggattattgaggatggagatggtgctggtgcaggtactacagttaataatttagaagaaactcccgttattgaaaatcgtagttcacaacaacctgtaagtgaagtttctaccatcccatgtcctagaattgatactcagcagctggaccggcaaattaaagcaattatgaaagaagtcattccttttttgaaggagcacatggatgaagtatgctcctcgcagcttctaacttcagtaaggcgcatggttttgacccttacccagcaaaatgatgagagcaaagagtttgtaaagttctttcataaacaacttggaagtatattacaggattcactggcaaaatttgctggcagaaaactgaaagactgtggagaagatcttcttgtagagatatctgaagtgttgttcaatgaattggctttctttaagcttatgcaagatttggataataatagtataactgttaaacagagatgcaaaaggaaaatagaagcaactggagtgatacaatcttgtgccaaagaggctaaaaggattcttgaagatcatggctcacctgctggagagattgatgatgaagacaaagacaaggatgaaactgaaacagttaagcagactcaaacatctgaggtgtatgatggtcccaaaaatgtaagatctgatatttctgatcaagaggaagatgaagaaagtgaaggatgtccagtgtctattaatttgtctaaagctgaaactcaggctttaactaattatggaagtggagaagatgaaaatgaggatgaagaaatggaagaatttgaagaaggccctgtggatgtccagacttccctccaggctaacactgaagctactgaagaaaatgaacatgatgaacaggtcctacaacgtgactttaaaaagacagcagaaagcaaaaatgtcccattggaacgagaagccactagtaaaaatgaccaaaataactgtcctgtgaaaccctgttacctcaatatcttggaagatgagcaacctttaaatagtgctgcccataaggagtcacctcctactgttgattcaactcaacagcctaaccctttgccgttacgtttacctgaaatggaacccttagtgcctagagtcaaagaagttaaatctgctcaggaaactcctgaaagctctctggctggaagtcctgatactgaatctccagtgttagtgaatgactatgaagcagaatctggtaatataagtcaaaagtctgatgaagaagattttgtaaaagttgaagatttaccactgaaactgacaatatattcagaggcagatctaagaaagaaaatggtagaagaagaacagaaaaaccatttatctggtgaaatatgtgaaatgcagaccgaagaattagctggaaattctgagacactaaaagaacctgaaacggtgggagcccagagtatatgagatgtcttcagaggctcatctaactctgtccttacatactcaatgcatatatgaaaacaatactaaataaacatctgatctgtataaaaatg

SEQ ID NO: 450875 - DNA, 731 bp, Homo sapiens
attcgcggccgcgtcgaccagagttgaaaacatcaaaactgggagtgatttttccatgtttgaagctttgcgagatactatttattctgaagtagctacattaatttctcaaaatgaatctcgtccacattttcttattgaactcttccatgagctgcagctactaaacacagactacttgagacagagggctttatatgcattgcaggacatagtatccagacatatttctgagagccatgaaaaaggagaaaatgtaaagtcagtaaactctggtacttggatagcatcaaactcagaacttactcctagtgagagccttgctactactgatgatgtaagctgataatgattagtgaattgtagatataattttagtatgcagtaaataaaagttaaatagattattgtcaaattgtaggtagacctaatatatttgattttcagctttttttaaaacttgggtataatgtgttattttattttgagggcgagatataatatgcaatcaaaatatggtagcaaacaccaaaaattatgtatgtatgatagattatgaggtctgagatagccatatttatgttgttattacccagtataggggctgactcttaaaagacatttacaaatgtatgttgtatttatttaagacattcagtaaaacaggtatcagattacagtaaaaacacttgaatgaataaatacaggataaatcaggtctttgggttaaa

SEQ ID NO: 450876 - DNA, 6410 bp, Homo sapiens
tgccgcttccgcggtcacatgactccagtctagctcgcattgcgctcccgccggcgagttctccccgcgcgccgttgcgaggagacggcgcatgtccgccgcgcttgcccctctgcagtaccccgcccctcttctcccaccacaatgagatgctaagatggcggtggctgcggcggttggcgctgcgtagctgaggtcgaaaaggcggccactggggccgaggcagccaggaaacgtgtgggcctctctgctgcggtctccgagggccgaccgctgccggcggcgggtcgtgggggctgactgtcgctctgcctttgacaggagaggctgcttcttgtagaggaaacagctttgaagtgtggagcgggaaaggagcagtttctgagctgcaaaaactagtttctaaacagagagttaattgttaaatccagtatggccacaggaggaggtccctttgaagatggcatgaatgatcaggatttaccaaactggagtaatgagaatgttgatgacaggctcaacaatatggattggggtgcccaacagaagaaagcaaatagatcatcagaaaagaataagaaaaagtttggtgtagaaagtgataaaagagtaaccaatgatatttctccggagtcgtcaccaggagttggaaggcgaagaacaaagactccacatacgttcccacacagtagatacatgagtcagatgtctgtcccagagcaggcagaattagagaaactgaaacagcggataaacttcagtgatttagatcagagaagcattggaagtgattcccaaggtagagcaacagctgctaacaacaaacgtcagcttagtgaaaaccgaaagcccttcaactttttgcctatgcagattaatactaacaagagcaaagatgcatctacaagtcccccaaacagagaaacgattggatcagcacagtgtaaagagttgtttgcttctgctttaagtaatgacctcttgcaaaactgtcaggtgtctgaagaagatgggaggggagaacctgcaatggagagcagccagattgtaagcaggcttgttcaaattcgcgattatattactaaagctagttccatgcgggaagatcttgtagagaaaaatgagagatctgctaatgttgagcgccttactcatctaatagatcaccttaaagaacaagagaagtcatatatgaaatttcttaaaaaaatccttgccagagatcctcagcaggagcctatggaagagatagaaaatttgaagaaacaacatgatttattaaaaagaatgttacaacagcaggagcaactaagagctctacagggacggcaggctgcacttctagctctgcaacataaagcagagcaagctattgcagtgatggatgattctgttgttgcagaaactgcaggtagcttatctggcgtcagtatcacatctgaactaaatgaagaattgaatgacttaattcagcgttttcataatcagcttcgtgattctcagcctccagctgttccagacaatagaagacaggcagaaagtctttcattaactagggaggtttcccagagcaggaaaccatcagcttcagaacgtttacctgatgagaaagtcgaactttttagcaaaatgagagtgctacaggaaaagaaacaaaaaatggacaaattgcttggagaacttcatacacttcgagatcagcatcttaacaattcatcatcctctccacaaaggagtgtcgatcagagaagtacttcagctccctctgcttctgtaggcttggcaccggttgtcaatggagaatccaatagcctcacatcatctgttccttatcctactgcttctctagtatctcagaatgagagtgaaaacgaaggccacctcaatccatctgaaaaactccagaagttaaatgaagttcgaaagagattgaatgagctaagagaattagttcattattatgaacaaacgtcagacatgatgacagatgctgtgaatgaaaacaggaaagatgaagaaactgaagagtcagaatatgattctgagcatgaaaattccgagcctgttactaacattcgaaatccacaagtagcttccacttggaatgaagtaaatagtcatagtaatgcacagtgtgtttctaataatagagatgggcgaacagttaattctaattgtgaaattaacaacagatctgctgccaacataagggctctaaacgtgcctccttctttagattgtcgatataatagagaaggggaacaggagattcatgttgcacaaggtgaagatgatgaggaggaggaggaagaagcagaagaggagggagtcagtggagcttcattatctagtcacaggagcagtctggttgatgagcatccagaagatgctgaatttgaacagaagatcaaccgacttatggctgcaaaacagaaacttagacagttacaagatcttgttgctatggtacaggatgatgatgcagctcaaggagttatctctgccagtgcatcaaatttggatgatttctacccagcagaagaagacaccaagcaaaattcaaataacactagaggaaatgccaataaaacacagaaagatactggagtaaatgaaaaggcaagagagaaattttatgaggctaaactacagcagcaacagagagagctaaaacaattgcaggaagaaagaaagaaactgattgacattcaggagaaaattcaagcattgcaaacggcatgccctgacttacagctgtcagctgctagtgtgggtaactgtcccaccaaaaaatatatgccagctgttacttcaaccccaactgttaatcaacacgagaccagtacaagcaaatctgtttttgagcctgaagattcttcaatagtagataatgagttgtggtcagaaatgagaagacatgaaatgttgagggaggagctgcgacagagaagaaagcagcttgaagctctgatggctgaacatcagaggaggcaaggtctagctgaaactgcatctccagtggctgtgtcattgagaagtgatggatctgagaacctatgtactcctcagcaaagtagaacagaaaaaacgatggcaacttggggagggtctacccagtgtgcactagatgaagaaggagatgaagacggttacctttctgaaggaattgttcggacagatgaagaggaggaagaagagcaagatgccagttccaatgataacttttctgtgtgtccttctaacagtgtgaatcataactcctacaatcgaaaggaaactaaaaatacgtggaagaacaattgccctttttcggcagatgaaaattatcgtcctttagccaagacaaggcaacagaatatcagcatgcaacggcaagaaaaccttcgttgggtgtcagagctctcttacgtagaagagaaagaacaatggcaagaacaaatcaatcagctaaagaaacagcttgattttagtgtcagtatttgtcagactttgatgcaagaccagcagactctatcttgtctgctacaaactcttctcacgggtccttacagtgttatgcccagcaatgttgcatctcctcaagtacacttcataatgcaccagttgaaccagtgctatactcagctaacatggcaacagaataatgttcagaggttgaaacaaatgctaaatgaacttatgcgccagcaaaatcagcatccagaaaaacctggaggcaaggaaagaggcagtagtgcatcgcaccctccttctcccagtttattttgtcctttcagctttccaacacagcctgtaaatctcttcaatatacctggatttactaacttttcatcatttgcaccaggtatgaatttcagccctttatttccttctaattttggagatttttctcagaatatctctacacccagtgaacagcagcaacccttagcccagaattcttcaggaaaaacagaatatatggcttttccaaaaccttttgaaagcagttcctctattggagcagagaaaccaaggaataaaaaactgcctgaagaggaggtggaaagcagtaggacaccatggttatatgaacaagaaggtgaagtagagaaaccatttatcaagactggattttcagtgtctgtagaaaaatctacaagtagtaaccgcaaaaatcaattagatacaaacggaagaagacgccagtttgatgaagaatcactggaaagctttagcagtatgcctgatccagtagatccaacaacagtgactaaaacattcaagacaagaaaagcgtctgcacaggccagcctggcatctaaagataaaactcccaagtcaaaaagtaagaagaggaattctactcagctgaaaagcagagttaaaaacatcaaaactgggagtgatttttccatgtttgaagctttgcgagatactatttattctgaagtagctacattaatttctcaaaatgaatctcgtccacattttcttattgaactcttccatgagctgcagctactaaacacagactacttgagacagagggctttatatgcattgcaggacatagtatccagacatatttctgagagccatgaaaaaggagaaaatgtaaagtcagtaaactctggtacttggatagcatcaaactcagaacttactcctagtgagagccttgctactactgatgatgaaacttttgagaagaactttgaaagagaaacccataaaataagtgagcaaaatgatgctgataatgctagtgtcctgtctgtatcatcaaattttgagccttttgcaacagatgatctaggtaacaccgtgattcacttagatcaagcattagccagaatgagagaatatgagcgtatgaagactgaggctgaaagtaactcaaatatgagatgcatctgcaggattattgaggatggagatggtgctggtgcagaaactcccgttattgaaaatcgtagttcacaacaacctgtaagtgaagtttctaccatcccatgtcctagaattgatactcagcagctggaccggcaaattaaagcaattatgaaagaagtcattccttttttgaaggagcacatggatgaagtatgctcctcgcagcttctaacttcagtaaggcgcatggttttgacccttacccagcaaaatgatgagagcaaagagtttgtaaagttctttcataaacaacttggaagtatattacaggattcactggcaaaatttgctggcagaaaactgaaagactgtggagaagatcttcttgtagagatatctgaagtgttgttcaatgaattggctttctttaagcttatgcaagatttggataataatagtataactgttaaacagagatgcaaaaggaaaatagaagcaactggagtgatacaatcttgtgccaaagaggctaaaaggattcttgaagatcatggctcacctgctggagagattgatgatgaagacaaagacaaggatgaaactgaaacagttaagcagactcaaacatctgaggtgtatgatggtcccaaaaatgtaagatctgatatttctgatcaagaggaagatgaagaaagtgaaggatgtccagtgtctattaatttgtctaaagctgaaactcaggctttaactaattatggaagtggagaagatgaaaatgaggatgaagaaatggaagaatttgaagaaggccctgtggatgtccagacttccctccaggctaacactgaagctactgaagaaaatgaacatgatgaacaggtcctacaacgtgactttaaaaagacagcagaaagcaaaaatgtcccattggaacgagaagccactagtaaaaatgaccaaaataactgtcctgtgaaaccctgttacctcaatatcttggaagatgagcaacctttaaatagtgctgcccataaggagtcacctcctactgttgattcaactcaacagcctaaccctttgccgttacgtttacctgaaatggaacccttagtgcctagagtcaaagaagttaaatctgctcaggaaactcctgaaagctctctggctggaagtcctgatactgaatctccagtgttagtgaatgactatgaagcagaatctggtaatataagtcaaaagtctgatgaagaagattttgtaaaagttgaagatttaccactgaaactgacaatatattcagaggcagatctaagaaagaaaatggtagaagaagaacagaaaaaccatttatctggtgaaatatgtgaaatgcagaccgaagaattagctggaaattctgagacactaaaagaacctgaaacggtgggagcccagagtatatgagatgtcttcagaggctcatctaactctgtccttacatactcaatgcatatatgaaaacaatactaaataaacatctgatctgtataaaaatg

SEQ ID NO: 450877 - DNA, 3981 bp, Homo sapiens
tgctcttgatgatcccccagactttaccatgtcttcaaaacgatgtggaaacttgaagcagcaacagagagagctaaaacaattgcaggaagaaagaaagaaactgattgacattcaggagaaaattcaagcattgcaaacggcatgccctgacttacagctgtcagctgctagtgtgggtaactgtcccaccaaaaaatatatgccagctgttacttcaaccccaactgttaatcaacacgagaccagtacaagcaaatctgtttttgagcctgaagattcttcaatagtagataatgagttgtggtcagaaatgagaagacatgaaatgttgagggaggagctgcgacagagaagaaagcagcttgaagctctgatggctgaacatcagaggaggcaaggtctagctgaaactgcatctccagtggctgtgtcattgagaagtgatggatctgagaacctatgtactcctcagcaaagtagaacagaaaaaacgatggcaacttggggagggtctacccagtgtgcactagatgaagaaggagatgaagacggttacctttctgaaggaattgttcggacagatgaagaggaggaagaagagcaagatgccagttccaatgataacttttctgtgtgtccttctaacagtgtgaatcataactcctacaatcgaaaggaaactaaaaatacgtggaagaacaattgccctttttcggcagatgaaaattatcgtcctttagccaagacaaggcaacagaatatcagcatgcaacggcaagaaaaccttcgttgggtgtcagagctctcttacgtagaagagaaagaacaatggcaagaacaaatcaatcagctaaagaaacagcttgattttagtgtcagtatttgtcagactttgatgcaagaccagcagactctatcttgtctgctacaaactcttctcacgggtccttacagtgttatgcccagcaatgttgcatctcctcaagtacacttcataatgcaccagttgaaccagtgctatactcagctaacatggcaacagaataatgttcagaggttgaaacaaatgctaaatgaacttatgcgccagcaaaatcagcatccagaaaaacctggaggcaaggaaagaggcagtagtgcatcgcaccctccttctcccagtttattttgtcctttcagctttccaacacagcctgtaaatctcttcaatatacctggatttactaacttttcatcatttgcaccaggtatgaatttcagccctttatttccttctaattttggagatttttctcagaatatctctacacccagtgaacagcagcaacccttagcccagaattcttcaggaaaaacagaatatatggcttttccaaaaccttttgaaagcagttcctctattggagcagagaaaccaaggaataaaaaactgcctgaagaggaggtggaaagcagtaggacaccatggttatatgaacaagaaggtgaagtagagaaaccatttatcaagactggattttcagtgtctgtagaaaaatctacaagtagtaaccgcaaaaatcaattagatacaaacggaagaagacgccagtttgatgaagaatcactggaaagctttagcagtatgcctgatccagtagatccaacaacagtgactaaaacattcaagacaagaaaagcgtctgcacaggccagcctggcatctaaagataaaactcccaagtcaaaaagtaagaagaggaattctactcagctgaaaagcagagttaaaaacatcaggtatgaaagtgccagtatgtctagcacatgtgaaccttgcaaaagtaggaacagacattcagcccagactgaagagcctgttcaagcaaaagtattcagcagaaagaatcatgagcaactggaaaaaataataaaatgtaataggtctacagaaatatcttcagaaactgggagtgatttttccatgtttgaagctttgcgagatactatttattctgaagtagctacattaatttctcaaaatgaatctcgtccacattttcttattgaactcttccatgagctgcagctactaaacacagactacttgagacagagggctttatatgcattgcaggacatagtatccagacatatttctgagagccatgaaaaaggagaaaatgtaaagtcagtaaactctggtacttggatagcatcaaactcagaacttactcctagtgagagccttgctactactgatgatgaaacttttgagaagaactttgaaagagaaacccataaaataagtgagcaaaatgatgctgataatgctagtgtcctgtctgtatcatcaaattttgagccttttgcaacagatgatctaggtaacaccgtgattcacttagatcaagcattagccagaatgagagaatatgagcgtatgaagactgaggctgaaagtaactcaaatatgagatgcatctgcaggattattgaggatggagatggtgctggtgcagaaactcccgttattgaaaatcgtagttcacaacaacctgtaagtgaagtttctaccatcccatgtcctagaattgatactcagcagctggaccggcaaattaaagcaattatgaaagaagtcattccttttttgaaggagcacatggatgaagtatgctcctcgcagcttctaacttcagtaaggcgcatggttttgacccttacccagcaaaatgatgagagcaaagagtttgtaaagttctttcataaacaacttggaagtatattacaggattcactggcaaaatttgctggcagaaaactgaaagactgtggagaagatcttcttgtagagatatctgaagtgttgttcaatgaattggctttctttaagcttatgcaagatttggataataatagtataactgttaaacagagatgcaaaaggaaaatagaagcaactggagtgatacaatcttgtgccaaagaggctaaaaggattcttgaagatcatggctcacctgctggagagattgatgatgaagacaaagacaaggatgaaactgaaacagttaagcagactcaaacatctgaggtgtatgatggtcccaaaaatgtaagatctgatatttctgatcaagaggaagatgaagaaagtgaaggatgtccagtgtctattaatttgtctaaagctgaaactcaggctttaactaattatggaagtggagaagatgaaaatgaggatgaagaaatggaagaatttgaagaaggccctgtggatgtccagacttccctccaggctaacactgaagctactgaagaaaatgaacatgatgaacaggtcctacaacgtgactttaaaaagacagcagaaagcaaaaatgtcccattggaacgagaagccactagtaaaaatgaccaaaataactgtcctgtgaaaccctgttacctcaatatcttggaagatgagcaacctttaaatagtgctgcccataaggagtcacctcctactgttgattcaactcaacagcctaaccctttgccgttacgtttacctgaaatggaacccttagtgcctagagtcaaagaagttaaatctgctcaggaaactcctgaaagctctctggctggaagtcctgatactgaatctccagtgttagtgaatgactatgaagcagaatctggtaatataagtcaaaagtctgatgaagaagattttgtaaaagttgaagatttaccactgaaactgacaatatattcagaggcagatctaagaaagaaaatggtagaagaagaacagaaaaaccatttatctggtgaaatatgtgaaatgcagaccgaagaattagctggaaattctgagacactaaaagaacctgaaacggtgggagcccagagtatatgagatgtcttcagaggctcatctaactctgtccttacatactcaatgcatatatgaaaacaatactaaataaacatctgatctgtataaaaatg

SEQ ID NO: 450878 - DNA, 7648 bp, Homo sapiens
tgccgcttccgcggtcacatgactccagtctagctcgcattgcgctcccgccggcgagttctccccgcgcgccgttgcgaggagacggcgcatgtccgccgcgcttgcccctctgcagtaccccgcccctcttctcccaccacaatgagatgctaagatggcggtggctgcggcggttggcgctgcgtagctgaggtcgaaaaggcggccactggggccgaggcagccaggaaacgtgtgggcctctctgctgcggtctccgagggccgaccgctgccggcggcgggtcgtgggggctgactgtcgctctgcctttgacaggagaggctgcttcttgtagaggaaacagctttgaagtgtggagcgggaaaggagcagtttctgagctgcaaaaactagtttctaaacagagagttaattgttaaatccagtatggccacaggaggaggtccctttgaagatggcatgaatgatcaggatttaccaaactggagtaatgagaatgttgatgacaggctcaacaatatggattggggtgcccaacagaagaaagcaaatagatcatcagaaaagaataagaaaaagtttggtgtagaaagtgataaaagagtaaccaatgatatttctccggagtcgtcaccaggagttggaaggcgaagaacaaagactccacatacgttcccacacagtagatacatgagtcagatgtctgtcccagagcaggcagaattagagaaactgaaacagcggataaacttcagtgatttagatcagagaagcattggaagtgattcccaaggtagagcaacagctgctaacaacaaacgtcagcttagtgaaaaccgaaagcccttcaactttttgcctatgcagattaatactaacaagagcaaagatgcatctacaagtcccccaaacagagaaacgattggatcagcacagtgtaaagagttgtttgcttctgctttaagtaatgacctcttgcaaaactgtcaggtgtctgaagaagatgggaggggagaacctgcaatggagagcagccagattgtaagcaggcttgttcaaattcgcgattatattactaaagctagttccatgcgggaagatcttgtagagaaaaatgagagatctgctaatgttgagcgccttactcatctaatagatcaccttaaagaacaagagaagtcatatatgaaatttcttaaaaaaatccttgccagagatcctcagcaggagcctatggaagagatagaaaatttgaagaaacaacatgatttattaaaaagaatgttacaacagcaggagcaactaagagctctacagggacggcaggctgcacttctagctctgcaacataaagcagagcaagctattgcagtgatggatgattctgttgttgcagaaactgcaggtagcttatctggcgtcagtatcacatctgaactaaatgaagaattgaatgacttaattcagcgttttcataatcagcttcgtgattctcagcctccagctgttccagacaatagaagacaggcagaaagtctttcattaactagggaggtttcccagagcaggaaaccatcagcttcagaacgtttacctgatgagaaagtcgaactttttagcaaaatgagagtgctacaggaaaagaaacaaaaaatggacaaattgcttggagaacttcatacacttcgagatcagcatcttaacaattcatcatcctctccacaaaggagtgtcgatcagagaagtacttcagctccctctgcttctgtaggcttggcaccggttgtcaatggagaatccaatagcctcacatcatctgttccttatcctactgcttctctagtatctcagaatgagagtgaaaacgaaggccacctcaatccatctgaaaaactccagaagttaaatgaagttcgaaagagattgaatgagctaagagaattagttcattattatgaacaaacgtcagacatgatgacagatgctgtgaatgaaaacaggaaagatgaagaaactgaagagtcagaatatgattctgagcatgaaaattccgagcctgttactaacattcgaaatccacaagtagcttccacttggaatgaagtaaatagtcatagtaatgcacagtgtgtttctaataatagagatgggcgaacagttaattctaattgtgaaattaacaacagatctgctgccaacataagggctctaaacgtgcctccttctttagattgtcgatataatagagaaggggaacaggagattcatgttgcacaaggtgaagatgatgaggaggaggaggaagaagcagaagaggagggagtcagtggagcttcattatctagtcacaggagcagtctggttgatgagcatccagaagatgctgaatttgaacagaagatcaaccgacttatggctgcaaaacagaaacttagacagttacaagatcttgttgctatggtacaggatgatgatgcagctcaaggagttatctctgccagtgcatcaaatttggatgatttctacccagcagaagaagacaccaagcaaaattcaaataacactagaggaaatgccaataaaacacagaaagatactggagtaaatgaaaaggcaagagagaaattttatgaggctaaactacagcagcaacagagagagctaaaacaattgcaggaagaaagaaagaaactgattgacattcaggagaaaattcaagcattgcaaacggcatgccctgacttacagctgtcagctgctagtgtgggtaactgtcccaccaaaaaatatatgccagctgttacttcaaccccaactgttaatcaacacgagaccagtacaagcaaatctgtttttgagcctgaagattcttcaatagtagataatgagttgtggtcagaaatgagaagacatgaaatgttgagggaggagctgcgacagagaagaaagcagcttgaagctctgatggctgaacatcagaggaggcaaggtctagctgaaactgcatctccagtggctgtgtcattgagaagtgatggatctgagaacctatgtactcctcagcaaagtagaacagaaaaaacgatggcaacttggggagggtctacccagtgtgcactagatgaagaaggagatgaagacggttacctttctgaaggaattgttcggacagatgaagaggaggaagaagagcaagatgccagttccaatgataacttttctgtgtgtccttctaacagtgtgaatcataactcctacaatcgaaaggaaactaaaaatacgtggaagaacaattgccctttttcggcagatgaaaattatcgtcctttagccaagacaaggcaacagaatatcagcatgcaacggcaagaaaaccttcgttgggtgtcagagctctcttacgtagaagagaaagaacaatggcaagaacaaatcaatcagctaaagaaacagcttgattttagtgtcagtatttgtcagactttgatgcaagaccagcagactctatcttgtctgctacaaactcttctcacgggtccttacagtgttatgcccagcaatgttgcatctcctcaagtacacttcataatgcaccagttgaaccagtgctatactcagctaacatggcaacagaataatgttcagaggttgaaacaaatgctaaatgaacttatgcgccagcaaaatcagcatccagaaaaacctggaggcaaggaaagaggcagtagtgcatcgcaccctccttctcccagtttattttgtcctttcagctttccaacacagcctgtaaatctcttcaatatacctggatttactaacttttcatcatttgcaccaggtatgaatttcagccctttatttccttctaattttggagatttttctcagaatatctctacacccagtgaacagcagcaacccttagcccagaattcttcaggaaaaacagaatatatggcttttccaaaaccttttgaaagcagttcctctattggagcagagaaaccaaggaataaaaaactgcctgaagaggaggtggaaagcagtaggacaccatggttatatgaacaagaaggtgaagtagagaaaccatttatcaagactggattttcagtgtctgtagaaaaatctacaagtagtaaccgcaaaaatcaattagatacaaacggaagaagacgccagtttgatgaagaatcactggaaagctttagcagtatgcctgatccagtagatccaacaacagtgactaaaacattcaagacaagaaaagcgtctgcacaggccagcctggcatctaaagataaaactcccaagtcaaaaagtaagaagaggaattctactcagctgaaaagcagagttaaaaacatcaggtatgaaagtgccagtatgtctagcacatgtgaaccttgcaaaagtaggaacagacattcagcccagactgaagagcctgttcaagcaaaagtattcagcagaaagaatcatgagcaactggaaaaaataataaaatgtaataggtctacagaaatatcttcagaaactgggagtgatttttccatgtttgaagctttgcgagatactatttattctgaagtagctacattaatttctcaaaatgaatctcgtccacattttcttattgaactcttccatgagctgcagctactaaacacagactacttgagacagagggctttatatgcattgcaggacatagtatccagacatatttctgagagccatgaaaaaggagaaaatgtaaagtcagtaaactctggtacttggatagcatcaaactcagaacttactcctagtgagagccttgctactactgatgatgaaacttttgagaagaactttgaaagagaaacccataaaataagtgagcaaaatgatgctgataatgctagtgtcctgtctgtatcatcaaattttgagccttttgcaacagatgatctaggtaacaccgtgattcacttagatcaagcattagccagaatgagagaatatgagcgtatgaagactgaggctgaaagtaactcaaatatgagatgcatctgcaggattattgaggatggagatggtgctggtgcagaaactcccgttattgaaaatcgtagttcacaacaacctgtaagtgaagtttctaccatcccatgtcctagaattgatactcagcagctggaccggcaaattaaagcaattatgaaagaagtcattccttttttgaaggagcacatggatgaagtatgctcctcgcagcttctaacttcagtaaggcgcatggttttgacccttacccagcaaaatgatgagagcaaagagtttgtaaagttctttcataaacaacttggaagtatattacaggattcactggcaaaatttgctggcagaaaactgaaagactgtggagaagatcttcttgtagagatatctgaagtgttgttcaatgaattggctttctttaagcttatgcaagatttggataataatagtataactgttaaacagagatgcaaaaggaaaatagaagcaactggagtgatacaatcttgtgccaaagaggctaaaaggattcttgaagatcatggctcacctgctggagagattgatgatgaagacaaagacaaggatgaaactgaaacagttaagcagactcaaacatctgaggtgtatgatggtcccaaaaatgtaagatctgatatttctgatcaagaggaagatgaagaaagtgaaggatgtccagtgtctattaatttgtctaaagctgaaactcaggctttaactaattatggaagtggagaagatgaaaatgaggatgaagaaatggaagaatttgaagaaggccctgtggatgtccagacttccctccaggctaacactgaagctactgaagaaaatgaacatgatgaacaggaagcagaatctggtaatataagtcaaaagtctgatgaagaagattttgtaaaagttgaagatttaccactgaaactgacaatatattcagaggcagatctaagaaagaaaatggtagaagaagaacagaaaaaccatttatctggtgaaatatgtgaaatgcagaccgaagaattagctggaaattctgagacactaaaagaacctgaaacggtgggagcccagagtatatgagatgtcttcagaggctcatctaactctgtccttacatactcaatgcatatatgaaaacaatactaaataaacatctgatctgtataaaaatgtaaattagtttgacactgcttttttgataggtgtggtcatttctccccatggtagtttaaaacatcagaaactgaattctggacagatttaagccttgacacactgtgttttttttttttttcccccttcttttttgggtcttgatttttttccccattgtgatgtttggtaacgaatttaaaatgtagttttaaataaagtttggacttatctataaagtatcttttttggaaattatattgaattctatacagcaagtcaatgttttatataactttaggctgctcagagaagagcaatggttaagagttagttagagaaatatattatttgttataaagcccatccattaggccagtcttccaactaatgccagtgttgctgctgttgggtctgatgttcttcttttagatacctgcaggtcctattcctgtgcaagaatagggcagattatcaagatatccaggatacctatgaagttattatagaatatttattaatccattgaaattggataataagtttagaacataggttctcagtatctagaacttacatcattatctgtttgttaggatttgaaattctggaaaatatttatctacatcgcctcagactaaaagtaaaaaaaataagctttctataattagggagatttctgcacagagaagtaacattgtggttaattttaaatgaaaaacttaactttttcaagtggggataaataatacaactaaatttctgtaatagtaagattctatatgccttcagataaacttgcctattgagatggtaatttaaagccaaagcatagcagtttcttttgtgtgtagtgaggttgaagcagatttgcagggtgaagtattgaaagtttatgtgactttaagtcagcttttgaaaagtgatttgctttttatcccaaactgtccatatacccagtaaggcttcaaaaaaccagtcaacaatgagtaagtcaatcttatagattcttcttcctcgaataaaatacaaagaattagttccaataagtattttaactttgttaacaactgaaataccccataaaaaaagaactcgttgagagtatttctttaaaatggttacttgctgcccaggcaccatggctcactcctgtaatcccagcaccttgggaggccgaggcgggcagatcacgaggtcaagagattgagaccatcctgcccaacatgggggaaaccccgtctctactaaaaataaaaaaattagctgggagaggtggcacgtgcctgtagtcctagctacttgggaggctaaggcaggagaatagcctgaacccgggaggtggaggttgcaggttgcagtgagccgagatcatgccactgcactccagcctggcaacagagcgagactctgtctcaaaaaa

SEQ ID NO: 450879 - DNA, 6288 bp, Homo sapiens
tgccgcttccgcggtcacatgactccagtctagctcgcattgcgctcccgccggcgagttctccccgcgcgccgttgcgaggagacggcgcatgtccgccgcgcttgcccctctgcagtaccccgcccctcttctcccaccacaatgagatgctaagatggcggtggctgcggcggttggcgctgcgtagctgaggtcgaaaaggcggccactggggccgaggcagccaggaaacgtgtgggcctctctgctgcggtctccgagggccgaccgctgccggcggcgggtcgtgggggctgactgtcgctctgcctttgacaggagaggctgcttcttgtagaggaaacagctttgaagtgtggagcgggaaaggagcagtttctgagctgcaaaaactagtttctaaacagagagttaattgttaaatccagtatggccacaggaggaggtccctttgaagatggcatgaatgatcaggatttaccaaactggagtaatgagaatgttgatgacaggctcaacaatatggattggggtgcccaacagaagaaagcaaatagatcatcagaaaagaataagaaaaagtttggtgtagaaagtgataaaagagtaaccaatgatatttctccggagtcgtcaccaggagttggaaggcgaagaacaaagactccacatacgttcccacacagtagatacatgagtcagatgtctgtcccagagcaggcagaattagagaaactgaaacagcggataaacttcagtgatttagatcagagaagcattggaagtgattcccaaggtagagcaacagctgctaacaacaaacgtcagcttagtgaaaaccgaaagcccttcaactttttgcctatgcagattaatactaacaagagcaaagatgcatctacaagtcccccaaacagagaaacgattggatcagcacagtgtaaagagttgtttgcttctgctttaagtaatgacctcttgcaaaactgtcaggtgtctgaagaagatgggaggggagaacctgcaatggagagcagccagattgtaagcaggcttgttcaaattcgcgattatattactaaagctagttccatgcgggaagatcttgtagagaaaaatgagagatctgctaatgttgagcgccttactcatctaatagatcaccttaaagaacaagagaagtcatatatgaaatttcttaaaaaaatccttgccagagatcctcagcaggagcctatggaagagatagaaaatttgaagaaacaacatgatttattaaaaagaatgttacaacagcaggagcaactaagagctctacagggacggcaggctgcacttctagctctgcaacataaagcagagcaagctattgcagtgatggatgattctgttgttgcagaaactgcaggtagcttatctggcgtcagtatcacatctgaactaaatgaagaattgaatgacttaattcagcgttttcataatcagcttcgtgattctcagcctccagctgttccagacaatagaagacaggcagaaagtctttcattaactagggaggtttcccagagcaggaaaccatcagcttcagaacgtttacctgatgagaaagtcgaactttttagcaaaatgagagtgctacaggaaaagaaacaaaaaatggacaaattgcttggagaacttcatacacttcgagatcagcatcttaacaattcatcatcctctccacaaaggagtgtcgatcagagaagtacttcagctccctctgcttctgtaggcttggcaccggttgtcaatggagaatccaatagcctcacatcatctgttccttatcctactgcttctctagtatctcagaatgagagtgaaaacgaaggccacctcaatccatctgaaaaactccagaagttaaatgaagttcgaaagagattgaatgagctaagagaattagttcattattatgaacaaacgtcagacatgatgacagatgctgtgaatgaaaacaggaaagatgaagaaactgaagagtcagaatatgattctgagcatgaaaattccgagcctgttactaacattcgaaatccacaagtagcttccacttggaatgaagtaaatagtcatagtaatgcacagtgtgtttctaataatagagatgggcgaacagttaattctaattgtgaaattaacaacagatctgctgccaacataagggctctaaacgtgcctccttctttagattgtcgatataatagagaaggggaacaggagattcatgttgcacaaggtgaagatgatgaggaggaggaggaagaagcagaagaggagggagtcagtggagcttcattatctagtcacaggagcagtctggttgatgagcatccagaagatgctgaatttgaacagaagatcaaccgacttatggctgcaaaacagaaacttagacagttacaagatcttgttgctatggtacaggatgatgatgcagctcaaggagttatctctgccagtgcatcaaatttggatgatttctacccagcagaagaagacaccaagcaaaattcaaataacactagaggaaatgccaataaaacacagaaagatactggagtaaatgaaaaggcaagagagaaattttatgaggctaaactacagcagcaacagagagagctaaaacaattgcaggaagaaagaaagaaactgattgacattcaggagaaaattcaagcattgcaaacggcatgccctgacttacagctgtcagctgctagtgtgggtaactgtcccaccaaaaaatatatgccagctgttacttcaaccccaactgttaatcaacacgagaccagtacaagcaaatctgtttttgagcctgaagattcttcaatagtagataatgagttgtggtcagaaatgagaagacatgaaatgttgagggaggagctgcgacagagaagaaagcagcttgaagctctgatggctgaacatcagaggaggcaaggtctagctgaaactgcatctccagtggctgtgtcattgagaagtgatggatctgagaacctatgtactcctcagcaaagtagaacagaaaaaacgatggcaacttggggagggtctacccagtgtgcactagatgaagaaggagatgaagacggttacctttctgaaggaattgttcggacagatgaagaggaggaagaagagcaagatgccagttccaatgataacttttctgtgtgtccttctaacagtgtgaatcataactcctacaatcgaaaggaaactaaaaatacgtggaagaacaattgccctttttcggcagatgaaaattatcgtcctttagccaagacaaggcaacagaatatcagcatgcaacggcaagaaaaccttcgttgggtgtcagagctctcttacgtagaagagaaagaacaatggcaagaacaaatcaatcagctaaagaaacagcttgattttagtgtcagtatttgtcagactttgatgcaagaccagcagactctatcttgtctgctacaaactcttctcacgggtccttacagtgttatgcccagcaatgttgcatctcctcaagtacacttcataatgcaccagttgaaccagtgctatactcagctaacatggcaacagaataatgttcagaggttgaaacaaatgctaaatgaacttatgcgccagcaaaatcagcatccagaaaaacctggaggcaaggaaagaggcagtagtgcatcgcaccctccttctcccagtttattttgtcctttcagctttccaacacagcctgtaaatctcttcaatatacctggatttactaacttttcatcatttgcaccaggtatgaatttcagccctttatttccttctaattttggagatttttctcagaatatctctacacccagtgaacagcagcaacccttagcccagaattcttcaggaaaaacagaatatatggcttttccaaaaccttttgaaagcagttcctctattggagcagagaaaccaaggaataaaaaactgcctgaagaggaggtggaaagcagtaggacaccatggttatatgaacaagaaggtgaagtagagaaaccatttatcaagactggattttcagtgtctgtagaaaaatctacaagtagtaaccgcaaaaatcaattagatacaaacggaagaagacgccagtttgatgaagaatcactggaaagctttagcagtatgcctgatccagtagatccaacaacagtgactaaaacattcaagacaagaaaagcgtctgcacaggccagcctggcatctaaagataaaactcccaagtcaaaaagtaagaagaggaattctactcagctgaaaagcagagttaaaaacatcaggtatgaaagtgccagtatgtctagcacatgtgaaccttgcaaaagtaggaacagacattcagcccagactgaagagcctgttcaagcaaaagtattcagcagaaagaatcatgagcaactggaaaaaataataaaatgtaataggtctacagaaatatcttcagaaactgggagtgatttttccatgtttgaagctttgcgagatactatttattctgaagtagctacattaatttctcaaaatgaatctcgtccacattttcttattgaactcttccatgagctgcagctactaaacacagactacttgagacagagggctttatatgcattgcaggacatagtatccagacatatttctgagagccatgaaaaaggagaaaatgtaaagtcagtaaactctggtacttggatagcatcaaactcagaacttactcctagtgagagccttgctactactgatgatgaaacttttgagaagaactttgaaagagaaacccataaaataagtgagcaaaatgatgctgataatgctagtgtcctgtctgtatcatcaaattttgagccttttgcaacagatgatctaggtaacaccgtgattcacttagatcaagcattagccagaatgagagaatatgagcgtatgaagactgaggctgaaagtaactcaaatatgagatgcatctgcaggattattgaggatggagatggtgctggtgcagaaactcccgttattgaaaatcgtagttcacaacaacctgtaagtgaagtttctaccatcccatgtcctagaattgatactcagcagctggaccggcaaattaaagcaattatgaaagaagtcattccttttttgaaggagcacatggatgaagtatgctcctcgcagcttctaacttcagtaaggcgcatggttttgacccttacccagcaaaatgatgagagcaaagagtttgtaaagttctttcataaacaacttggaagtatattacaggattcactggcaaaatttgctggcagaaaactgaaagactgtggagaagatcttcttgtagagatatctgaagtgttgttcaatgaattggctttctttaagcttatgcaagatttggataataatagtataactgttaaacagagatgcaaaaggaaaatagaagcaactggagtgatacaatcttgtgccaaagaggctaaaaggattcttgaagatcatggctcacctgctggagagattgatgatgaagacaaagacaaggatgaaactgaaacagttaagcagactcaaacatctgaggtgtatgatggtcccaaaaatgtaagatctgatatttctgatcaagaggaagatgaagaaagtgaaggatgtccagtgtctattaatttgtctaaagctgaaactcaggctttaactaattatggaagtggagaagatgaaaatgaggatgaagaaatggaagaatttgaagaaggccctgtggatgtccagacttccctccaggctaacactgaagctactgaagaaaatgaacatgatgaacaggtcctacaacgtgactttaaaaagacagcagaaagcaaaaatgtcccattggaacgagaagccactagtaaaaatgaccaaaataactgtcctgtgaaaccctgttacctcaatatcttggaagatgagcaacctttaaatagtgctgcccataaggagtcacctcctactgttgattcaactcaacagcctaaccctttgccgttacgtttacctgaaatggaacccttagtgcctagagtcaaagaagttaaatctgctcaggaaactcctgaaagctctctggctggaagtcctgatactgaatctccagtgttagtgaatgactatgtatgtatcatttacatttccaaatatttttacttttca

SEQ ID NO: 450880 - DNA, 6301 bp, Homo sapiens
tgccgcttccgcggtcacatgactccagtctagctcgcattgcgctcccgccggcgagttctccccgcgcgccgttgcgaggagacggcgcatgtccgccgcgcttgcccctctgcagtaccccgcccctcttctcccaccacaatgagatgctaagatggcggtggctgcggcggttggcgctgcgtagctgaggtcgaaaaggcggccactggggccgaggcagccaggaaacgtgtgggcctctctgctgcggtctccgagggccgaccgctgccggcggcgggtcgtgggggctgactgtcgctctgcctttgacaggagaggctgcttcttgtagaggaaacagctttgaagtgtggagcgggaaaggagcagtttctgagctgcaaaaactagtttctaaacagagagttaattgttaaatccagtatggccacaggaggaggtccctttgaagatggcatgaatgatcaggatttaccaaactggagtaatgagaatgttgatgacaggctcaacaatatggattggggtgcccaacagaagaaagcaaatagatcatcagaaaagaataagaaaaagtttggtgtagaaagtgataaaagagtaaccaatgatatttctccggagtcgtcaccaggagttggaaggcgaagaacaaagactccacatacgttcccacacagtagatacatgagtcagatgtctgtcccagagcaggcagaattagagaaactgaaacagcggataaacttcagtgatttagatcagagaagcattggaagtgattcccaaggtagagcaacagctgctaacaacaaacgtcagcttagtgaaaaccgaaagcccttcaactttttgcctatgcagattaatactaacaagagcaaagatgcatctacaagtcccccaaacagagaaacgattggatcagcacagtgtaaagagttgtttgcttctgctttaagtaatgacctcttgcaaaactgtcaggtgtctgaagaagatgggaggggagaacctgcaatggagagcagccagattgtaagcaggcttgttcaaattcgcgattatattactaaagctagttccatgcgggaagatcttgtagagaaaaatgagagatctgctaatgttgagcgccttactcatctaatagatcaccttaaagaacaagagaagtcatatatgaaatttcttaaaaaaatccttgccagagatcctcagcaggagcctatggaagagatagaaaatttgaagaaacaacatgatttattaaaaagaatgttacaacagcaggagcaactaagagctctacagggacggcaggctgcacttctagctctgcaacataaagcagagcaagctattgcagtgatggatgattctgttgttgcagaaactgcaggtagcttatctggcgtcagtatcacatctgaactaaatgaagaattgaatgacttaattcagcgttttcataatcagcttcgtgattctcagcctccagctgttccagacaatagaagacaggcagaaagtctttcattaactagggaggtttcccagagcaggaaaccatcagcttcagaacgtttacctgatgagaaagtcgaactttttagcaaaatgagagtgctacaggaaaagaaacaaaaaatggacaaattgcttggagaacttcatacacttcgagatcagcatcttaacaattcatcatcctctccacaaaggagtgtcgatcagagaagtacttcagctccctctgcttctgtaggcttggcaccggttgtcaatggagaatccaatagcctcacatcatctgttccttatcctactgcttctctagtatctcagaatgagagtgaaaacgaaggccacctcaatccatctgaaaaactccagaagttaaatgaagttcgaaagagattgaatgagctaagagaattagttcattattatgaacaaacgtcagacatgatgacagatgctgtgaatgaaaacaggaaagatgaagaaactgaagagtcagaatatgattctgagcatgaaaattccgagcctgttactaacattcgaaatccacaagtagcttccacttggaatgaagtaaatagtcatagtaatgcacagtgtgtttctaataatagagatgggcgaacagttaattctaattgtgaaattaacaacagatctgctgccaacataagggctctaaacgtgcctccttctttagattgtcgatataatagagaaggggaacaggagattcatgttgcacaaggtgaagatgatgaggaggaggaggaagaagcagaagaggagggagtcagtggagcttcattatctagtcacaggagcagtctggttgatgagcatccagaagatgctgaatttgaacagaagatcaaccgacttatggctgcaaaacagaaacttagacagttacaagatcttgttgctatggtacaggatgatgatgcagctcaaggagttatctctgccagtgcatcaaatttggatgatttctacccagcagaagaagacaccaagcaaaattcaaataacactagaggaaatgccaataaaacacagaaagatactggagtaaatgaaaaggcaagagagaaattttatgaggctaaactacagcagcaacagagagagctaaaacaattgcaggaagaaagaaagaaactgattgacattcaggagaaaattcaagcattgcaaacggcatgccctgacttacagctgtcagctgctagtgtgggtaactgtcccaccaaaaaatatatgccagctgttacttcaaccccaactgttaatcaacacgagaccagtacaagcaaatctgtttttgagcctgaagattcttcaatagtagataatgagttgtggtcagaaatgagaagacatgaaatgttgagggaggagctgcgacagagaagaaagcagcttgaagctctgatggctgaacatcagaggaggcaaggtctagctgaaactgcatctccagtggctgtgtcattgagaagtgatggatctgagaacctatgtactcctcagcaaagtagaacagaaaaaacgatggcaacttggggagggtctacccagtgtgcactagatgaagaaggagatgaagacggttacctttctgaaggaattgttcggacagatgaagaggaggaagaagagcaagatgccagttccaatgataacttttctgtgtgtccttctaacagtgtgaatcataactcctacaatcgaaaggaaactaaaaatacgtggaagaacaattgccctttttcggcagatgaaaattatcgtcctttagccaagacaaggcaacagaatatcagcatgcaacggcaagaaaaccttcgttgggtgtcagagctctcttacgtagaagagaaagaacaatggcaagaacaaatcaatcagctaaagaaacagcttgattttagtgtcagtatttgtcagactttgatgcaagaccagcagactctatcttgtctgctacaaactcttctcacgggtccttacagtgttatgcccagcaatgttgcatctcctcaagtacacttcataatgcaccagttgaaccagtgctatactcagctaacatggcaacagaataatgttcagaggttgaaacaaatgctaaatgaacttatgcgccagcaaaatcagcatccagaaaaacctggaggcaaggaaagaggcagtagtgcatcgcaccctccttctcccagtttattttgtcctttcagctttccaacacagcctgtaaatctcttcaatatacctggatttactaacttttcatcatttgcaccaggtatgaatttcagccctttatttccttctaattttggagatttttctcagaatatctctacacccagtgaacagcagcaacccttagcccagaattcttcaggaaaaacagaatatatggcttttccaaaaccttttgaaagcagttcctctattggagcagagaaaccaaggaataaaaaactgcctgaagaggaggtggaaagcagtaggacaccatggttatatgaacaagaaggtgaagtagagaaaccatttatcaagactggattttcagtgtctgtagaaaaatctacaagtagtaaccgcaaaaatcaattagatacaaacggaagaagacgccagtttgatgaagaatcactggaaagctttagcagtatgcctgatccagtagatccaacaacagtgactaaaacattcaagacaagaaaagcgtctgcacaggccagcctggcatctaaagataaaactcccaagtcaaaaagtaagaagaggaattctactcagctgaaaagcagagttaaaaacatcaggtatgaaagtgccagtatgtctagcacatgtgaaccttgcaaaagtaggaacagacattcagcccagactgaagagcctgttcaagcaaaagtattcagcagaaagaatcatgagcaactggaaaaaataataaaatgtaataggtctacagaaatatcttcagaaactgggagtgatttttccatgtttgaagctttgcgagatactatttattctgaagtagctacattaatttctcaaaatgaatctcgtccacattttcttattgaactcttccatgagctgcagctactaaacacagactacttgagacagagggctttatatgcattgcaggacatagtatccagacatatttctgagagccatgaaaaaggagaaaatgtaaagtcagtaaactctggtacttggatagcatcaaactcagaacttactcctagtgagagccttgctactactgatgatgaaacttttgagaagaactttgaaagagaaacccataaaataagtgagcaaaatgatgctgataatgctagtgtcctgtctgtatcatcaaattttgagccttttgcaacagatgatctaggtaacaccgtgattcacttagatcaagcattagccagaatgagagaatatgagcgtatgaagactgaggctgaaagtaactcaaatatgagatgcatctgcaggattattgaggatggagatggtgctggtgcagaaactcccgttattgaaaatcgtagttcacaacaacctgtaagtgaagtttctaccatcccatgtcctagaattgatactcagcagctggaccggcaaattaaagcaattatgaaagaagtcattccttttttgaaggagcacatggatgaagtatgctcctcgcagcttctaacttcagtaaggcgcatggttttgacccttacccagcaaaatgatgagagcaaagagtttgtaaagttctttcataaacaacttggaagtatattacaggattcactggcaaaatttgctggcagaaaactgaaagactgtggagaagatcttcttgtagagatatctgaagtgttgttcaatgaattggctttctttaagcttatgcaagatttggataataatagtataactgttaaacagagatgcaaaaggaaaatagaagcaactggagtgatacaatcttgtgccaaagaggctaaaaggattcttgaagatcatggctcacctgctggagagattgatgatgaagacaaagacaaggatgaaactgaaacagttaagcagactcaaacatctgaggtgtatgatggtcccaaaaatgtaagatctgatatttctgatcaagaggaagatgaagaaagtgaaggatgtccagtgtctattaatttgtctaaagctgaaactcaggctttaactaattatggaagtggagaagatgaaaatgaggatgaagaaatggaagaatttgaagaaggccctgtggatgtccagacttccctccaggctaacactgaagctactgaagaaaatgaacatgatgaacaggtcctacaacgtgactttaaaaagacagcagaaagcaaaaatgtcccattggaacgagaagccactagtaaaaatgaccaaaataactgtcctgtgaaaccctgttacctcaatatcttggaagatgagcaacctttaaatagtgctgcccataaggagtcacctcctactgttgattcaactcaacagcctaaccctttgccgttacgtttacctgaaatggaacccttagtgcctagagtcaaagaagttaaatctgctcaggaaactcctgaaagctctctggctggaagtcctgatactgaatctccagtgttagtgaatgactataagcagaatctggtaatataagtcaaaagttccgttgagccgtcggggtccg

SEQ ID NO: 450881 - DNA, 5293 bp, Homo sapiens
tgccgcttccgcggtcacatgactccagtctagctcgcattgcgctcccgccggcgagttctccccgcgcgccgttgcgaggagacggcgcatgtccgccgcgcttgcccctctgcagtaccccgcccctcttctcccaccacaatgagatgctaagatggcggtggctgcggcggttggcgctgcgtagctgaggtcgaaaaggcggccactggggccgaggcagccaggaaacgtgtgggcctctctgctgcggtctccgagggccgaccgctgccggcggcgggtcgtgggggctgactgtcgctctgcctttgacaggagaggctgcttcttgtagaggaaacagctttgaagtgtggagcgggaaaggagcagtttctgagctgcaaaaactagtttctaaacagagagttaattgttaaatccagtatggccacaggaggaggtccctttgaagatggcatgaatgatcaggatttaccaaactggagtaatgagaatgttgatgacaggctcaacaatatggattggggtgcccaacagaagaaagcaaatagatcatcagaaaagaataagaaaaagtttggtgtagaaagtgataaaagagtaaccaatgatatttctccggagtcgtcaccaggagttggaaggcgaagaacaaagactccacatacgttcccacacagtagatacatgagtcagatgtctgtcccagagcaggcagaattagagaaactgaaacagcggataaacttcagtgatttagatcagagaagcattggaagtgattcccaaggtagagcaacagctgctaacaacaaacgtcagcttagtgaaaaccgaaagcccttcaactttttgcctatgcagattaatactaacaagagcaaagatgcatctacaagtcccccaaacagagaaacgattggatcagcacagtgtaaagagttgtttgcttctgctttaagtaatgacctcttgcaaaactgtcaggtgtctgaagaagatgggaggggagaacctgcaatggagagcagccagattgtaagcaggcttgttcaaattcgcgattatattactaaagctagttccatgcgggaagatcttgtagagaaaaatgagagatctgctaatgttgagcgccttactcatctaatagatcaccttaaagaacaagagaagtcatatatgaaatttcttaaaaaaatccttgccagagatcctcagcaggagcctatggaagagatagaaaatttgaagaaacaacatgatttattaaaaagaatgttacaacagcaggagcaactaagagctctacagggacggcaggctgcacttctagctctgcaacataaagcagagcaagctattgcagtgatggatgattctgttgttgcagaaactgcaggtagcttatctggcgtcagtatcacatctgaactaaatgaagaattgaatgacttaattcagcgttttcataatcagcttcgtgattctcagcctccagctgttccagacaatagaagacaggcagaaagtctttcattaactagggaggtttcccagagcaggaaaccatcagcttcagaacgtttacctgatgagaaagtcgaactttttagcaaaatgagagtgctacaggaaaagaaacaaaaaatggacaaattgcttggagaacttcatacacttcgagatcagcatcttaacaattcatcatcctctccacaaaggagtgtcgatcagagaagtacttcagctccctctgcttctgtaggcttggcaccggttgtcaatggagaatccaatagcctcacatcatctgttccttatcctactgcttctctagtatctcagaatgagagtgaaaacgaaggccacctcaatccatctgaaaaactccagaagttaaatgaagttcgaaagagattgaatgagctaagagaattagttcattattatgaacaaacgtcagacatgatgacagatgctgtgaatgaaaacaggaaagatgaagaaactgaagagtcagaatatgattctgagcatgaaaattccgagcctgttactaacattcgaaatccacaagtagcttccacttggaatgaagtaaatagtcatagtaatgcacagtgtgtttctaataatagagatgggcgaacagttaattctaattgtgaaattaacaacagatctgctgccaacataagggctctaaacgtgcctccttctttagattgtcgatataatagagaaggggaacaggagattcatgttgcacaaggtgaagatgatgaggaggaggaggaagaagcagaagaggagggagtcagtggagcttcattatctagtcacaggagcagtctggttgatgagcatccagaagatgctgaatttgaacagaagatcaaccgacttatggctgcaaaacagaaacttagacagttacaagatcttgttgctatggtacaggatgatgatgcagctcaaggagttatctctgccagtgcatcaaatttggatgatttctacccagcagaagaagacaccaagcaaaattcaaataacactagaggaaatgccaataaaacacagaaagatactggagtaaatgaaaaggcaagagagaaattttatgaggctaaactacagcagcaacagagagagctaaaacaattgcaggaagaaagaaagaaactgattgacattcaggagaaaattcaagcattgcaaacggcatgccctgacttacagctgtcagctgctagtgtgggtaactgtcccaccaaaaaatatatgccagctgttacttcaaccccaactgttaatcaacacgagaccagtacaagcaaatctgtttttgagcctgaagattcttcaatagtagataatgagttgtggtcagaaatgagaagacatgaaatgttgagggaggagctgcgacagagaagaaagcagcttgaagctctgatggctgaacatcagaggaggcaaggtctagctgaaactgcatctccagtggctgtgtcattgagaagtgatggatctgagaacctatgtactcctcagcaaagtagaacagaaaaaacgatggcaacttggggagggtctacccagtgtgcactagatgaagaaggagatgaagacggttacctttctgaaggaattgttcggacagatgaagaggaggaagaagagcaagatgccagttccaatgataacttttctgtgtgtccttctaacagtgtgaatcataactcctacaatcgaaaggaaactaaaaatacgtggaagaacaattgccctttttcggcagatgaaaattatcgtcctttagccaagacaaggcaacagaatatcagcatgcaacggcaagaaaaccttcgttgggtgtcagagctctcttacgtagaagagaaagaacaatggcaagaacaaatcaatcagctaaagaaacagcttgattttagtgtcagtatttgtcagactttgatgcaagaccagcagactctatcttgtctgctacaaactcttctcacgggtccttacagtgttatgcccagcaatgttgcatctcctcaagtacacttcataatgcaccagttgaaccagtgctatactcagctaacatggcaacagaataatgttcagaggttgaaacaaatgctaaatgaacttatgcgccagcaaaatcagcatccagaaaaacctggaggcaaggaaagaggcagtagtgcatcgcaccctccttctcccagtttattttgtcctttcagctttccaacacagcctgtaaatctcttcaatatacctggatttactaacttttcatcatttgcaccaggtatgaatttcagccctttatttccttctaattttggagatttttctcagaatatctctacacccagtgaacagcagcaacccttagcccagaattcttcaggaaaaacagaatatatggcttttccaaaaccttttgaaagcagttcctctattggagcagagaaaccaaggaataaaaaactgcctgaagaggaggtggaaagcagtaggacaccatggttatatgaacaagaaggtgaagtagagaaaccatttatcaagactggattttcagtgtctgtagaaaaatctacaagtagtaaccgcaaaaatcaattagatacaaacggaagaagacgccagtttgatgaagaatcactggaaagctttagcagtatgcctgatccagtagatccaacaacagtgactaaaacattcaagacaagaaaagcgtctgcacaggccagcctggcatctaaagataaaactcccaagtcaaaaagtaagaagaggaattctactcagctgaaaagcagagttaaaaacatcaggtatgaaagtgccagtatgtctagcacatgtgaaccttgcaaaagtaggaacagacattcagcccagactgaagagcctgttcaagcaaaagtattcagcagaaagaatcatgagcaactggaaaaaataataaaatgtaataggtctacagaaatatcttcagcacatgctaggagaatactacagcagtctaacagaaatgcatgcaatgaagcgccagaaactgggagtgatttttccatgtttgaagctttgcgagatactatttattctgaagtagctacattaatttctcaaaatgaatctcgtccacattttcttattgaactcttccatgagctgcagctactaaacacagactacttgagacagagggctttatatgcattgcaggacatagtatccagacatatttctgagagccatgaaaaaggagaaaatgtaaagtcagtaaactctggtacttggatagcatcaaactcagaacttactcctagtgagagccttgctactactgatgatgtaagctgataatgattagtgaattgtagatataattttagtatgcagtaaataaaagttaaatagattattgtcaaattgtaggtagacctaatatatttgattttcagctttttttaaaacttgggtataatgtgttattttattttgagggcgagatataatatgcaatcaaaatatggtagcaaacaccaaaaattatgtatgtatgatagattatgaggtctgagatagccatatttatgttgttattacccagtataggggctgactcttaaaagacatttacaaatgtatgttgtatttatttaagacattcagtaaaacaggtatcagattacagtaaaaacacttgaatgaataaatacaggataaatcaggtctttgggttaaa

SEQ ID NO: 450882 - DNA, 1365 bp, Homo sapiens
tgccgcttccgcggtcacatgactccagtctagctcgcattgcgctcccgccggcgagttctccccgcgcgccgttgcgaggagacggcgcatgtccgccgcgcttgcccctctgcagtaccccgcccctcttctcccaccacaatgagatgctaagatggcggtggctgcggcggttggcgctgcgtagctgaggtcgaaaaggcggccactggggccgaggcagccaggaaacgtgtgggcctctctgctgcggtctccgagggccgaccgctgccggcggcgggtcgtgggggctgactgtcgctctgcctttgacaggagaggctgcttcttgtagaggaaacagctttgaagtgtggagcgggaaaggagcagtttctgagctgcaaaaactagtttctaaacagagagttaattgttaaatccagtatggccacaggaggaggtccctttgaagatggcatgaatgatcaggatttaccaaactggagtaatgagaatgttgatgacaggctcaacaatatggattggggtgcccaacagaagaaagcaaatagatcatcagaaaagaataagaaaaagtttggtgtagaaagtgataaaagagtaaccaatgatatttctccggagtcgtcaccaggagttggaaggcgaagaacaaagactccacatacgttcccacacagtagatacatgagtcagatgtctgtcccagagcaggcagaattagagaaactgaaacagcggataaacttcagtgatttagatcagagaagcattggaagtgattcccaaggtagagcaacagctgctaacaacaaacgtcagcttagtgaaaaccgaaagcccttcaactttttgcctatgcagattaatactaacaagagcaaagatgcatctacaagtcccccaaacagagaaacgattggatcagcacagtgtaaagagttgtttgcttctgctttaagtaatgacctcttgcaaaactgtcaggtgtctgaagaagatgggaggggagaacctgcaatggagagcagccagattgtaagcaggcttgttcaaattcgcgattatattactaaagctagttccatgcgggaagatcttgtagagaaaaatgagagatctgctaatgttgagcgccttactcatctaatagatcaccttaaagaacaagagaagtcatatatgaaatttcttaaaaaaatccttgccagagatcctcagcaggagcctatggaagagatagaaaatttgaagaaacaacatgatttattaaaaagaatgttacaacagcaggagcaactaaagccaacggaggaggccttagttaataaggcgcgactgctgagtattaactcc

SEQ ID NO: 450883 - DNA, 524 bp, Homo sapiens
atcccccgcgctgcaggacattcggcaccaggccaagctgataaaacacaagaagggcattgtcaatgaacagtttctgctgcagcggctggcagacggggccatcgacctctatgccatggtggtggttctctcgagggcctcaagatccctgagtgagggccaccccacggcccagcatgagaaaatgctctgtgacacctggtgtatcgaggctgcagctcggatccgagagggcatggccgccctgcagtctgacccctggcagcaagagctctaccgcaacttcaaaagcatctccaaggccttggtggagcggggtggtgtggtcaccagcaacccacttggcttctgaatactcccggccagggcctgtcccagttatgtgccttccctcaagccaaagccgaagcccctttccttaaggccctggtttgtcccgaaggggcctagtgttcccagcactgtgcctgctctcaagagcacttactgcctcgcaaataataaaaatttctagccagtca

SEQ ID NO: 450884 - DNA, 2317 bp, Homo sapiens
gggctccagggaactacagctcccagcatgccccggggcccgcaaccgtccgccgcccggtgcactgtggacgatgagtcagggttaggggcgccaggacgtgggcgtgcaggacgcgggcgtgcaggacgccagagctgggtcagagctcgagccagcggcgcccggagagattcggagatgcaggcggctcggatggccgcgagcttggggcggcagctgctgaggctcgggggcggaagctcgcggctcacggcgctcctggggcagccccggcccggccctgcccggcggccctatgccgggggtgccgctcagctggctctggacaagtcagattcccacccctctgacgctctgaccaggaaaaaaccggccaaggcggaatctaagtcctttgctgtgggaatgttcaaaggccagctcaccacagatcaggtgttcccatacccgtccgtgctcaacgaagagcagacacagtttcttaaagagctggtggagcctgtgtcccgtttcttcgaggaagtgaacgatcccgccaagaatgacgctctggagatggtggaggagaccacttggcagggcctcaaggagctgggggcctttggtctgcaagtgcccagtgagctgggtggtgtgggcctttgcaacacccagtacgcccgtttggtggagatcgtgggcatgcatgaccttggcgtgggcattaccctgggggcccatcagagcatcggtttcaaaggcatcctgctctttggcacaaaggcccagaaagaaaaatacctccccaagctggcatctggggagactgtggccgctttctgtctaaccgagccctcaagcgggtcagatgcagcctccatccgaacctctgctgtgcccagcccctgtggaaaatactataccctcaatggaagcaagctttggatcagtaatgggggcctagcagacatcttcacggtctttgccaagacaccagttacagatccagccacaggagccgtgaaggagaagatcacagcttttgtggtggagaggggcttcgggggcattacccatgggccccctgagaagaagatgggcatcaaggcttcaaacacagcagaggtgttctttgatggagtacgggtgccatcggagaacgtgctgggtgaggttgggagtggcttcaaggttgccatgcacatcctcaacaatggaaggtttggcatggctgcggccctggcaggtaccatgagaggcatcattgctaaggcggtagatcatgccactaatcgtacccagtttggggagaaaattcacaactttgggctgatccaggagaagctggcacggatggttatgctgcagtatgtaactgagtccatggcttacatggtgagtgctaacatggaccagggagccacggacttccagatagaggccgccatcagcaaaatctttggctcggaggcagcctggaaggtgacagatgaatgcatccaaatcatggggggtatgggcttcatgaaggaacctggagtagagcgtgtgctccgagatcttcgcatcttccggatctttgaggggacaaatgacattcttcggctgtttgtggctctgcagggctgtatggacaaaggaaaggagctctctgggcttggcagtgctctaaagaatccctttgggaatgctggcctcctgctaggagaggcaggcaaacagctgaggcggcgggcagggctgggcagcggcctgagtctcagcggacttgtccacccggagttgagtcggagtggcgagctggcagtacgggctctggagcagtttgccactgtggtggaggccaagctgataaaacacaagaaggggattgtcaatgaacagtttctgctgcagcggctggcagacggggccatcgacctctatgccatggtggtggttctctcgagggcctcaagatccctgagtgagggccaccccacggcccagcatgagaaaatgctctgtgacacctggtgtatcgaggctgcagctcggatccgagagggcatggccgccctgcagtctgacccctggcagcaagagctctaccgcaacttcaaaagcatctccaaggccttggtggagcggggtggtgtggtcaccagcaacccacttggcttctgaatactcccggccagggcctgtcccagttatgtgccttccctcaagccaaagccgaagcccctttccttaaggccctggtttgtcccgaaggggcctagtgttcccagcactgtgcctgctctcaagagcacttactgcctcgcaaataataaaaatttctagccagtca

SEQ ID NO: 450885 - DNA, 753 bp, Homo sapiens
actagttctagctcgcgatctagaactaggtggctctgcagggctgtatggacaaaggaaaggagctctctgggcttggcagtgctctaaagaatccctttgggaatgctggcctcctgctaggagaggcaggcaaacagctgaggcggcgggcagggctgggcagcggcctgagtctcagcggacttgtccacccggagttgagtcggagtggcgagctggcagtacgggctctggagcagtttgccactgtggtggaggccaagctgataaaacacaagaaggggattgtcaatgaacagtttctgctgcagcggctggcagacggggccatcgacctctatgccatggtggtggttctctcgagggcctcaagatccctgagtgagggccaccccacggcccagcatgagaaaatgctctgtgacacctggtgtatcgaggctgcagctcggatccgagagggcatggccgccctgcagtctgacccctggcagcaagagctctaccgcaacttcaaaagcatctccaaggccttggtggagcggggtggtgtggtcaccagcaacccacttggcttctgaatactcccggccagggcctgtcccagttatgtgccttccctcaagccaaagccgaagcccctttccttaaggccctggtttgtcccgaaggggcctagtgttcccagcactgtgcctgctctcaagagcacttactgcctcgcaaataataaaaatttctagccagtca

SEQ ID NO: 450886 - DNA, 3652 bp, Homo sapiens
cgcctctgcctctctgcccagataataagcaggccatggcggctatctacttttcttgagctgtagcgcaagtagttcccttgccatgtcaccaccgatcaagtgtgccacattagccggtccgttgcttctactaacttatgtactcacccaggcatccctataaatgagtcgtcgcgttagagaagtactgatatcgcctctctctacgaaggaagtgaacgatcccgccaagaatgacgctctggagatggtggaggagaccacttggcagggcctcaaggagctgggggcctttggtctgcaagtgcccagtgagctgggtggtgtgggcctttgcaacacccaggtgagggcgccctatcgccacatcccagtatgccataccccagcttggcagactcagctcttttgccatagacctagagactagggctaaggtctcttctaagcacctgccctgggtgcctgtgggatggatgttaactgtccaaacataacacaatttacatgcagtcccctaggcctgagccatgggcctcaccctggttcccaagtccttacaaatctctaagttggggattgcctaacaatagactgactagtagcaagtcaccctcctacctagacctaagacagaccagcattctctgctgtgccctttgcacaccccacttcttttctacacactggggatggcccaggtcaggcactgccctaggccaggaactgccctgttgcccacactctcctgttaaggtcaggtccccctgcagccagtgacaaccccagattcctgcttcccctccagtacgcccgtttggtggagatcgtgggcatgcatgaccttggcgtgggcattaccctgggggcccatcagagcatcggtttcaaaggcatcctgctctttggcacaaaggcccagaaagaaaaatacctccccaagctggcatctggtgaggcaaccctaggagagccagggattggggggcacactgggcttggcacagattaggccagttggcacttagattatcagatggctgagcatttcagttgggggaaggttttggggaggcatcacagtgtgctggttgggacatgcaaaagaactggatactcccaggtgttaagggggaactgcctgctggagggatggggaagtgggccgaggggactttgaagctcatcagaacttggggtaaagtagctctctccccaacagggagactgtggccgctttctgtctaaccgagccctcaagcgggtcagatgcagcctccatccgaacctctgctgtgcccagcccctgtggaaaatactataccctcaatggaagcaagctttggatcagcaacctgcctcccatttctccccttctcctccgcccaattccaggccccactgctccccgtcctccacgccctgaatatcccattcttccacagtaatgggggcctagcagacatcttcacggtctttgccaagacaccagttacagatccagccacaggagccgtgaaggagaagatcacagcttttgtggtggagaggggcttcgggggcattacccagtgagtgaatttgggttgggggagcttaggactgaggggcaggactgggctcctgggcagatggctgttgcaagtcaccctggggacgtgtgcaaaagccaaagcaggtggactgaatgtggcctttgggactaatatgtatgcaactgagctaaagttttggctccagcaaccaagtccaacacaaaataggacatagccaggcctccttagccctcagggcctgaggggaagtggtggctgtagcctctaatagtctagtggtcgtcattcctccctggtgcataaggagcgaaggagcagtttttcccccagtgacaacctgttgaacacacctctgctttcccacactgccctgacacagtgggccccctgagaagaagatgggcatcaaggcttcaaacacagcagaggtgttctttgatggagtacgggtgccatcggagaacgtgctgggtgaggttgggagtggcttcaaggttgccatgcacatcctcaacaatggaaggtttggcatggctgcggccctggcaggtaccatgagaggcatcattgctaaggcggcggtgagtaccctgcccgagtccctaggtaacccaaacagaagtctcactgtcccccttgccatgtgtccctgatcacttgcaggcactccctacactagaaactcctcccctaccagcagcccgacttgctagcttaggtctccatccagcgtagactgaactctggttgtatgcaaaacccatccctctggcgcaagcccagcccctctcctagggagactgcagaaccacactgaaccacagcgggatgtgtggaccctcttccaggtagatcatgccactaatcgtacccagtttggggagaaaattcacaactttgggctgatccaggagaagctggcacggatggttatgctgcagtatgtaactgagtccatggcttacatggtgagtgctaacatggaccagggagccacggacttccagatagaggccgccatcagcaaaatctttggctcgggtgaggtcccaggcatgctgggagggagtccagtttgggtgctcagctcccaaaaccagtctcatctgttctttgtccctaggaggcagcctggaaggtgacagatgaatgcatccaaatcatggggggtatgggcttcatgaaggcttcatgaaggtacaggacggtcttctgcagagcctcggctgggccaggggtgggtaggcacatctcagcacgggcatataatttgtgtggccctgtgctagaacctggagtagagcgtgtgctccgagatcttcgcatcttccggatctttgaggggacaaatgacattcttcggctgtttgtggctctgcagggctgtatggacaaaggaaaggagctctctgggcttggcagtgctctaaagaatccctttgggaatgctggcctcctgctaggagaggcaggcaaacagctgaggcggcgggcagggctgggcagcggcctgagtctcagcggacttgtccacccggagttgagtcggagtggcgagctggcagtacgggctctggagcagtttgccactgtggtggaggccaagctgataaaacacaagaaggggattgtcaatgaacagtttctgctgcagcggctggcagacggggccatcgacctctatgccatggtggtggttctctcgagggcctcaagatccctgagtgagggccaccccacggcccagcatgagaaaatgctctgtgacacctggtgtatcgaggctgcagctcggatccgagagggcatggccgccctgcagtctgacccctggcagcaagagctctaccgcaacttcaaaagcatctccaaggccttggtggagcggggtggtgtggtcaccagcaacccacttggcttctgaatactcccggccagggcctgtcccagttatgtgccttccctcaagccaaagccgaagcccctttccttaaggccctggtttgtcccgaaggggcctagtgttcccagcactgtgcctgctctcaagagcacttactgcctcgcaaataataaaaatttctagccagtca

SEQ ID NO: 450887 - DNA, 3807 bp, Homo sapiens
cgcctctgcctctctgcccagataataagcaggccatggcggctatctacttttcttgagctgtagcgcaagtagttcccttgccatgtcaccaccgatcaagtgtgccacattagccggtccgttgcttctactaacttatgtactcacccaggcatccctataaatgagtcgtcgcgttagagaagtactgatatcgcctctctctacgaaggaagtgaacgatcccgccaagaatgacgctctggagatggtggaggagaccacttggcagggcctcaaggagctgggggcctttggtctgcaagtgcccagtgagctgggtggtgtgggcctttgcaacacccaggtgagggcgccctatcgccacatcccagtatgccataccccagcttggcagactcagctcttttgccatagacctagagactagggctaaggtctcttctaagcacctgccctgggtgcctgtgggatggatgttaactgtccaaacataacacaatttacatgcagtcccctaggcctgagccatgggcctcaccctggttcccaagtccttacaaatctctaagttggggattgcctaacaatagactgactagtagcaagtcaccctcctacctagacctaagacagaccagcattctctgctgtgccctttgcacaccccacttcttttctacacactggggatggcccaggtcaggcactgccctaggccaggaactgccctgttgcccacactctcctgttaaggtcaggtccccctgcagccagtgacaaccccagattcctgcttcccctccagtacgcccgtttggtggagatcgtgggcatgcatgaccttggcgtgggcattaccctgggggcccatcagagcatcggtttcaaaggcatcctgctctttggcacaaaggcccagaaagaaaaatacctccccaagctggcatctggtgaggcaaccctaggagagccagggattggggggcacactgggcttggcacagattaggccagttggcacttagattatcagatggctgagcatttcagttgggggaaggttttggggaggcatcacagtgtgctggttgggacatgcaaaagaactggatactcccaggtgttaagggggaactgcctgctggagggatggggaagtgggccgaggggactttgaagctcatcagaacttggggtaaagtagctctctccccaacagggagactgtggccgctttctgtctaaccgagccctcaagcgggtcagatgcagcctccatccgaacctctgctgtgcccagcccctgtggaaaatactataccctcaatggaagcaagctttggatcagcaacctgcctcccatttctccccttctcctccgcccaattccaggccccactgctccccgtcctccacgccctgaatatcccattcttccacagtaatgggggcctagcagacatcttcacggtctttgccaagacaccagttacagatccagccacaggagccgtgaaggagaagatcacagcttttgtggtggagaggggcttcgggggcattacccagtgagtgaatttgggttgggggagcttaggactgaggggcaggactgggctcctgggcagatggctgttgcaagtcaccctggggacgtgtgcaaaagccaaagcaggtggactgaatgtggcctttgggactaatatgtatgcaactgagctaaagttttggctccagcaaccaagtccaacacaaaataggacatagccaggcctccttagccctcagggcctgaggggaagtggtggctgtagcctctaatagtctagtggtcgtcattcctccctggtgcataaggagcgaaggagcagtttttcccccagtgacaacctgttgaacacacctctgctttcccacactgccctgacacagtgggccccctgagaagaagatgggcatcaaggcttcaaacacagcagaggtgttctttgatggagtacgggtgccatcggagaacgtgctgggtgaggttgggagtggcttcaaggttgccatgcacatcctcaacaatggaaggtttggcatggctgcggccctggcaggtaccatgagaggcatcattgctaaggcggcggtgagtaccctgcccgagtccctaggtaacccaaacagaagtctcactgtcccccttgccatgtgtccctgatcacttgcaggcactccctacactagaaactcctcccctaccagcagcccgacttgctagcttaggtctccatccagcgtagactgaactctggttgtatgcaaaacccatccctctggcgcaagcccagcccctctcctagggagactgcagaaccacactgaaccacagcgggatgtgtggaccctcttccaggtagatcatgccactaatcgtacccagtttggggagaaaattcacaactttgggctgatccaggagaagctggcacggatggttatgctgcagtatgtaactgagtccatggcttacatggtgagtgctaacatggaccagggagccacggacttccagatagaggccgccatcagcaaaatctttggctcgggtgaggtcccaggcatgctgggagggagtccagtttgggtgctcagctcccaaaaccagtctcatctgttctttgtccctaggaggcagcctggaaggtgacagatgaatgcatccaaatcatggggggtatgggcttcatgaaggcttcatgaaggtacaggacggtcttctgcagagcctcggctgggccaggggtgggtaggcacatctcagcacgggcatataatttgtgtggccctgtgctagaacctggagtagagcgtgtgctccgagatcttcgcatcttccggatctttgaggggacaaatgacattcttcggctgtttgtggctctgcagggctgtatggtaagacagagaattgggtgggggtagaggtggggaggacagtgagtcctgactgctggaccctcttcccccatagggacaaaggaaaggagctctctgggcttggcagtgctctaaagaatccctttgggaatgctggcctcctgctaggagaggcaggcaaacagctgaggcgggtaggcttagggccagagccaggggagggcagggtggtgtatggcaactaaccagtcattctccctcttcctctcaggcgggcagggctgggcagcggcctgagtctcagcggacttgtccacccggagttgagtcggagtggcgagctggcagtacgggctctggagcagtttgccactgtggtggaggccaagctgataaaacacaagaaggggattgtcaatgaacagtttctgctgcagcggctggcagacggggccatcgacctctatgccatggtggtggttctctcgagggcctcaagatccctgagtgagggccaccccacggcccagcatgagaaaatgctctgtgacacctggtgtatcgaggctgcagctcggatccgagagggcatggccgccctgcagtctgacccctggcagcaagagctctaccgcaacttcaaaagcatctccaaggccttggtggagcggggtggtgtggtcaccagcaacccacttggcttctgaatactcccggccagggcctgtcccagttatgtgccttccctcaagccaaagccgaagcccctttccttaaggccctggtttgtcccgaaggggcctagtgttcccagcactgtgcctgctctcaagagcacttactgcctcgcaaataataaaaatttctagccagtca

SEQ ID NO: 450888 - DNA, 3725 bp, Homo sapiens
  misc_feature (3679)..(3679): n is a, c, g, or t
  misc_feature (3682)..(3682): n is a, c, g, or t
  misc_feature (3691)..(3691): n is a, c, g, or t
  misc_feature (3695)..(3695): n is a, c, g, or t
  misc_feature (3699)..(3699): n is a, c, g, or t
  misc_feature (3709)..(3709): n is a, c, g, or t
  misc_feature (3712)..(3712): n is a, c, g, or t
  misc_feature (3714)..(3714): n is a, c, g, or t
  misc_feature (3716)..(3716): n is a, c, g, or t
cgcctctgcctctctgcccagataataagcaggccatggcggctatctacttttcttgagctgtagcgcaagtagttcccttgccatgtcaccaccgatcaagtgtgccacattagccggtccgttgcttctactaacttatgtactcacccaggcatccctataaatgagtcgtcgcgttagagaagtactgatatcgcctctctctacgaaggaagtgaacgatcccgccaagaatgacgctctggagatggtggaggagaccacttggcagggcctcaaggagctgggggcctttggtctgcaagtgcccagtgagctgggtggtgtgggcctttgcaacacccaggtgagggcgccctatcgccacatcccagtatgccataccccagcttggcagactcagctcttttgccatagacctagagactagggctaaggtctcttctaagcacctgccctgggtgcctgtgggatggatgttaactgtccaaacataacacaatttacatgcagtcccctaggcctgagccatgggcctcaccctggttcccaagtccttacaaatctctaagttggggattgcctaacaatagactgactagtagcaagtcaccctcctacctagacctaagacagaccagcattctctgctgtgccctttgcacaccccacttcttttctacacactggggatggcccaggtcaggcactgccctaggccaggaactgccctgttgcccacactctcctgttaaggtcaggtccccctgcagccagtgacaaccccagattcctgcttcccctccagtacgcccgtttggtggagatcgtgggcatgcatgaccttggcgtgggcattaccctgggggcccatcagagcatcggtttcaaaggcatcctgctctttggcacaaaggcccagaaagaaaaatacctccccaagctggcatctggtgaggcaaccctaggagagccagggattggggggcacactgggcttggcacagattaggccagttggcacttagattatcagatggctgagcatttcagttgggggaaggttttggggaggcatcacagtgtgctggttgggacatgcaaaagaactggatactcccaggtgttaagggggaactgcctgctggagggatggggaagtgggccgaggggactttgaagctcatcagaacttggggtaaagtagctctctccccaacagggagactgtggccgctttctgtctaaccgagccctcaagcgggtcagatgcagcctccatccgaacctctgctgtgcccagcccctgtggaaaatactataccctcaatggaagcaagctttggatcagcaacctgcctcccatttctccccttctcctccgcccaattccaggccccactgctccccgtcctccacgccctgaatatcccattcttccacagtaatgggggcctagcagacatcttcacggtctttgccaagacaccagttacagatccagccacaggagccgtgaaggagaagatcacagcttttgtggtggagaggggcttcgggggcattacccagtgagtgaatttgggttgggggagcttaggactgaggggcaggactgggctcctgggcagatggctgttgcaagtcaccctggggacgtgtgcaaaagccaaagcaggtggactgaatgtggcctttgggactaatatgtatgcaactgagctaaagttttggctccagcaaccaagtccaacacaaaataggacatagccaggcctccttagccctcagggcctgaggggaagtggtggctgtagcctctaatagtctagtggtcgtcattcctccctggtgcataaggagcgaaggagcagtttttcccccagtgacaacctgttgaacacacctctgctttcccacactgccctgacacagtgggccccctgagaagaagatgggcatcaaggcttcaaacacagcagaggtgttctttgatggagtacgggtgccatcggagaacgtgctgggtgaggttgggagtggcttcaaggttgccatgcacatcctcaacaatggaaggtttggcatggctgcggccctggcaggtaccatgagaggcatcattgctaaggcggcggtgagtaccctgcccgagtccctaggtaacccaaacagaagtctcactgtcccccttgccatgtgtccctgatcacttgcaggcactccctacactagaaactcctcccctaccagcagcccgacttgctagcttaggtctccatccagcgtagactgaactctggttgtatgcaaaacccatccctctggcgcaagcccagcccctctcctagggagactgcagaaccacactgaaccacagcgggatgtgtggaccctcttccaggtagatcatgccactaatcgtacccagtttggggagaaaattcacaactttgggctgatccaggagaagctggcacggatggttatgctgcagtatgtaactgagtccatggcttacatggtgagtgctaacatggaccagggagccacggacttccagatagaggccgccatcagcaaaatctttggctcgggtgaggtcccaggcatgctgggagggagtccagtttgggtgctcagctcccaaaaccagtctcatctgttctttgtccctaggaggcagcctggaaggtgacagatgaatgcatccaaatcatggggggtatgggcttcatgaaggcttcatgaaggtacaggacggtcttctgcagagcctcggctgggccaggggtgggtaggcacatctcagcacgggcatataatttgtgtggccctgtgctagaacctggagtagagcgtgtgctccgagatcttcgcatcttccggatctttgaggggacaaatgacattcttcggctgtttgtggctctgcagggctgtatggacaaaggaaaggagctctctgggcttggcagtgctctaaagaatccctttgggaatgctggcctcctgctaggagaggcaggcaaacagctgaggcggcgggcagggctgggcagcggcctgagtctcagcggacttgtccacccggagttgagtcggagtggcgagctggcagtacgggctctggagcagtttgccactgtggtggaggccaagctgataaaacacaagaaggggattgtcaatgaacagtttctgctgcagcggctggcagacggggccatcgacctctatgccatggtggtggttctctcgagggcctcaagatccctgagtgagggccaccccacggcccagcatgagaaaatgctctgtgacacctggtgtatcgaggctgcagctcggatccgagagggcatggccgccctgcagtctgacccctggcagcaagagctctaccgcaacttcaaaagcatctccaaggccttggtggagcggggtggtgtggtcaccagcaacccacttggcttctgaatactcccggccagggcctgtcccagttatgtgccttccctcaagccaaagccgaagcccctttccttaaggccctggtttgtcccgaaggggcctagtgttcccagcactgtgcctgctctcaagagcacttactgcctcgcaaataataaaaatttctagccagtcaaaaaaaaaacaaacacaaaaaccacanaanacaacaaanaaanaaancaaaaacaanaanananaaaaacaca

SEQ ID NO: 450889 - DNA, 3638 bp, Homo sapiens
cgcctctgcctctctgcccagataataagcaggccatggcggctatctacttttcttgagctgtagcgcaagtagttcccttgccatgtcaccaccgatcaagtgtgccacattagccggtccgttgcttctactaacttatgtactcacccaggcatccctataaatgagtcgtcgcgttagagaagtactgatatcgcctctctctacgaaggaagtgaacgatcccgccaagaatgacgctctggagatggtggaggagaccacttggcagggcctcaaggagctgggggcctttggtctgcaagtgcccagtgagctgggtggtgtgggcctttgcaacacccaggtgagggcgccctatcgccacatcccagtatgccataccccagcttggcagactcagctcttttgccatagacctagagactagggctaaggtctcttctaagcacctgccctgggtgcctgtgggatggatgttaactgtccaaacataacacaatttacatgcagtcccctaggcctgagccatgggcctcaccctggttcccaagtccttacaaatctctaagttggggattgcctaacaatagactgactagtagcaagtcaccctcctacctagacctaagacagaccagcattctctgctgtgccctttgcacaccccacttcttttctacacactggggatggcccaggtcaggcactgccctaggccaggaactgccctgttgcccacactctcctgttaaggtcaggtccccctgcagccagtgacaaccccagattcctgcttcccctccagtacgcccgtttggtggagatcgtgggcatgcatgaccttggcgtgggcattaccctgggggcccatcagagcatcggtttcaaaggcatcctgctctttggcacaaaggcccagaaagaaaaatacctccccaagctggcatctggtgaggcaaccctaggagagccagggattggggggcacactgggcttggcacagattaggccagttggcacttagattatcagatggctgagcatttcagttgggggaaggttttggggaggcatcacagtgtgctggttgggacatgcaaaagaactggatactcccaggtgttaagggggaactgcctgctggagggatggggaagtgggccgaggggactttgaagctcatcagaacttggggtaaagtagctctctccccaacagggagactgtggccgctttctgtctaaccgagccctcaagcgggtcagatgcagcctccatccgaacctctgctgtgcccagcccctgtggaaaatactataccctcaatggaagcaagctttggatcagcaacctgcctcccatttctccccttctcctccgcccaattccaggccccactgctccccgtcctccacgccctgaatatcccattcttccacagtaatgggggcctagcagacatcttcacggtctttgccaagacaccagttacagatccagccacaggagccgtgaaggagaagatcacagcttttgtggtggagaggggcttcgggggcattacccagtgagtgaatttgggttgggggagcttaggactgaggggcaggactgggctcctgggcagatggctgttgcaagtcaccctggggacgtgtgcaaaagccaaagcaggtggactgaatgtggcctttgggactaatatgtatgcaactgagctaaagttttggctccagcaaccaagtccaacacaaaataggacatagccaggcctccttagccctcagggcctgaggggaagtggtggctgtagcctctaatagtctagtggtcgtcattcctccctggtgcataaggagcgaaggagcagtttttcccccagtgacaacctgttgaacacacctctgctttcccacactgccctgacacagtgggccccctgagaagaagatgggcatcaaggcttcaaacacagcagaggtgttctttgatggagtacgggtgccatcggagaacgtgctgggtgaggttgggagtggcttcaaggttgccatgcacatcctcaacaatggaaggtttggcatggctgcggccctggcaggtaccatgagaggcatcattgctaaggcggcggtgagtaccctgcccgagtccctaggtaacccaaacagaagtctcactgtcccccttgccatgtgtccctgatcacttgcaggcactccctacactagaaactcctcccctaccagcagcccgacttgctagcttaggtctccatccagcgtagactgaactctggttgtatgcaaaacccatccctctggcgcaagcccagcccctctcctagggagactgcagaaccacactgaaccacagcgggatgtgtggaccctcttccaggtagatcatgccactaatcgtacccagtttggggagaaaattcacaactttgggctgatccaggagaagctggcacggatggttatgctgcagtatgtaactgagtccatggcttacatggtgagtgctaacatggaccagggagccacggacttccagatagaggccgccatcagcaaaatctttggctcgggtgaggtcccaggcatgctgggagggagtccagtttgggtgctcagctcccaaaaccagtctcatctgttctttgtccctaggaggcagcctggaaggtgacagatgaatgcatccaaatcatggggggtatgggcttcatgaaggcttcatgaaggtacaggacggtcttctgcagagcctcggctgggccaggggtgggtaggcacatctcagcacgggcatataatttgtgtggccctgtgctagaacctggagtagagcgtgtgctccgagatcttcgcatcttccggatctttgaggggacaaatgacattcttcggctgtttgtggctctgcagggctgtatgcagtcattctccctcttcctctcaggcgggcagggctgggcagcggcctgagtctcagcggacttgtccacccggagttgagtcggagtggcgagctggtaagcggccaggggtccaggagagcctgcatcagggactgcaccgatggcccctctgagccccgcactgtccccatctcttaaggcagtacgggctctggagcagtttgccactgtggtggaggccaagctatgaacagtttctgctgcagcggctggcagacggggccatcgacctctatgccatggtggtggttctctcgagggcctcaagatccctgagtgagggccaccccacggcccagcatgagaaaatgctctgtgacacctggtgtatcgaggctgcagctcggatccgagagggcatggccgccctgcagtctgacccctggcagcaagagctctaccgcaacttcaaaagcatctccaaggccttggtggagcggggtggtgtggtcaccagcaacccacttggcttctgaatactcccggccagggcctgtcccagttatgtgccttccctcaagccaaagccgaagcccctttccttaaggccctggtttgtcccgaaggggcctagtgttcccagcactgtgcctgctctcaagagcacttactgcctcgcaaataataaaaatttctagccagtca

SEQ ID NO: 450890 - DNA, 3596 bp, Homo sapiens
cgcctctgcctctctgcccagataataagcaggccatggcggctatctacttttcttgagctgtagcgcaagtagttcccttgccatgtcaccaccgatcaagtgtgccacattagccggtccgttgcttctactaacttatgtactcacccaggcatccctataaatgagtcgtcgcgttagagaagtactgatatcgcctctctctacgaaggaagtgaacgatcccgccaagaatgacgctctggagatggtggaggagaccacttggcagggcctcaaggagctgggggcctttggtctgcaagtgcccagtgagctgggtggtgtgggcctttgcaacacccaggtgagggcgccctatcgccacatcccagtatgccataccccagcttggcagactcagctcttttgccatagacctagagactagggctaaggtctcttctaagcacctgccctgggtgcctgtgggatggatgttaactgtccaaacataacacaatttacatgcagtcccctaggcctgagccatgggcctcaccctggttcccaagtccttacaaatctctaagttggggattgcctaacaatagactgactagtagcaagtcaccctcctacctagacctaagacagaccagcattctctgctgtgccctttgcacaccccacttcttttctacacactggggatggcccaggtcaggcactgccctaggccaggaactgccctgttgcccacactctcctgttaaggtcaggtccccctgcagccagtgacaaccccagattcctgcttcccctccagtacgcccgtttggtggagatcgtgggcatgcatgaccttggcgtgggcattaccctgggggcccatcagagcatcggtttcaaaggcatcctgctctttggcacaaaggcccagaaagaaaaatacctccccaagctggcatctggtgaggcaaccctaggagagccagggattggggggcacactgggcttggcacagattaggccagttggcacttagattatcagatggctgagcatttcagttgggggaaggttttggggaggcatcacagtgtgctggttgggacatgcaaaagaactggatactcccaggtgttaagggggaactgcctgctggagggatggggaagtgggccgaggggactttgaagctcatcagaacttggggtaaagtagctctctccccaacagggagactgtggccgctttctgtctaaccgagccctcaagcgggtcagatgcagcctccatccgaacctctgctgtgcccagcccctgtggaaaatactataccctcaatggaagcaagctttggatcagcaacctgcctcccatttctccccttctcctccgcccaattccaggccccactgctccccgtcctccacgccctgaatatcccattcttccacagtaatgggggcctagcagacatcttcacggtctttgccaagacaccagttacagatccagccacaggagccgtgaaggagaagatcacagcttttgtggtggagaggggcttcgggggcattacccagtgagtgaatttgggttgggggagcttaggactgaggggcaggactgggctcctgggcagatggctgttgcaagtcaccctggggacgtgtgcaaaagccaaagcaggtggactgaatgtggcctttgggactaatatgtatgcaactgagctaaagttttggctccagcaaccaagtccaacacaaaataggacatagccaggcctccttagccctcagggcctgaggggaagtggtggctgtagcctctaatagtctagtggtcgtcattcctccctggtgcataaggagcgaaggagcagtttttcccccagtgacaacctgttgaacacacctctgctttcccacactgccctgacacagtgggccccctgagaagaagatgggcatcaaggcttcaaacacagcagaggtgttctttgatggagtacgggtgccatcggagaacgtgctgggtgaggttgggagtggcttcaaggttgccatgcacatcctcaacaatggaaggtttggcatggctgcggccctggcaggtaccatgagaggcatcattgctaaggcggcggtgagtaccctgcccgagtccctaggtaacccaaacagaagtctcactgtcccccttgccatgtgtccctgatcacttgcaggcactccctacactagaaactcctcccctaccagcagcccgacttgctagcttaggtctccatccagcgtagactgaactctggttgtatgcaaaacccatccctctggcgcaagcccagcccctctcctagggagactgcagaaccacactgaaccacagcgggatgtgtggaccctcttccaggtagatcatgccactaatcgtacccagtttggggagaaaattcacaactttgggctgatccaggagaagctggcacggatggttatgctgcagtatgtaactgagtccatggcttacatggtgagtgctaacatggaccagggagccacggacttccagatagaggccgccatcagcaaaatctttggctcgggtgaggtcccaggcatgctgggagggagtccagtttgggtgctcagctcccaaaaccagtctcatctgttctttgtccctaggaggcagcctggaaggtgacagatgaatgcatccaaatcatggggggtatgggcttcatgaaggcttcatgaaggtacaggacggtcttctgcagagcctcggctgggccaggggtgggtaggcacatctcagcacgggcatataatttgtgtggccctgtgctagaacctggagtagagcgtgtgctccgagatcttcgcatcttccggatctttgaggggacaaatgacattcttcggctgtttgtggctctgcagggctgtatggacaaaggaaaggagctctctgggcttggcagtgctctaaagaatccctttgggaatgctggcctcctgctaggagaggcaggcaaacagctgaggcggcgggcagggctgggcagcggcctgagtctcagcggacttgtccacccggagttgagtcggagtggcgagctggcagtacgggctctggagcagtttgccactgtggtggaggccaagctacggggccatcgacctctatgccatggtggtggttctctcgagggcctcaagatccctgagtgagggccaccccacggcccagcatgagaaaatgctctgtgacacctggtgtatcgaggctgcagctcggatccgagagggcatggccgccctgcagtctgacccctggcagcaagagctctaccgcaacttcaaaagcatctccaaggccttggtggagcggggtggtgtggtcaccagcaacccacttggcttctgaatactcccggccagggcctgtcccagttatgtgccttccctcaagccaaagccgaagcccctttccttaaggccctggtttgtcccgaaggggcctagtgttcccagcactgtgcctgctctcaagagcacttactgcctcgcaaataataaaaatttctagccagtca

SEQ ID NO: 450891 - DNA, 3636 bp, Homo sapiens
  misc_feature (3635)..(3636): n is a, c, g, or t
cgcctctgcctctctgcccagataataagcaggccatggcggctatctacttttcttgagctgtagcgcaagtagttcccttgccatgtcaccaccgatcaagtgtgccacattagccggtccgttgcttctactaacttatgtactcacccaggcatccctataaatgagtcgtcgcgttagagaagtactgatatcgcctctctctacgaaggaagtgaacgatcccgccaagaatgacgctctggagatggtggaggagaccacttggcagggcctcaaggagctgggggcctttggtctgcaagtgcccagtgagctgggtggtgtgggcctttgcaacacccaggtgagggcgccctatcgccacatcccagtatgccataccccagcttggcagactcagctcttttgccatagacctagagactagggctaaggtctcttctaagcacctgccctgggtgcctgtgggatggatgttaactgtccaaacataacacaatttacatgcagtcccctaggcctgagccatgggcctcaccctggttcccaagtccttacaaatctctaagttggggattgcctaacaatagactgactagtagcaagtcaccctcctacctagacctaagacagaccagcattctctgctgtgccctttgcacaccccacttcttttctacacactggggatggcccaggtcaggcactgccctaggccaggaactgccctgttgcccacactctcctgttaaggtcaggtccccctgcagccagtgacaaccccagattcctgcttcccctccagtacgcccgtttggtggagatcgtgggcatgcatgaccttggcgtgggcattaccctgggggcccatcagagcatcggtttcaaaggcatcctgctctttggcacaaaggcccagaaagaaaaatacctccccaagctggcatctggtgaggcaaccctaggagagccagggattggggggcacactgggcttggcacagattaggccagttggcacttagattatcagatggctgagcatttcagttgggggaaggttttggggaggcatcacagtgtgctggttgggacatgcaaaagaactggatactcccaggtgttaagggggaactgcctgctggagggatggggaagtgggccgaggggactttgaagctcatcagaacttggggtaaagtagctctctccccaacagggagactgtggccgctttctgtctaaccgagccctcaagcgggtcagatgcagcctccatccgaacctctgctgtgcccagcccctgtggaaaatactataccctcaatggaagcaagctttggatcagcaacctgcctcccatttctccccttctcctccgcccaattccaggccccactgctccccgtcctccacgccctgaatatcccattcttccacagtaatgggggcctagcagacatcttcacggtctttgccaagacaccagttacagatccagccacaggagccgtgaaggagaagatcacagcttttgtggtggagaggggcttcgggggcattacccagtgagtgaatttgggttgggggagcttaggactgaggggcaggactgggctcctgggcagatggctgttgcaagtcaccctggggacgtgtgcaaaagccaaagcaggtggactgaatgtggcctttgggactaatatgtatgcaactgagctaaagttttggctccagcaaccaagtccaacacaaaataggacatagccaggcctccttagccctcagggcctgaggggaagtggtggctgtagcctctaatagtctagtggtcgtcattcctccctggtgcataaggagcgaaggagcagtttttcccccagtgacaacctgttgaacacacctctgctttcccacactgccctgacacagtgggccccctgagaagaagatgggcatcaaggcttcaaacacagcagaggtgttctttgatggagtacgggtgccatcggagaacgtgctgggtgaggttgggagtggcttcaaggttgccatgcacatcctcaacaatggaaggtttggcatggctgcggccctggcaggtaccatgagaggcatcattgctaaggcggcggtgagtaccctgcccgagtccctaggtaacccaaacagaagtctcactgtcccccttgccatgtgtccctgatcacttgcaggcactccctacactagaaactcctcccctaccagcagcccgacttgctagcttaggtctccatccagcgtagactgaactctggttgtatgcaaaacccatccctctggcgcaagcccagcccctctcctagggagactgcagaaccacactgaaccacagcgggatgtgtggaccctcttccaggtagatcatgccactaatcgtacccagtttggggagaaaattcacaactttgggctgatccaggagaagctggcacggatggttatgctgcagtatgtaactgagtccatggcttacatggtgagtgctaacatggaccagggagccacggacttccagatagaggccgccatcagcaaaatctttggctcgggtgaggtcccaggcatgctgggagggagtccagtttgggtgctcagctcccaaaaccagtctcatctgttctttgtccctaggaggcagcctggaaggtgacagatgaatgcatccaaatcatggggggtatgggcttcatgaaggcttcatgaaggtacaggacggtcttctgcagagcctcggctgggccaggggtgggtaggcacatctcagcacgggcatataatttgtgtggccctgtgctagaacctggagtagagcgtgtgctccgagatcttcgcatcttccggatctttgaggggacaaatgacattcttcggctgtttgtggctctgcagggctgtatggacaaaggaaaggagctctctgggcttggcagtgctctaaagaatccctttgggaatgctggcctcctgctaggagaggcaggcaaacagctgaggcggcgggcagggctgggcagcggcctgagtctcagcggacttgtccacccggagttgagtcggagtggcgagctggcagtacgggctctggagcagtttgccactgtggtggaggccaagctgataaaacacaagaaggggattgtcaatgaacagtttctgctgcagcggctggcagacggggccatcgacctctatgccatggtggtggttctctcgagggcctcaagatccctgagtgagggccaccccacggcccagcatgagaaaatgctctgtgacacctggtgtatcgaggctgcagctcggatccgagagggcatggccgccctgcagtctgacccctggcagcaagagctctaccgcaacttcaaaagcatctccaaggccttggtggagcggggtggtgtggtcaccagcaacccacttggcttctgaatactcccggccagggcctgtcccagttatgtgccttccctcaagccaaagccgaagcccctttcctttcttaggctggttgtccgagggctatgtccgcatggctgttagatatggtgaatattttccgcacgccttgggttgtttatttnn

SEQ ID NO: 450892 - DNA, 3746 bp, Homo sapiens
cgcctctgcctctctgcccagataataagcaggccatggcggctatctacttttcttgagctgtagcgcaagtagttcccttgccatgtcaccaccgatcaagtgtgccacattagccggtccgttgcttctactaacttatgtactcacccaggcatccctataaatgagtcgtcgcgttagagaagtactgatatcgcctctctctacgaaggaagtgaacgatcccgccaagaatgacgctctggagatggtggaggagaccacttggcagggcctcaaggagctgggggcctttggtctgcaagtgcccagtgagctgggtggtgtgggcctttgcaacacccaggtgagggcgccctatcgccacatcccagtatgccataccccagcttggcagactcagctcttttgccatagacctagagactagggctaaggtctcttctaagcacctgccctgggtgcctgtgggatggatgttaactgtccaaacataacacaatttacatgcagtcccctaggcctgagccatgggcctcaccctggttcccaagtccttacaaatctctaagttggggattgcctaacaatagactgactagtagcaagtcaccctcctacctagacctaagacagaccagcattctctgctgtgccctttgcacaccccacttcttttctacacactggggatggcccaggtcaggcactgccctaggccaggaactgccctgttgcccacactctcctgttaaggtcaggtccccctgcagccagtgacaaccccagattcctgcttcccctccagtacgcccgtttggtggagatcgtgggcatgcatgaccttggcgtgggcattaccctgggggcccatcagagcatcggtttcaaaggcatcctgctctttggcacaaaggcccagaaagaaaaatacctccccaagctggcatctggtgaggcaaccctaggagagccagggattggggggcacactgggcttggcacagattaggccagttggcacttagattatcagatggctgagcatttcagttgggggaaggttttggggaggcatcacagtgtgctggttgggacatgcaaaagaactggatactcccaggtgttaagggggaactgcctgctggagggatggggaagtgggccgaggggactttgaagctcatcagaacttggggtaaagtagctctctccccaacagggagactgtggccgctttctgtctaaccgagccctcaagcgggtcagatgcagcctccatccgaacctctgctgtgcccagcccctgtggaaaatactataccctcaatggaagcaagctttggatcagcaacctgcctcccatttctccccttctcctccgcccaattccaggccccactgctccccgtcctccacgccctgaatatcccattcttccacagtaatgggggcctagcagacatcttcacggtctttgccaagacaccagttacagatccagccacaggagccgtgaaggagaagatcacagcttttgtggtggagaggggcttcgggggcattacccagtgagtgaatttgggttgggggagcttaggactgaggggcaggactgggctcctgggcagatggctgttgcaagtcaccctggggacgtgtgcaaaagccaaagcaggtggactgaatgtggcctttgggactaatatgtatgcaactgagctaaagttttggctccagcaaccaagtccaacacaaaataggacatagccaggcctccttagccctcagggcctgaggggaagtggtggctgtagcctctaatagtctagtggtcgtcattcctccctggtgcataaggagcgaaggagcagtttttcccccagtgacaacctgttgaacacacctctgctttcccacactgccctgacacagtgggccccctgagaagaagatgggcatcaaggcttcaaacacagcagaggtgttctttgatggagtacgggtgccatcggagaacgtgctgggtgaggttgggagtggcttcaaggttgccatgcacatcctcaacaatggaaggtttggcatggctgcggccctggcaggtaccatgagaggcatcattgctaaggcggcggtgagtaccctgcccgagtccctaggtaacccaaacagaagtctcactgtcccccttgccatgtgtccctgatcacttgcaggcactccctacactagaaactcctcccctaccagcagcccgacttgctagcttaggtctccatccagcgtagactgaactctggttgtatgcaaaacccatccctctggcgcaagcccagcccctctcctagggagactgcagaaccacactgaaccacagcgggatgtgtggaccctcttccaggtagatcatgccactaatcgtacccagtttggggagaaaattcacaactttgggctgatccaggagaagctggcacggatggttatgctgcagtatgtaactgagtccatggcttacatggtgagtgctaacatggaccagggagccacggacttccagatagaggccgccatcagcaaaatctttggctcgggtgaggtcccaggcatgctgggagggagtccagtttgggtgctcagctcccaaaaccagtctcatctgttctttgtccctaggaggcagcctggaaggtgacagatgaatgcatccaaatcatggggggtatgggcttcatgaaggcttcatgaaggtacaggacggtcttctgcagagcctcggctgggccaggggtgggtaggcacatctcagcacgggcatataatttgtgtggccctgtgctagaacctggagtagagcgtgtgctccgagatcttcgcatcttccggatctttgaggggacaaatgacattcttcggctgtttgtggctctgcagggctgtatggacaaaggaaaggagctctctgggcttggcagtgctctaaagaatccctttgggaatgctggcctcctgctaggagaggcaggcaaacagctgaggcggcgggcagggctgggcagcggcctgagtctcagcggacttgtccacccggagttgagtcggagtggcgagctggcagtacgggctctggagcagtttgccactgtggtggaggccaagctgataaaacacaagaaggggattgtcaatgaacagtttctgctgcagcggctggcagacggggccatcgacctctatgccatggtggtggttctctcgaggtgaggaggcaggcagggaatgcctgagccgcagggggcctgggcctggatcccagccggcccagatttattttcatctcctgcttcctgccagggcctcaagatccctgagtgagggccaccccacggcccagcatgagaaaatgctctgtgacacctggtgtatcgaggctgcagctcggatccgagagggcatggccgccctgcagtctgacccctggcagcaagagctctaccgcaacttcaaaagcatctccaaggccttggtggagcggggtggtgtggtcaccagcaacccacttggcttctgaatactcccggccagggcctgtcccagttatgtgccttccctcaagccaaagccgaagcccctttccttaaggccctggtttgtcccgaaggggcctagtgttcccagcactgtgcctgctctcaagagcacttactgcctcgcaaataataaaaatttctagccagtca

SEQ ID NO: 450893 - DNA, 3809 bp, Homo sapiens
cgcctctgcctctctgcccagataataagcaggccatggcggctatctacttttcttgagctgtagcgcaagtagttcccttgccatgtcaccaccgatcaagtgtgccacattagccggtccgttgcttctactaacttatgtactcacccaggcatccctataaatgagtcgtcgcgttagagaagtactgatatcgcctctctctacgaaggaagtgaacgatcccgccaagaatgacgctctggagatggtggaggagaccacttggcagggcctcaaggagctgggggcctttggtctgcaagtgcccagtgagctgggtggtgtgggcctttgcaacacccaggtgagggcgccctatcgccacatcccagtatgccataccccagcttggcagactcagctcttttgccatagacctagagactagggctaaggtctcttctaagcacctgccctgggtgcctgtgggatggatgttaactgtccaaacataacacaatttacatgcagtcccctaggcctgagccatgggcctcaccctggttcccaagtccttacaaatctctaagttggggattgcctaacaatagactgactagtagcaagtcaccctcctacctagacctaagacagaccagcattctctgctgtgccctttgcacaccccacttcttttctacacactggggatggcccaggtcaggcactgccctaggccaggaactgccctgttgcccacactctcctgttaaggtcaggtccccctgcagccagtgacaaccccagattcctgcttcccctccagtacgcccgtttggtggagatcgtgggcatgcatgaccttggcgtgggcattaccctgggggcccatcagagcatcggtttcaaaggcatcctgctctttggcacaaaggcccagaaagaaaaatacctccccaagctggcatctggtgaggcaaccctaggagagccagggattggggggcacactgggcttggcacagattaggccagttggcacttagattatcagatggctgagcatttcagttgggggaaggttttggggaggcatcacagtgtgctggttgggacatgcaaaagaactggatactcccaggtgttaagggggaactgcctgctggagggatggggaagtgggccgaggggactttgaagctcatcagaacttggggtaaagtagctctctccccaacagggagactgtggccgctttctgtctaaccgagccctcaagcgggtcagatgcagcctccatccgaacctctgctgtgcccagcccctgtggaaaatactataccctcaatggaagcaagctttggatcagcaacctgcctcccatttctccccttctcctccgcccaattccaggccccactgctccccgtcctccacgccctgaatatcccattcttccacagtaatgggggcctagcagacatcttcacggtctttgccaagacaccagttacagatccagccacaggagccgtgaaggagaagatcacagcttttgtggtggagaggggcttcgggggcattacccagtgagtgaatttgggttgggggagcttaggactgaggggcaggactgggctcctgggcagatggctgttgcaagtcaccctggggacgtgtgcaaaagccaaagcaggtggactgaatgtggcctttgggactaatatgtatgcaactgagctaaagttttggctccagcaaccaagtccaacacaaaataggacatagccaggcctccttagccctcagggcctgaggggaagtggtggctgtagcctctaatagtctagtggtcgtcattcctccctggtgcataaggagcgaaggagcagtttttcccccagtgacaacctgttgaacacacctctgctttcccacactgccctgacacagtgggccccctgagaagaagatgggcatcaaggcttcaaacacagcagaggtgttctttgatggagtacgggtgccatcggagaacgtgctgggtgaggttgggagtggcttcaaggttgccatgcacatcctcaacaatggaaggtttggcatggctgcggccctggcaggtaccatgagaggcatcattgctaaggcggcggtgagtaccctgcccgagtccctaggtaacccaaacagaagtctcactgtcccccttgccatgtgtccctgatcacttgcaggcactccctacactagaaactcctcccctaccagcagcccgacttgctagcttaggtctccatccagcgtagactgaactctggttgtatgcaaaacccatccctctggcgcaagcccagcccctctcctagggagactgcagaaccacactgaaccacagcgggatgtgtggaccctcttccaggtagatcatgccactaatcgtacccagtttggggagaaaattcacaactttgggctgatccaggagaagctggcacggatggttatgctgcagtatgtaactgagtccatggcttacatggtgagtgctaacatggaccagggagccacggacttccagatagaggccgccatcagcaaaatctttggctcgggtgaggtcccaggcatgctgggagggagtccagtttgggtgctcagctcccaaaaccagtctcatctgttctttgtccctaggaggcagcctggaaggtgacagatgaatgcatccaaatcatggggggtatgggcttcatgaaggcttcatgaaggtacaggacggtcttctgcagagcctcggctgggccaggggtgggtaggcacatctcagcacgggcatataatttgtgtggccctgtgctagaacctggagtagagcgtgtgctccgagatcttcgcatcttccggatctttgaggggacaaatgacattcttcggctgtttgtggctctgcagggctgtatgcagtcattctccctcttcctctcaggcgggcagggctgggcagcggcctgagtctcagcggacttgtccacccggagttgagtcggagtggcgagctggtaagcggccaggggtccaggagagcctgcatcagggactgcaccgatggcccctctgagccccgcactgtccccatctcttaaggcagtacgggctctggagcagtttgccactgtggtggaggccaagctatgaacagtttctgctgcagcggctggcagacggggccatcgacctctatgccatggtggtggttctctcgaggtgaggaggcaggcagggaatgcctgagccgcagggggcctgggcctggatcccagccggcccagatttattttcatctcctgcttcctgccagggcctcaagatccctgagtgagggccaccccacggcccagcatgagaaaatgctctgtgacacctggtgtatcgaggtgagactcggggctgccaagctcaggtgagggctggaggtgcaggcccaacccctccttccctctccccaggctgcgctgcagctcggatccgagagggcatggccgccctgcagtctgacccctggcagcaagagctctaccgcaacttcaaaagcatctccaaggccttggtggagcggggtggtgtggtcaccagcaacccacttggcttctgaatactcccggccagggcctgtcccagttatgtgccttccctcaagccaaagccgaagcccctttccttaaggccctggtttgtcccgaaggggcctagtgttcccagcactgtgcctgctctcaagagcacttactgcctcgcaaataataaaaatttctagccagtca

SEQ ID NO: 450894 - DNA, 3622 bp, Homo sapiens
cgcctctgcctctctgcccagataataagcaggccatggcggctatctacttttcttgagctgtagcgcaagtagttcccttgccatgtcaccaccgatcaagtgtgccacattagccggtccgttgcttctactaacttatgtactcacccaggcatccctataaatgagtcgtcgcgttagagaagtactgatatcgcctctctctacgaaggaagtgaacgatcccgccaagaatgacgctctggagatggtggaggagaccacttggcagggcctcaaggagctgggggcctttggtctgcaagtgcccagtgagctgggtggtgtgggcctttgcaacacccaggtgagggcgccctatcgccacatcccagtatgccataccccagcttggcagactcagctcttttgccatagacctagagactagggctaaggtctcttctaagcacctgccctgggtgcctgtgggatggatgttaactgtccaaacataacacaatttacatgcagtcccctaggcctgagccatgggcctcaccctggttcccaagtccttacaaatctctaagttggggattgcctaacaatagactgactagtagcaagtcaccctcctacctagacctaagacagaccagcattctctgctgtgccctttgcacaccccacttcttttctacacactggggatggcccaggtcaggcactgccctaggccaggaactgccctgttgcccacactctcctgttaaggtcaggtccccctgcagccagtgacaaccccagattcctgcttcccctccagtacgcccgtttggtggagatcgtgggcatgcatgaccttggcgtgggcattaccctgggggcccatcagagcatcggtttcaaaggcatcctgctctttggcacaaaggcccagaaagaaaaatacctccccaagctggcatctggtgaggcaaccctaggagagccagggattggggggcacactgggcttggcacagattaggccagttggcacttagattatcagatggctgagcatttcagttgggggaaggttttggggaggcatcacagtgtgctggttgggacatgcaaaagaactggatactcccaggtgttaagggggaactgcctgctggagggatggggaagtgggccgaggggactttgaagctcatcagaacttggggtaaagtagctctctccccaacagggagactgtggccgctttctgtctaaccgagccctcaagcgggtcagatgcagcctccatccgaacctctgctgtgcccagcccctgtggaaaatactataccctcaatggaagcaagctttggatcagcaacctgcctcccatttctccccttctcctccgcccaattccaggccccactgctccccgtcctccacgccctgaatatcccattcttccacagtaatgggggcctagcagacatcttcacggtctttgccaagacaccagttacagatccagccacaggagccgtgaaggagaagatcacagcttttgtggtggagaggggcttcgggggcattacccagtgagtgaatttgggttgggggagcttaggactgaggggcaggactgggctcctgggcagatggctgttgcaagtcaccctggggacgtgtgcaaaagccaaagcaggtggactgaatgtggcctttgggactaatatgtatgcaactgagctaaagttttggctccagcaaccaagtccaacacaaaataggacatagccaggcctccttagccctcagggcctgaggggaagtggtggctgtagcctctaatagtctagtggtcgtcattcctccctggtgcataaggagcgaaggagcagtttttcccccagtgacaacctgttgaacacacctctgctttcccacactgccctgacacagtgggccccctgagaagaagatgggcatcaaggcttcaaacacagcagaggtgttctttgatggagtacgggtgccatcggagaacgtgctgggtgaggttgggagtggcttcaaggttgccatgcacatcctcaacaatggaaggtttggcatggctgcggccctggcaggtaccatgagaggcatcattgctaaggcggcggtgagtaccctgcccgagtccctaggtaacccaaacagaagtctcactgtcccccttgccatgtgtccctgatcacttgcaggcactccctacactagaaactcctcccctaccagcagcccgacttgctagcttaggtctccatccagcgtagactgaactctggttgtatgcaaaacccatccctctggcgcaagcccagcccctctcctagggagactgcagaaccacactgaaccacagcgggatgtgtggaccctcttccaggtagatcatgccactaatcgtacccagtttggggagaaaattcacaactttgggctgatccaggagaagctggcacggatggttatgctgcagtatgtaactgagtccatggcttacatggtgagtgctaacatggaccagggagccacggacttccagatagaggccgccatcagcaaaatctttggctcgggtgaggtcccaggcatgctgggagggagtccagtttgggtgctcagctcccaaaaccagtctcatctgttctttgtccctaggaggcagcctggaaggtgacagatgaatgcatccaaatcatggggggtatgggcttcatgaaggcttcatgaaggtacaggacggtcttctgcagagcctcggctgggccaggggtgggtaggcacatctcagcacgggcatataatttgtgtggccctgtgctagaacctggagtagagcgtgtgctccgagatcttcgcatcttccggatctttgaggggacaaatgacattcttcggctgtttgtggctctgcagggctgtatggacaaaggaaaggagctctctgggcttggcagtgctctaaagaatccctttgggaatgctggcctcctgctaggagaggcaggcaaacagctgaggcggcgggcagggctgggcagcggcctgagtctcagcggacttgtccacccggagttgagtcggagtggcgagctggcagtacgggctctggagcagtttgccactgtggtggaggccaagctgataaaacacaagaaggggattgtcaatgaacagtttctgctgcagcggctggcagacggggccatcgacctctatgccatggtggtggttctctcgagggcctcaagatccctgagtgagggccaccccacggcccagcatgaggctgcagctcggatccgagagggcatggccgccctgcagtctgacccctggcagcaagagctctaccgcaacttcaaaagcatctccaaggccttggtggagcggggtggtgtggtcaccagcaacccacttggcttctgaatactcccggccagggcctgtcccagttatgtgccttccctcaagccaaagccgaagcccctttccttaaggccctggtttgtcccgaaggggcctagtgttcccagcactgtgcctgctctcaagagcacttactgcctcgcaaataataaaaatttctagccagtca

SEQ ID NO: 450895 - DNA, 3593 bp, Homo sapiens
cgcctctgcctctctgcccagataataagcaggccatggcggctatctacttttcttgagctgtagcgcaagtagttcccttgccatgtcaccaccgatcaagtgtgccacattagccggtccgttgcttctactaacttatgtactcacccaggcatccctataaatgagtcgtcgcgttagagaagtactgatatcgcctctctctacgaaggaagtgaacgatcccgccaagaatgacgctctggagatggtggaggagaccacttggcagggcctcaaggagctgggggcctttggtctgcaagtgcccagtgagctgggtggtgtgggcctttgcaacacccaggtgagggcgccctatcgccacatcccagtatgccataccccagcttggcagactcagctcttttgccatagacctagagactagggctaaggtctcttctaagcacctgccctgggtgcctgtgggatggatgttaactgtccaaacataacacaatttacatgcagtcccctaggcctgagccatgggcctcaccctggttcccaagtccttacaaatctctaagttggggattgcctaacaatagactgactagtagcaagtcaccctcctacctagacctaagacagaccagcattctctgctgtgccctttgcacaccccacttcttttctacacactggggatggcccaggtcaggcactgccctaggccaggaactgccctgttgcccacactctcctgttaaggtcaggtccccctgcagccagtgacaaccccagattcctgcttcccctccagtacgcccgtttggtggagatcgtgggcatgcatgaccttggcgtgggcattaccctgggggcccatcagagcatcggtttcaaaggcatcctgctctttggcacaaaggcccagaaagaaaaatacctccccaagctggcatctggtgaggcaaccctaggagagccagggattggggggcacactgggcttggcacagattaggccagttggcacttagattatcagatggctgagcatttcagttgggggaaggttttggggaggcatcacagtgtgctggttgggacatgcaaaagaactggatactcccaggtgttaagggggaactgcctgctggagggatggggaagtgggccgaggggactttgaagctcatcagaacttggggtaaagtagctctctccccaacagggagactgtggccgctttctgtctaaccgagccctcaagcgggtcagatgcagcctccatccgaacctctgctgtgcccagcccctgtggaaaatactataccctcaatggaagcaagctttggatcagcaacctgcctcccatttctccccttctcctccgcccaattccaggccccactgctccccgtcctccacgccctgaatatcccattcttccacagtaatgggggcctagcagacatcttcacggtctttgccaagacaccagttacagatccagccacaggagccgtgaaggagaagatcacagcttttgtggtggagaggggcttcgggggcattacccagtgagtgaatttgggttgggggagcttaggactgaggggcaggactgggctcctgggcagatggctgttgcaagtcaccctggggacgtgtgcaaaagccaaagcaggtggactgaatgtggcctttgggactaatatgtatgcaactgagctaaagttttggctccagcaaccaagtccaacacaaaataggacatagccaggcctccttagccctcagggcctgaggggaagtggtggctgtagcctctaatagtctagtggtcgtcattcctccctggtgcataaggagcgaaggagcagtttttcccccagtgacaacctgttgaacacacctctgctttcccacactgccctgacacagtgggccccctgagaagaagatgggcatcaaggcttcaaacacagcagaggtgttctttgatggagtacgggtgccatcggagaacgtgctgggtgaggttgggagtggcttcaaggttgccatgcacatcctcaacaatggaaggtttggcatggctgcggccctggcaggtaccatgagaggcatcattgctaaggcggcggtgagtaccctgcccgagtccctaggtaacccaaacagaagtctcactgtcccccttgccatgtgtccctgatcacttgcaggcactccctacactagaaactcctcccctaccagcagcccgacttgctagcttaggtctccatccagcgtagactgaactctggttgtatgcaaaacccatccctctggcgcaagcccagcccctctcctagggagactgcagaaccacactgaaccacagcgggatgtgtggaccctcttccaggtagatcatgccactaatcgtacccagtttggggagaaaattcacaactttgggctgatccaggagaagctggcacggatggttatgctgcagtatgtaactgagtccatggcttacatggtgagtgctaacatggaccagggagccacggacttccagatagaggccgccatcagcaaaatctttggctcgggtgaggtcccaggcatgctgggagggagtccagtttgggtgctcagctcccaaaaccagtctcatctgttctttgtccctaggaggcagcctggaaggtgacagatgaatgcatccaaatcatggggggtatgggcttcatgaaggcttcatgaaggtacaggacggtcttctgcagagcctcggctgggccaggggtgggtaggcacatctcagcacgggcatataatttgtgtggccctgtgctagaacctggagtagagcgtgtgctccgagatcttcgcatcttccggatctttgaggggacaaatgacattcttcggctgtttgtggctctgcagggctgtatggacaaaggaaaggagctctctgggcttggcagtgctctaaagaatccctttgggaatgctggcctcctgctaggagaggcaggcaaacagctgaggcggcgggcagggctgggcagcggcctgagtctcagcggacttgtccacccggagttgagtcggagtggcgagctggcagtacgggctctggagcagtttgccactgtggtggaggccaagctgataaaacacaagaaggggattgtcaatgaacagtttctgctgcagcggctggcagacggggccatcgacctctatgccatggtggtggttctctcgagggcctcaagatccctgagtgagggccaccccacggcccagcatgagaaaatgctctgtgacacctggtgtatcgaggctgcagctcggatccgagagggcatggccgccctgcagtctgacccctggcagcaagagctctaccgcaattggcttctgaatactcccggccagggcctgtcccagttatgtgccttccctcaagccaaagccgaagcccctttccttaaggccctggtttgtcccgaaggggcctagtgttcccagcactgtgcctgctctcaagagcacttactgcctcgcaaataataaaaatttctagccagtca

SEQ ID NO: 450896 - DNA, 3819 bp, Homo sapiens
cgcctctgcctctctgcccagataataagcaggccatggcggctatctacttttcttgagctgtagcgcaagtagttcccttgccatgtcaccaccgatcaagtgtgccacattagccggtccgttgcttctactaacttatgtactcacccaggcatccctataaatgagtcgtcgcgttagagaagtactgatatcgcctctctctacgaaggaagtgaacgatcccgccaagaatgacgctctggagatggtggaggagaccacttggcagggcctcaaggagctgggggcctttggtctgcaagtgcccagtgagctgggtggtgtgggcctttgcaacacccaggtgagggcgccctatcgccacatcccagtatgccataccccagcttggcagactcagctcttttgccatagacctagagactagggctaaggtctcttctaagcacctgccctgggtgcctgtgggatggatgttaactgtccaaacataacacaatttacatgcagtcccctaggcctgagccatgggcctcaccctggttcccaagtccttacaaatctctaagttggggattgcctaacaatagactgactagtagcaagtcaccctcctacctagacctaagacagaccagcattctctgctgtgccctttgcacaccccacttcttttctacacactggggatggcccaggtcaggcactgccctaggccaggaactgccctgttgcccacactctcctgttaaggtcaggtccccctgcagccagtgacaaccccagattcctgcttcccctccagtacgcccgtttggtggagatcgtgggcatgcatgaccttggcgtgggcattaccctgggggcccatcagagcatcggtttcaaaggcatcctgctctttggcacaaaggcccagaaagaaaaatacctccccaagctggcatctggtgaggcaaccctaggagagccagggattggggggcacactgggcttggcacagattaggccagttggcacttagattatcagatggctgagcatttcagttgggggaaggttttggggaggcatcacagtgtgctggttgggacatgcaaaagaactggatactcccaggtgttaagggggaactgcctgctggagggatggggaagtgggccgaggggactttgaagctcatcagaacttggggtaaagtagctctctccccaacagggagactgtggccgctttctgtctaaccgagccctcaagcgggtcagatgcagcctccatccgaacctctgctgtgcccagcccctgtggaaaatactataccctcaatggaagcaagctttggatcagcaacctgcctcccatttctccccttctcctccgcccaattccaggccccactgctccccgtcctccacgccctgaatatcccattcttccacagtaatgggggcctagcagacatcttcacggtctttgccaagacaccagttacagatccagccacaggagccgtgaaggagaagatcacagcttttgtggtggagaggggcttcgggggcattacccagtgagtgaatttgggttgggggagcttaggactgaggggcaggactgggctcctgggcagatggctgttgcaagtcaccctggggacgtgtgcaaaagccaaagcaggtggactgaatgtggcctttgggactaatatgtatgcaactgagctaaagttttggctccagcaaccaagtccaacacaaaataggacatagccaggcctccttagccctcagggcctgaggggaagtggtggctgtagcctctaatagtctagtggtcgtcattcctccctggtgcataaggagcgaaggagcagtttttcccccagtgacaacctgttgaacacacctctgctttcccacactgccctgacacagtgggccccctgagaagaagatgggcatcaaggcttcaaacacagcagaggtgttctttgatggagtacgggtgccatcggagaacgtgctgggtgaggttgggagtggcttcaaggttgccatgcacatcctcaacaatggaaggtttggcatggctgcggccctggcaggtaccatgagaggcatcattgctaaggcggcggtgagtaccctgcccgagtccctaggtaacccaaacagaagtctcactgtcccccttgccatgtgtccctgatcacttgcaggcactccctacactagaaactcctcccctaccagcagcccgacttgctagcttaggtctccatccagcgtagactgaactctggttgtatgcaaaacccatccctctggcgcaagcccagcccctctcctagggagactgcagaaccacactgaaccacagcgggatgtgtggaccctcttccaggtagatcatgccactaatcgtacccagtttggggagaaaattcacaactttgggctgatccaggagaagctggcacggatggttatgctgcagtatgtaactgagtccatggcttacatggtgagtgctaacatggaccagggagccacggacttccagatagaggccgccatcagcaaaatctttggctcgggtgaggtcccaggcatgctgggagggagtccagtttgggtgctcagctcccaaaaccagtctcatctgttctttgtccctaggaggcagcctggaaggtgacagatgaatgcatccaaatcatggggggtatgggcttcatgaaggcttcatgaaggtacaggacggtcttctgcagagcctcggctgggccaggggtgggtaggcacatctcagcacgggcatataatttgtgtggccctgtgctagaacctggagtagagcgtgtgctccgagatcttcgcatcttccggatctttgaggggacaaatgacattcttcggctgtttgtggctctgcagggctgtatggtaagacagagaattgggtgggggtagaggtggggaggacagtgagtcctgactgctggaccctcttcccccatagggacaaaggaaaggagctctctgggcttggcagtgctctaaagaatccctttgggaatgctggcctcctgctaggagaggcaggcaaacagctgaggcgggtaggcttagggccagagccaggggagggcagggtggtgtatggcaactaaccagtcattctccctcttcctctcaggcgggcagggctgggcagcggcctgagtctcagcggacttgtccacccggagttgagtcggagtggcgagctggcagtacgggctctggagcagtttgccactgtggtggaggccaagctgataaaacacaagaaggggattgtcaatgaacagtttctgctgcagcggctggcagacggggccatcgacctctatgccatggtggtggttctctcgaggggctccaagatccctgatgtgtggggcacccccacggggccagagatgtagagaaatgtgctttgtagcacccttgttgttatcgaggctgcagctcggatccgagagggcatggccgccctgcagtctgacccctggcagcaagagctctaccgcaacttcaaaagcatctccaaggccttggtggagcggggtggtgtggtcaccagcaacccacttggcttctgaatactcccggccagggcctgtcccagttatgtgccttccctcaagccaaagccgaagcccctttccttaaggccctggtttgtcccgaaggggcctagtgttcccagcactgtgcctgctctcaagagcacttactgcctcgcaaataataaaaatttctagccagtca

SEQ ID NO: 450897 - DNA, 3855 bp, Homo sapiens
cgcctctgcctctctgcccagataataagcaggccatggcggctatctacttttcttgagctgtagcgcaagtagttcccttgccatgtcaccaccgatcaagtgtgccacattagccggtccgttgcttctactaacttatgtactcacccaggcatccctataaatgagtcgtcgcgttagagaagtactgatatcgcctctctctacgaaggaagtgaacgatcccgccaagaatgacgctctggagatggtggaggagaccacttggcagggcctcaaggagctgggggcctttggtctgcaagtgcccagtgagctgggtggtgtgggcctttgcaacacccaggtgagggcgccctatcgccacatcccagtatgccataccccagcttggcagactcagctcttttgccatagacctagagactagggctaaggtctcttctaagcacctgccctgggtgcctgtgggatggatgttaactgtccaaacataacacaatttacatgcagtcccctaggcctgagccatgggcctcaccctggttcccaagtccttacaaatctctaagttggggattgcctaacaatagactgactagtagcaagtcaccctcctacctagacctaagacagaccagcattctctgctgtgccctttgcacaccccacttcttttctacacactggggatggcccaggtcaggcactgccctaggccaggaactgccctgttgcccacactctcctgttaaggtcaggtccccctgcagccagtgacaaccccagattcctgcttcccctccagtacgcccgtttggtggagatcgtgggcatgcatgaccttggcgtgggcattaccctgggggcccatcagagcatcggtttcaaaggcatcctgctctttggcacaaaggcccagaaagaaaaatacctccccaagctggcatctggtgaggcaaccctaggagagccagggattggggggcacactgggcttggcacagattaggccagttggcacttagattatcagatggctgagcatttcagttgggggaaggttttggggaggcatcacagtgtgctggttgggacatgcaaaagaactggatactcccaggtgttaagggggaactgcctgctggagggatggggaagtgggccgaggggactttgaagctcatcagaacttggggtaaagtagctctctccccaacagggagactgtggccgctttctgtctaaccgagccctcaagcgggtcagatgcagcctccatccgaacctctgctgtgcccagcccctgtggaaaatactataccctcaatggaagcaagctttggatcagcaacctgcctcccatttctccccttctcctccgcccaattccaggccccactgctccccgtcctccacgccctgaatatcccattcttccacagtaatgggggcctagcagacatcttcacggtctttgccaagacaccagttacagatccagccacaggagccgtgaaggagaagatcacagcttttgtggtggagaggggcttcgggggcattacccagtgagtgaatttgggttgggggagcttaggactgaggggcaggactgggctcctgggcagatggctgttgcaagtcaccctggggacgtgtgcaaaagccaaagcaggtggactgaatgtggcctttgggactaatatgtatgcaactgagctaaagttttggctccagcaaccaagtccaacacaaaataggacatagccaggcctccttagccctcagggcctgaggggaagtggtggctgtagcctctaatagtctagtggtcgtcattcctccctggtgcataaggagcgaaggagcagtttttcccccagtgacaacctgttgaacacacctctgctttcccacactgccctgacacagtgggccccctgagaagaagatgggcatcaaggcttcaaacacagcagaggtgttctttgatggagtacgggtgccatcggagaacgtgctgggtgaggttgggagtggcttcaaggttgccatgcacatcctcaacaatggaaggtttggcatggctgcggccctggcaggtaccatgagaggcatcattgctaaggcggcggtgagtaccctgcccgagtccctaggtaacccaaacagaagtctcactgtcccccttgccatgtgtccctgatcacttgcaggcactccctacactagaaactcctcccctaccagcagcccgacttgctagcttaggtctccatccagcgtagactgaactctggttgtatgcaaaacccatccctctggcgcaagcccagcccctctcctagggagactgcagaaccacactgaaccacagcgggatgtgtggaccctcttccaggtagatcatgccactaatcgtacccagtttggggagaaaattcacaactttgggctgatccaggagaagctggcacggatggttatgctgcagtatgtaactgagtccatggcttacatggtgagtgctaacatggaccagggagccacggacttccagatagaggccgccatcagcaaaatctttggctcgggtgaggtcccaggcatgctgggagggagtccagtttgggtgctcagctcccaaaaccagtctcatctgttctttgtccctaggaggcagcctggaaggtgacagatgaatgcatccaaatcatggggggtatgggcttcatgaaggcttcatgaaggtacaggacggtcttctgcagagcctcggctgggccaggggtgggtaggcacatctcagcacgggcatataatttgtgtggccctgtgctagaacctggagtagagcgtgtgctccgagatcttcgcatcttccggatctttgaggggacaaatgacattcttcggctgtttgtggctctgcagggctgtatggacaaaggaaaggagctctctgggcttggcagtgctctaaagaatccctttgggaatgctggcctcctgctaggagaggcaggcaaacagctgaggcggcgggcagggctgggcagcggcctgagtctcagcggacttgtccacccggagttgagtcggagtggcgagctggcagtacgggctctggagcagtttgccactgtggtggaggccaagctgataaaacacaagaaggggattgtcaatgaacagtttctgctgcagcggctggcagacggggccatcgacctctatgccatggtggtggttctctcgaggtgaggaggcaggcagggaatgcctgagccgcagggggcctgggcctggatcccagccggcccagatttattttcatctcctgcttcctgccagggcctcaagatccctgagtgagggccaccccacggcccagcatgagaaaatgctctgtgacacctggtgtatcgaggtgagactcggggctgccaagctcaggtgagggctggaggtgcaggcccaacccctccttccctctccccaggctgcgctgcagctcggatccgagagggcatggccgccctgcagtctgacccctggcagcaagagctctaccgcaacttcaaaagcatctccaaggccttggtggagcggggtggtgtggtcaccagcaacccacttggcttctgaatactcccggccagggcctgtcccagttatgtgccttccctcaagccaaagccgaagcccctttccttaaggccctggtttgtcccgaaggggcctagtgttcccagcactgtgcctgctctcaagagcacttactgcctcgcaaataataaaaatttctagccagtcaaaaaaaaataaaagtgcaccaagactagaagg

SEQ ID NO: 450898 - DNA, 3443 bp, Homo sapiens
cgcctctgcctctctgcccagataataagcaggccatggcggctatctacttttcttgagctgtagcgcaagtagttcccttgccatgtcaccaccgatcaagtgtgccacattagccggtccgttgcttctactaacttatgtactcacccaggcatccctataaatgagtcgtcgcgttagagaagtactgatatcgcctctctctacgaaggaagtgaacgatcccgccaagaatgacgctctggagatggtggaggagaccacttggcagggcctcaaggagctgggggcctttggtctgcaagtgcccagtgagctgggtggtgtgggcctttgcaacacccaggtgagggcgccctatcgccacatcccagtatgccataccccagcttggcagactcagctcttttgccatagacctagagactagggctaaggtctcttctaagcacctgccctgggtgcctgtgggatggatgttaactgtccaaacataacacaatttacatgcagtcccctaggcctgagccatgggcctcaccctggttcccaagtccttacaaatctctaagttggggattgcctaacaatagactgactagtagcaagtcaccctcctacctagacctaagacagaccagcattctctgctgtgccctttgcacaccccacttcttttctacacactggggatggcccaggtcaggcactgccctaggccaggaactgccctgttgcccacactctcctgttaaggtcaggtccccctgcagccagtgacaaccccagattcctgcttcccctccagtacgcccgtttggtggagatcgtgggcatgcatgaccttggcgtgggcattaccctgggggcccatcagagcatcggtttcaaaggcatcctgctctttggcacaaaggcccagaaagaaaaatacctccccaagctggcatctggtgaggcaaccctaggagagccagggattggggggcacactgggcttggcacagattaggccagttggcacttagattatcagatggctgagcatttcagttgggggaaggttttggggaggcatcacagtgtgctggttgggacatgcaaaagaactggatactcccaggtgttaagggggaactgcctgctggagggatggggaagtgggccgaggggactttgaagctcatcagaacttggggtaaagtagctctctccccaacagggagactgtggccgctttctgtctaaccgagccctcaagcgggtcagatgcagcctccatccgaacctctgctgtgcccagcccctgtggaaaatactataccctcaatggaagcaagctttggatcagcaacctgcctcccatttctccccttctcctccgcccaattccaggccccactgctccccgtcctccacgccctgaatatcccattcttccacagtaatgggggcctagcagacatcttcacggtctttgccaagacaccagttacagatccagccacaggagccgtgaaggagaagatcacagcttttgtggtggagaggggcttcgggggcattacccagtgagtgaatttgggttgggggagcttaggactgaggggcaggactgggctcctgggcagatggctgttgcaagtcaccctggggacgtgtgcaaaagccaaagcaggtggactgaatgtggcctttgggactaatatgtatgcaactgagctaaagttttggctccagcaaccaagtccaacacaaaataggacatagccaggcctccttagccctcagggcctgaggggaagtggtggctgtagcctctaatagtctagtggtcgtcattcctccctggtgcataaggagcgaaggagcagtttttcccccagtgacaacctgttgaacacacctctgctttcccacactgccctgacacagtgggccccctgagaagaagatgggcatcaaggcttcaaacacagcagaggtgttctttgatggagtacgggtgccatcggagaacgtgctgggtgaggttgggagtggcttcaaggttgccatgcacatcctcaacaatggaaggtttggcatggctgcggccctggcaggtaccatgagaggcatcattgctaaggcggcggtgagtaccctgcccgagtccctaggtaacccaaacagaagtctcactgtcccccttgccatgtgtccctgatcacttgcaggcactccctacactagaaactcctcccctaccagcagcccgacttgctagcttaggtctccatccagcgtagactgaactctggttgtatgcaaaacccatccctctggcgcaagcccagcccctctcctagggagactgcagaaccacactgaaccacagcgggatgtgtggaccctcttccaggtagatcatgccactaatcgtacccagtttggggagaaaattcacaactttgggctgatccaggagaagctggcacggatggttatgctgcagtatgtaactgagtccatggcttacatggtgagtgctaacatggaccagggagccacggacttccagatagaggccgccatcagcaaaatctttggctcgggtgaggtcccaggcatgctgggagggagtccagtttgggtgctcagctcccaaaaccagtctcatctgttctttgtccctaggaggcagcctggaaggtgacagatgaatgcatccaaatcatggggggtatgggcttcatgaaggcttcatgaaggtacaggacggtcttctgcagagcctcggctgggccaggggtgggtaggcacatctcagcacgggcatataatttgtgtggccctgtgctagaacctggagtagagcgtgtgctccgagatcttcgcatcttccggatctttgaggggacaaatgacattcttcggctgtttgtggctctgcagggctgtatggacaaaggaaaggagctctctgggcttggcagtgctctaaagaatccctttgggaatgctggcctcctgctaggagaggcaggcaaacagctgaggcggcgggcagggctgggcagcggcctgagtctcagcggacttgtccacccggagttgagtcggagtggcgagctggcagtacgggctctggagcagtttgccactgtggtggaggccaagctgataaaacacaagaaggggattgtcaatgaacagtttctgctgcagcggctggcagacggggccatcgacctctatgccatggtggtggttctctcgagggcctcaagatccctgagtgagggccaccccacggcccagcatgagaaaatgctctgtgacacctggtgtatcgagctgcagctcaggatcacgagacggcatgcacgctttctgtctaaccgagccctcaagcgggtcagatgcagcctccatccgaaccttttctttcccagcca

SEQ ID NO: 450899 - DNA, 3248 bp, Homo sapiens
cgcctctgcctctctgcccagataataagcaggccatggcggctatctacttttcttgagctgtagcgcaagtagttcccttgccatgtcaccaccgatcaagtgtgccacattagccggtccgttgcttctactaacttatgtactcacccaggcatccctataaatgagtcgtcgcgttagagaagtactgatatcgcctctctctacgaaggaagtgaacgatcccgccaagaatgacgctctggagatggtggaggagaccacttggcagggcctcaaggagctgggggcctttggtctgcaagtgcccagtgagctgggtggtgtgggcctttgcaacacccaggtgagggcgccctatcgccacatcccagtatgccataccccagcttggcagactcagctcttttgccatagacctagagactagggctaaggtctcttctaagcacctgccctgggtgcctgtgggatggatgttaactgtccaaacataacacaatttacatgcagtcccctaggcctgagccatgggcctcaccctggttcccaagtccttacaaatctctaagttggggattgcctaacaatagactgactagtagcaagtcaccctcctacctagacctaagacagaccagcattctctgctgtgccctttgcacaccccacttcttttctacacactggggatggcccaggtcaggcactgccctaggccaggaactgccctgttgcccacactctcctgttaaggtcaggtccccctgcagccagtgacaaccccagattcctgcttcccctccagtacgcccgtttggtggagatcgtgggcatgcatgaccttggcgtgggcattaccctgggggcccatcagagcatcggtttcaaaggcatcctgctctttggcacaaaggcccagaaagaaaaatacctccccaagctggcatctggtgaggcaaccctaggagagccagggattggggggcacactgggcttggcacagattaggccagttggcacttagattatcagatggctgagcatttcagttgggggaaggttttggggaggcatcacagtgtgctggttgggacatgcaaaagaactggatactcccaggtgttaagggggaactgcctgctggagggatggggaagtgggccgaggggactttgaagctcatcagaacttggggtaaagtagctctctccccaacagggagactgtggccgctttctgtctaaccgagccctcaagcgggtcagatgcagcctccatccgaacctctgctgtgcccagcccctgtggaaaatactataccctcaatggaagcaagctttggatcagcaacctgcctcccatttctccccttctcctccgcccaattccaggccccactgctccccgtcctccacgccctgaatatcccattcttccacagtaatgggggcctagcagacatcttcacggtctttgccaagacaccagttacagatccagccacaggagccgtgaaggagaagatcacagcttttgtggtggagaggggcttcgggggcattacccagtgagtgaatttgggttgggggagcttaggactgaggggcaggactgggctcctgggcagatggctgttgcaagtcaccctggggacgtgtgcaaaagccaaagcaggtggactgaatgtggcctttgggactaatatgtatgcaactgagctaaagttttggctccagcaaccaagtccaacacaaaataggacatagccaggcctccttagccctcagggcctgaggggaagtggtggctgtagcctctaatagtctagtggtcgtcattcctccctggtgcataaggagcgaaggagcagtttttcccccagtgacaacctgttgaacacacctctgctttcccacactgccctgacacagtgggccccctgagaagaagatgggcatcaaggcttcaaacacagcagaggtgttctttgatggagtacgggtgccatcggagaacgtgctgggtgaggttgggagtggcttcaaggttgccatgcacatcctcaacaatggaaggtttggcatggctgcggccctggcaggtaccatgagaggcatcattgctaaggcggcggtgagtaccctgcccgagtccctaggtaacccaaacagaagtctcactgtcccccttgccatgtgtccctgatcacttgcaggcactccctacactagaaactcctcccctaccagcagcccgacttgctagcttaggtctccatccagcgtagactgaactctggttgtatgcaaaacccatccctctggcgcaagcccagcccctctcctagggagactgcagaaccacactgaaccacagcgggatgtgtggaccctcttccaggtagatcatgccactaatcgtacccagtttggggagaaaattcacaactttgggctgatccaggagaagctggcacggatggttatgctgcagtatgtaactgagtccatggcttacatggtgagtgctaacatggaccagggagccacggacttccagatagaggccgccatcagcaaaatctttggctcgggtgaggtcccaggcatgctgggagggagtccagtttgggtgctcagctcccaaaaccagtctcatctgttctttgtccctaggaggcagcctggaaggtgacagatgaatgcatccaaatcatggggggtatgggcttcatgaaggcttcatgaaggtacaggacggtcttctgcagagcctcggctgggccaggggtgggtaggcacatctcagcacgggcatataatttgtgtggccctgtgctagaacctggagtagagcgtgtgctccgagatcttcgcatcttccggatctttgaggggacaaatgacattcttcggctgtttgtggctctgcagggctgtatggacaaaggaaaggagctctctgggcttggcagtgctctaaagaatccctttgggaatgctggcctcctgctaggagaggcaggcaaacagctgaggcggcgggcagggctgggcagcggcctgagtctcagcggacttgtccacccggagttgagtcggagtggcgagctggcagtacgggctctggagcagtttgccactgtggtggaggccaagctgataaaacacaagaaggggattgtcaatgaacagtttctgctgcagcggcgttggatgcagtcagcggcgttggatgcagt

SEQ ID NO: 450900 - DNA, 3076 bp, Homo sapiens
cgcctctgcctctctgcccagataataagcaggccatggcggctatctacttttcttgagctgtagcgcaagtagttcccttgccatgtcaccaccgatcaagtgtgccacattagccggtccgttgcttctactaacttatgtactcacccaggcatccctataaatgagtcgtcgcgttagagaagtactgatatcgcctctctctacgaaggaagtgaacgatcccgccaagaatgacgctctggagatggtggaggagaccacttggcagggcctcaaggagctgggggcctttggtctgcaagtgcccagtgagctgggtggtgtgggcctttgcaacacccaggtgagggcgccctatcgccacatcccagtatgccataccccagcttggcagactcagctcttttgccatagacctagagactagggctaaggtctcttctaagcacctgccctgggtgcctgtgggatggatgttaactgtccaaacataacacaatttacatgcagtcccctaggcctgagccatgggcctcaccctggttcccaagtccttacaaatctctaagttggggattgcctaacaatagactgactagtagcaagtcaccctcctacctagacctaagacagaccagcattctctgctgtgccctttgcacaccccacttcttttctacacactggggatggcccaggtcaggcactgccctaggccaggaactgccctgttgcccacactctcctgttaaggtcaggtccccctgcagccagtgacaaccccagattcctgcttcccctccagtacgcccgtttggtggagatcgtgggcatgcatgaccttggcgtgggcattaccctgggggcccatcagagcatcggtttcaaaggcatcctgctctttggcacaaaggcccagaaagaaaaatacctccccaagctggcatctggtgaggcaaccctaggagagccagggattggggggcacactgggcttggcacagattaggccagttggcacttagattatcagatggctgagcatttcagttgggggaaggttttggggaggcatcacagtgtgctggttgggacatgcaaaagaactggatactcccaggtgttaagggggaactgcctgctggagggatggggaagtgggccgaggggactttgaagctcatcagaacttggggtaaagtagctctctccccaacagggagactgtggccgctttctgtctaaccgagccctcaagcgggtcagatgcagcctccatccgaacctctgctgtgcccagcccctgtggaaaatactataccctcaatggaagcaagctttggatcagcaacctgcctcccatttctccccttctcctccgcccaattccaggccccactgctccccgtcctccacgccctgaatatcccattcttccacagtaatgggggcctagcagacatcttcacggtctttgccaagacaccagttacagatccagccacaggagccgtgaaggagaagatcacagcttttgtggtggagaggggcttcgggggcattacccagtgagtgaatttgggttgggggagcttaggactgaggggcaggactgggctcctgggcagatggctgttgcaagtcaccctggggacgtgtgcaaaagccaaagcaggtggactgaatgtggcctttgggactaatatgtatgcaactgagctaaagttttggctccagcaaccaagtccaacacaaaataggacatagccaggcctccttagccctcagggcctgaggggaagtggtggctgtagcctctaatagtctagtggtcgtcattcctccctggtgcataaggagcgaaggagcagtttttcccccagtgacaacctgttgaacacacctctgctttcccacactgccctgacacagtgggccccctgagaagaagatgggcatcaaggcttcaaacacagcagaggtgttctttgatggagtacgggtgccatcggagaacgtgctgggtgaggttgggagtggcttcaaggttgccatgcacatcctcaacaatggaaggtttggcatggctgcggccctggcaggtaccatgagaggcatcattgctaaggcggcggtgagtaccctgcccgagtccctaggtaacccaaacagaagtctcactgtcccccttgccatgtgtccctgatcacttgcaggcactccctacactagaaactcctcccctaccagcagcccgacttgctagcttaggtctccatccagcgtagactgaactctggttgtatgcaaaacccatccctctggcgcaagcccagcccctctcctagggagactgcagaaccacactgaaccacagcgggatgtgtggaccctcttccaggtagatcatgccactaatcgtacccagtttggggagaaaattcacaactttgggctgatccaggagaagctggcacggatggttatgctgcagtatgtaactgagtccatggcttacatggtgagtgctaacatggaccagggagccacggacttccagatagaggccgccatcagcaaaatctttggctcgggtgaggtcccaggcatgctgggagggagtccagtttgggtgctcagctcccaaaaccagtctcatctgttctttgtccctaggaggcagcctggaaggtgacagatgaatgcatccaaatcatggggggtatgggcttcatgaaggcttcatgaaggtacaggacggtcttctgcagagcctcggctgggccaggggtgggtaggcacatctcagcacgggcatataatttgtgtggccctgtgctagaacctggagtagagcgtgtgctccgagatcttcgcatcttccggatctttgaggggacaaatgacattcttcggctgtttgtggctctgcagggctgtatggacaaaggaaaggagctctctgggcttggcagtgctctaaagaatccctttgggaatgctggcctcctgctaggagaggcaggcaaacagctgaggcgtgagacaccgaccagcttgaacacgcgac

SEQ ID NO: 450901 - DNA, 3069 bp, Homo sapiens
cgcctctgcctctctgcccagataataagcaggccatggcggctatctacttttcttgagctgtagcgcaagtagttcccttgccatgtcaccaccgatcaagtgtgccacattagccggtccgttgcttctactaacttatgtactcacccaggcatccctataaatgagtcgtcgcgttagagaagtactgatatcgcctctctctacgaaggaagtgaacgatcccgccaagaatgacgctctggagatggtggaggagaccacttggcagggcctcaaggagctgggggcctttggtctgcaagtgcccagtgagctgggtggtgtgggcctttgcaacacccaggtgagggcgccctatcgccacatcccagtatgccataccccagcttggcagactcagctcttttgccatagacctagagactagggctaaggtctcttctaagcacctgccctgggtgcctgtgggatggatgttaactgtccaaacataacacaatttacatgcagtcccctaggcctgagccatgggcctcaccctggttcccaagtccttacaaatctctaagttggggattgcctaacaatagactgactagtagcaagtcaccctcctacctagacctaagacagaccagcattctctgctgtgccctttgcacaccccacttcttttctacacactggggatggcccaggtcaggcactgccctaggccaggaactgccctgttgcccacactctcctgttaaggtcaggtccccctgcagccagtgacaaccccagattcctgcttcccctccagtacgcccgtttggtggagatcgtgggcatgcatgaccttggcgtgggcattaccctgggggcccatcagagcatcggtttcaaaggcatcctgctctttggcacaaaggcccagaaagaaaaatacctccccaagctggcatctggtgaggcaaccctaggagagccagggattggggggcacactgggcttggcacagattaggccagttggcacttagattatcagatggctgagcatttcagttgggggaaggttttggggaggcatcacagtgtgctggttgggacatgcaaaagaactggatactcccaggtgttaagggggaactgcctgctggagggatggggaagtgggccgaggggactttgaagctcatcagaacttggggtaaagtagctctctccccaacagggagactgtggccgctttctgtctaaccgagccctcaagcgggtcagatgcagcctccatccgaacctctgctgtgcccagcccctgtggaaaatactataccctcaatggaagcaagctttggatcagcaacctgcctcccatttctccccttctcctccgcccaattccaggccccactgctccccgtcctccacgccctgaatatcccattcttccacagtaatgggggcctagcagacatcttcacggtctttgccaagacaccagttacagatccagccacaggagccgtgaaggagaagatcacagcttttgtggtggagaggggcttcgggggcattacccagtgagtgaatttgggttgggggagcttaggactgaggggcaggactgggctcctgggcagatggctgttgcaagtcaccctggggacgtgtgcaaaagccaaagcaggtggactgaatgtggcctttgggactaatatgtatgcaactgagctaaagttttggctccagcaaccaagtccaacacaaaataggacatagccaggcctccttagccctcagggcctgaggggaagtggtggctgtagcctctaatagtctagtggtcgtcattcctccctggtgcataaggagcgaaggagcagtttttcccccagtgacaacctgttgaacacacctctgctttcccacactgccctgacacagtgggccccctgagaagaagatgggcatcaaggcttcaaacacagcagaggtgttctttgatggagtacgggtgccatcggagaacgtgctgggtgaggttgggagtggcttcaaggttgccatgcacatcctcaacaatggaaggtttggcatggctgcggccctggcaggtaccatgagaggcatcattgctaaggcggcggtgagtaccctgcccgagtccctaggtaacccaaacagaagtctcactgtcccccttgccatgtgtccctgatcacttgcaggcactccctacactagaaactcctcccctaccagcagcccgacttgctagcttaggtctccatccagcgtagactgaactctggttgtatgcaaaacccatccctctggcgcaagcccagcccctctcctagggagactgcagaaccacactgaaccacagcgggatgtgtggaccctcttccaggtagatcatgccactaatcgtacccagtttggggagaaaattcacaactttgggctgatccaggagaagctggcacggatggttatgctgcagtatgtaactgagtccatggcttacatggtgagtgctaacatggaccagggagccacggacttccagatagaggccgccatcagcaaaatctttggctcgggtgaggtcccaggcatgctgggagggagtccagtttgggtgctcagctcccaaaaccagtctcatctgttctttgtccctaggaggcagcctggaaggtgacagatgaatgcatccaaatcatggggggtatgggcttcatgaaggcttcatgaaggtacaggacggtcttctgcagagcctcggctgggccaggggtgggtaggcacatctcagcacgggcatataatttgtgtggccctgtgctagaacctggagtagagcgtgtgctccgagatcttcgcatcttccggatctttgaggggacaaatgacattcttcggctgtttgtggctctgcagggctgtatggacaaaggaaaggagctctctgggcttggcagtgctctaaagaatccctttgggaatgctggcctcctgctctcaagagcacttactgcctcgcaaataataaaaatttctagccagtca

SEQ ID NO: 450902 - DNA, 302 bp, Homo sapiens
gtgggaatgttcaaaggccagctcaccacagatcaggtgttcccatacccgtccggtaagggaagggataatcagagctgggtggggccagggtggtttcccctgccagcctggcctgaccagcctgtcccccaccctctgcagtgctcaacgaagagcagacacagtttcttaaagagctggtggagcctgtgtcccgtttcttcgaggtaaggaatgactcggggcttggtccctggtgaggtgtttggagatgttaagctcaaaaggagcctggatgtgggatcctgtgccttccccag

SEQ ID NO: 450903 - DNA, 560 bp, Homo sapiens
atcccccgcgctgcaggacattcggcaccaggccaagctgataaaacacaagaagggcattgtcaatgaacagtttctgctgcagcggctggcagacggggccatcgacctctatgccatggtggtggttctctcgagggcctcaagatccctgagtgagggccaccccacggcccagcatgagaaaatgctctgtgacacctggtgtatcgaggctgcagctcggatccgagagggcatggccgccctgcagtctgacccctggcagcaagagctctaccgcaacttcaaaagcatctccaaggccttggtggagcggggtggtgtggtcaccagcaacccacttggcttctgaatactcccggccagggcctgtcccagttatgtgccttccctcaagccaaagccgaagcccctttccttaaggccctggtttgtcccgaaggggcctagtgttcccagcactgtgcctgctctcaagagcacttactgcctcgcaaataataaaaatttctagccagtcaacacctttcatacaaaaaaacctcgagctcgtcccc

SEQ ID NO: 450904 - DNA, 557 bp, Homo sapiens
  misc_feature (557)..(557): n is a, c, g, or t
actagttctagctcgcgatctagaactaggtggctctgcagggctgtatggacaaaggaaaggagctctctgggcttggcagtgctctaaagaatccctttgggaatgctggcctcctgctaggagaggcaggcaaacagctgaggcggcgggcagggctgggcagcggcctgagtctcagcggacttgtccattcggagatgcaggcggctcggatggccgcgagcttggggcggcagctgctgaggctcgggggcggaagctcgcggctcacggcgctcctggggcagccccggcccggccctgcccggcggccctatgccgggggtgccgctcagctggctctggacaagtcagattcccacccctctgacgctctgaccaggaaaaaaccggccaaggcggaatctaagtcctttgctgtgggaatgttcaaaggccagctcaccacagatcaggtgttcccatacccgtccgtgcttcacgaagagcagacacaagttcttaaagagctggtggtgggtcaccagcccacttggcttctgtctcccggccgn

SEQ ID NO: 450905 - DNA, 3729 bp, Homo sapiens
cgcctctgcctctctgcccagataataagcaggccatggcggctatctacttttcttgagctgtagcgcaagtagttcccttgccatgtcaccaccgatcaagtgtgccacattagccggtccgttgcttctactaacttatgtactcacccaggcatccctataaatgagtcgtcgcgttagagaagtactgatatcgcctctctctacgaaggaagtgaacgatcccgccaagaatgacgctctggagatggtggaggagaccacttggcagggcctcaaggagctgggggcctttggtctgcaagtgcccagtgagctgggtggtgtgggcctttgcaacacccaggtgagggcgccctatcgccacatcccagtatgccataccccagcttggcagactcagctcttttgccatagacctagagactagggctaaggtctcttctaagcacctgccctgggtgcctgtgggatggatgttaactgtccaaacataacacaatttacatgcagtcccctaggcctgagccatgggcctcaccctggttcccaagtccttacaaatctctaagttggggattgcctaacaatagactgactagtagcaagtcaccctcctacctagacctaagacagaccagcattctctgctgtgccctttgcacaccccacttcttttctacacactggggatggcccaggtcaggcactgccctaggccaggaactgccctgttgcccacactctcctgttaaggtcaggtccccctgcagccagtgacaaccccagattcctgcttcccctccagtacgcccgtttggtggagatcgtgggcatgcatgaccttggcgtgggcattaccctgggggcccatcagagcatcggtttcaaaggcatcctgctctttggcacaaaggcccagaaagaaaaatacctccccaagctggcatctggtgaggcaaccctaggagagccagggattggggggcacactgggcttggcacagattaggccagttggcacttagattatcagatggctgagcatttcagttgggggaaggttttggggaggcatcacagtgtgctggttgggacatgcaaaagaactggatactcccaggtgttaagggggaactgcctgctggagggatggggaagtgggccgaggggactttgaagctcatcagaacttggggtaaagtagctctctccccaacagggagactgtggccgctttctgtctaaccgagccctcaagcgggtcagatgcagcctccatccgaacctctgctgtgcccagcccctgtggaaaatactataccctcaatggaagcaagctttggatcagcaacctgcctcccatttctccccttctcctccgcccaattccaggccccactgctccccgtcctccacgccctgaatatcccattcttccacagtaatgggggcctagcagacatcttcacggtctttgccaagacaccagttacagatccagccacaggagccgtgaaggagaagatcacagcttttgtggtggagaggggcttcgggggcattacccagtgagtgaatttgggttgggggagcttaggactgaggggcaggactgggctcctgggcagatggctgttgcaagtcaccctggggacgtgtgcaaaagccaaagcaggtggactgaatgtggcctttgggactaatatgtatgcaactgagctaaagttttggctccagcaaccaagtccaacacaaaataggacatagccaggcctccttagccctcagggcctgaggggaagtggtggctgtagcctctaatagtctagtggtcgtcattcctccctggtgcataaggagcgaaggagcagtttttcccccagtgacaacctgttgaacacacctctgctttcccacactgccctgacacagtgggccccctgagaagaagatgggcatcaaggcttcaaacacagcagaggtgttctttgatggagtacgggtgccatcggagaacgtgctgggtgaggttgggagtggcttcaaggttgccatgcacatcctcaacaatggaaggtttggcatggctgcggccctggcaggtaccatgagaggcatcattgctaaggcggcggtgagtaccctgcccgagtccctaggtaacccaaacagaagtctcactgtcccccttgccatgtgtccctgatcacttgcaggcactccctacactagaaactcctcccctaccagcagcccgacttgctagcttaggtctccatccagcgtagactgaactctggttgtatgcaaaacccatccctctggcgcaagcccagcccctctcctagggagactgcagaaccacactgaaccacagcgggatgtgtggaccctcttccaggtagatcatgccactaatcgtacccagtttggggagaaaattcacaactttgggctgatccaggagaagctggcacggatggttatgctgcagtatgtaactgagtccatggcttacatggtgagtgctaacatggaccagggagccacggacttccagatagaggccgccatcagcaaaatctttggctcgggtgaggtcccaggcatgctgggagggagtccagtttgggtgctcagctcccaaaaccagtctcatctgttctttgtccctaggaggcagcctggaaggtgacagatgaatgcatccaaatcatggggggtatgggcttcatgaaggcttcatgaaggtacaggacggtcttctgcagagcctcggctgggccaggggtgggtaggcacatctcagcacgggcatataatttgtgtggccctgtgctagaacctggagtagagcgtgtgctccgagatcttcgcatcttccggatctttgaggggacaaatgacattcttcggctgtttgtggctctgcagggctgtatggtaagacagagaattgggtgggggtagaggtggggaggacagtgagtcctgactgctggaccctcttcccccatagggacaaaggaaaggagctctctgggcttggcagtgctctaaagaatccctttgggaatgctggcctcctgctaggagaggcaggcaaacagctgaggcggcgggcagggctgggcagcggcctgagtctcagcggacttgtccacccggagttgagtcggagtggcgagctggcagtacgggctctggagcagtttgccactgtggtggaggccaagctgataaaacacaagaaggggattgtcaatgaacagtttctgctgcagcggctggcagacggggccatcgacctctatgccatggtggtggttctctcgagggcctcaagatccctgagtgagggccaccccacggcccagcatgagaaaatgctctgtgacacctggtgtatcgaggctgcagctcggatccgagagggcatggccgccctgcagtctgacccctggcagcaagagctctaccgcaacttcaaaagcatctccaaggccttggtggagcggggtggtgtggtcaccagcaacccacttggcttctgaatactcccggccagggcctgtcccagttatgtgccttccctcaagccaaagccgaagcccctttccttaaggccctggtttgtcccgaaggggcctagtgttcccagcactgtgcctgctctcaagagcacttactgcctcgcaaataataaaaatttctagccagtca

SEQ ID NO: 450906 - DNA, 3892 bp, Homo sapiens
cgcctctgcctctctgcccagataataagcaggccatggcggctatctacttttcttgagctgtagcgcaagtagttcccttgccatgtcaccaccgatcaagtgtgccacattagccggtccgttgcttctactaacttatgtactcacccaggcatccctataaatgagtcgtcgcgttagagaagtactgatatcgcctctctctacgaaggaagtgaacgatcccgccaagaatgacgctctggagatggtggaggagaccacttggcagggcctcaaggagctgggggcctttggtctgcaagtgcccagtgagctgggtggtgtgggcctttgcaacacccaggtgagggcgccctatcgccacatcccagtatgccataccccagcttggcagactcagctcttttgccatagacctagagactagggctaaggtctcttctaagcacctgccctgggtgcctgtgggatggatgttaactgtccaaacataacacaatttacatgcagtcccctaggcctgagccatgggcctcaccctggttcccaagtccttacaaatctctaagttggggattgcctaacaatagactgactagtagcaagtcaccctcctacctagacctaagacagaccagcattctctgctgtgccctttgcacaccccacttcttttctacacactggggatggcccaggtcaggcactgccctaggccaggaactgccctgttgcccacactctcctgttaaggtcaggtccccctgcagccagtgacaaccccagattcctgcttcccctccagtacgcccgtttggtggagatcgtgggcatgcatgaccttggcgtgggcattaccctgggggcccatcagagcatcggtttcaaaggcatcctgctctttggcacaaaggcccagaaagaaaaatacctccccaagctggcatctggtgaggcaaccctaggagagccagggattggggggcacactgggcttggcacagattaggccagttggcacttagattatcagatggctgagcatttcagttgggggaaggttttggggaggcatcacagtgtgctggttgggacatgcaaaagaactggatactcccaggtgttaagggggaactgcctgctggagggatggggaagtgggccgaggggactttgaagctcatcagaacttggggtaaagtagctctctccccaacagggagactgtggccgctttctgtctaaccgagccctcaagcgggtcagatgcagcctccatccgaacctctgctgtgcccagcccctgtggaaaatactataccctcaatggaagcaagctttggatcagcaacctgcctcccatttctccccttctcctccgcccaattccaggccccactgctccccgtcctccacgccctgaatatcccattcttccacagtaatgggggcctagcagacatcttcacggtctttgccaagacaccagttacagatccagccacaggagccgtgaaggagaagatcacagcttttgtggtggagaggggcttcgggggcattacccagtgagtgaatttgggttgggggagcttaggactgaggggcaggactgggctcctgggcagatggctgttgcaagtcaccctggggacgtgtgcaaaagccaaagcaggtggactgaatgtggcctttgggactaatatgtatgcaactgagctaaagttttggctccagcaaccaagtccaacacaaaataggacatagccaggcctccttagccctcagggcctgaggggaagtggtggctgtagcctctaatagtctagtggtcgtcattcctccctggtgcataaggagcgaaggagcagtttttcccccagtgacaacctgttgaacacacctctgctttcccacactgccctgacacagtgggccccctgagaagaagatgggcatcaaggcttcaaacacagcagaggtgttctttgatggagtacgggtgccatcggagaacgtgctgggtgaggttgggagtggcttcaaggttgccatgcacatcctcaacaatggaaggtttggcatggctgcggccctggcaggtaccatgagaggcatcattgctaaggcggcggtgagtaccctgcccgagtccctaggtaacccaaacagaagtctcactgtcccccttgccatgtgtccctgatcacttgcaggcactccctacactagaaactcctcccctaccagcagcccgacttgctagcttaggtctccatccagcgtagactgaactctggttgtatgcaaaacccatccctctggcgcaagcccagcccctctcctagggagactgcagaaccacactgaaccacagcgggatgtgtggaccctcttccaggtagatcatgccactaatcgtacccagtttggggagaaaattcacaactttgggctgatccaggagaagctggcacggatggttatgctgcagtatgtaactgagtccatggcttacatggtgagtgctaacatggaccagggagccacggacttccagatagaggccgccatcagcaaaatctttggctcgggtgaggtcccaggcatgctgggagggagtccagtttgggtgctcagctcccaaaaccagtctcatctgttctttgtccctaggaggcagcctggaaggtgacagatgaatgcatccaaatcatggggggtatgggcttcatgaaggcttcatgaaggtacaggacggtcttctgcagagcctcggctgggccaggggtgggtaggcacatctcagcacgggcatataatttgtgtggccctgtgctagaacctggagtagagcgtgtgctccgagatcttcgcatcttccggatctttgaggggacaaatgacattcttcggctgtttgtggctctgcagggctgtatggtaagacagagaattgggtgggggtagaggtggggaggacagtgagtcctgactgctggaccctcttcccccatagggacaaaggaaaggagctctctgggcttggcagtgctctaaagaatccctttgggaatgctggcctcctgctaggagaggcaggcaaacagctgaggcgggtaggcttagggccagagccaggggagggcagggtggtgtatggcaactaaccagtcattctccctcttcctctcaggcgggcagggctgggcagcggcctgagtctcagcggacttgtccacccggagttgagtcggagtggcgagctggtaagcggccaggggtccaggagagcctgcatcagggactgcaccgatggcccctctgagccccgcactgtccccatctcttaaggcagtacgggctctggagcagtttgccactgtggtggaggccaagctgataaaacacaagaaggggattgtcaatgaacagtttctgctgcagcggctggcagacggggccatcgacctctatgccatggtggtggttctctcgagggcctcaagatccctgagtgagggccaccccacggcccagcatgagaaaatgctctgtgacacctggtgtatcgaggctgcagctcggatccgagagggcatggccgccctgcagtctgacccctggcagcaagagctctaccgcaacttcaaaagcatctccaaggccttggtggagcggggtggtgtggtcaccagcaacccacttggcttctgaatactcccggccagggcctgtcccagttatgtgccttccctcaagccaaagccgaagcccctttccttaaggccctggtttgtcccgaaggggcctagtgttcccagcactgtgcctgctctcaagagcacttactgcctcgcaaataataaaaatttctagccagtca

SEQ ID NO: 450907 - DNA, 3684 bp, Homo sapiens
cgcctctgcctctctgcccagataataagcaggccatggcggctatctacttttcttgagctgtagcgcaagtagttcccttgccatgtcaccaccgatcaagtgtgccacattagccggtccgttgcttctactaacttatgtactcacccaggcatccctataaatgagtcgtcgcgttagagaagtactgatatcgcctctctctacgaaggaagtgaacgatcccgccaagaatgacgctctggagatggtggaggagaccacttggcagggcctcaaggagctgggggcctttggtctgcaagtgcccagtgagctgggtggtgtgggcctttgcaacacccaggtgagggcgccctatcgccacatcccagtatgccataccccagcttggcagactcagctcttttgccatagacctagagactagggctaaggtctcttctaagcacctgccctgggtgcctgtgggatggatgttaactgtccaaacataacacaatttacatgcagtcccctaggcctgagccatgggcctcaccctggttcccaagtccttacaaatctctaagttggggattgcctaacaatagactgactagtagcaagtcaccctcctacctagacctaagacagaccagcattctctgctgtgccctttgcacaccccacttcttttctacacactggggatggcccaggtcaggcactgccctaggccaggaactgccctgttgcccacactctcctgttaaggtcaggtccccctgcagccagtgacaaccccagattcctgcttcccctccagtacgcccgtttggtggagatcgtgggcatgcatgaccttggcgtgggcattaccctgggggcccatcagagcatcggtttcaaaggcatcctgctctttggcacaaaggcccagaaagaaaaatacctccccaagctggcatctggtgaggcaaccctaggagagccagggattggggggcacactgggcttggcacagattaggccagttggcacttagattatcagatggctgagcatttcagttgggggaaggttttggggaggcatcacagtgtgctggttgggacatgcaaaagaactggatactcccaggtgttaagggggaactgcctgctggagggatggggaagtgggccgaggggactttgaagctcatcagaacttggggtaaagtagctctctccccaacagggagactgtggccgctttctgtctaaccgagccctcaagcgggtcagatgcagcctccatccgaacctctgctgtgcccagcccctgtggaaaatactataccctcaatggaagcaagctttggatcagcaacctgcctcccatttctccccttctcctccgcccaattccaggccccactgctccccgtcctccacgccctgaatatcccattcttccacagtaatgggggcctagcagacatcttcacggtctttgccaagacaccagttacagatccagccacaggagccgtgaaggagaagatcacagcttttgtggtggagaggggcttcgggggcattacccagtgagtgaatttgggttgggggagcttaggactgaggggcaggactgggctcctgggcagatggctgttgcaagtcaccctggggacgtgtgcaaaagccaaagcaggtggactgaatgtggcctttgggactaatatgtatgcaactgagctaaagttttggctccagcaaccaagtccaacacaaaataggacatagccaggcctccttagccctcagggcctgaggggaagtggtggctgtagcctctaatagtctagtggtcgtcattcctccctggtgcataaggagcgaaggagcagtttttcccccagtgacaacctgttgaacacacctctgctttcccacactgccctgacacagtgggccccctgagaagaagatgggcatcaaggcttcaaacacagcagaggtgttctttgatggagtacgggtgccatcggagaacgtgctgggtgaggttgggagtggcttcaaggttgccatgcacatcctcaacaatggaaggtttggcatggctgcggccctggcaggtaccatgagaggcatcattgctaaggcggcggtgagtaccctgcccgagtccctaggtaacccaaacagaagtctcactgtcccccttgccatgtgtccctgatcacttgcaggcactccctacactagaaactcctcccctaccagcagcccgacttgctagcttaggtctccatccagcgtagactgaactctggttgtatgcaaaacccatccctctggcgcaagcccagcccctctcctagggagactgcagaaccacactgaaccacagcgggatgtgtggaccctcttccaggtagatcatgccactaatcgtacccagtttggggagaaaattcacaactttgggctgatccaggagaagctggcacggatggttatgctgcagtatgtaactgagtccatggcttacatggtgagtgctaacatggaccagggagccacggacttccagatagaggccgccatcagcaaaatctttggctcgggtgaggtcccaggcatgctgggagggagtccagtttgggtgctcagctcccaaaaccagtctcatctgttctttgtccctaggaggcagcctggaaggtgacagatgaatgcatccaaatcatggggggtatgggcttcatgaaggcttcatgaaggtacaggacggtcttctgcagagcctcggctgggccaggggtgggtaggcacatctcagcacgggcatataatttgtgtggccctgtgctagaacctggagtagagcgtgtgctccgagatcttcgcatcttccggatctttgaggggacaaatgacattcttcggctgtttgtggctctgcagggctgtatggacaaaggaaaggagctctctgggcttggcagtgctctaaagaatccctttgggaatgctggcctcctgctaggagaggcaggcaaacagctgaggcggcgggcagggctgggcagcggcctgagtctcagcggacttgtccacccggagttgagtcggagtggcgagctggcagtacgggctctggagcagtttgccactgtggtggaggccaagctgataaaacacaagaaggggattgtcaatgaacagtttctgctgcagcggctggcagacggggccatcgacctctatgccatggtggtggttctctcgagggcctcaagatccctgagtgagggccaccccacggcccagcatgagaaaatgctctgtgacacctggtgtatcgaggctgcagctcggatccgagagggcatggccgccctgcagtctgacccctggcagcaagagctctaccgcaacttcaaaagcatctccaaggccttggtggagcggggtggtgtggtcaccagcaacccacttggcttctgaatactcccggccagggcctgtcccagttatgtgccttccctcaagccaaagccgaagcccctttccttaaggccctggtttgtcccgaaggggcctagtgttcccagcactgtgcctgctctcaagagcacttactgcctcgcaaataataaaaatttctagccagtcaaaaaaaaataaaagtgcaccaagactagaagg

SEQ ID NO: 450908 - DNA, 494 bp, Homo sapiens
atacggctgcgagaatttacagaaggggattgtcaatgaacagtttctgctgcagcggctggcagacggggccatcgacctctatgccatggtggtggttctctcgagggcctcaagatccctgagtgagggccaccccacggcccagcatgagaaaatgctctgtgacacctggtgtatcgaggctgcagctcggatccgagagggcatggccgccctgcagtctgacccctggcagcaagagctctaccgcaacttcaaaagcatctccaaggccttggtggagcggggtggtgtggtcaccagcaacccacttggcttctgaatactcccggccagggcctgtcccagttatgtgccttccctcaagccaaagccgaagcccctttccttaaggccctggtttgtcccgaaggggcctagtgttcccagcactgtgcctgctctcaagagcacttactgcctcgcaaataataaaaatttctagccagtca

SEQ ID NO: 450909 - DNA, 3823 bp, Homo sapiens
cgcctctgcctctctgcccagataataagcaggccatggcggctatctacttttcttgagctgtagcgcaagtagttcccttgccatgtcaccaccgatcaagtgtgccacattagccggtccgttgcttctactaacttatgtactcacccaggcatccctataaatgagtcgtcgcgttagagaagtactgatatcgcctctctctacgaaggaagtgaacgatcccgccaagaatgacgctctggagatggtggaggagaccacttggcagggcctcaaggagctgggggcctttggtctgcaagtgcccagtgagctgggtggtgtgggcctttgcaacacccaggtgagggcgccctatcgccacatcccagtatgccataccccagcttggcagactcagctcttttgccatagacctagagactagggctaaggtctcttctaagcacctgccctgggtgcctgtgggatggatgttaactgtccaaacataacacaatttacatgcagtcccctaggcctgagccatgggcctcaccctggttcccaagtccttacaaatctctaagttggggattgcctaacaatagactgactagtagcaagtcaccctcctacctagacctaagacagaccagcattctctgctgtgccctttgcacaccccacttcttttctacacactggggatggcccaggtcaggcactgccctaggccaggaactgccctgttgcccacactctcctgttaaggtcaggtccccctgcagccagtgacaaccccagattcctgcttcccctccagtacgcccgtttggtggagatcgtgggcatgcatgaccttggcgtgggcattaccctgggggcccatcagagcatcggtttcaaaggcatcctgctctttggcacaaaggcccagaaagaaaaatacctccccaagctggcatctggtgaggcaaccctaggagagccagggattggggggcacactgggcttggcacagattaggccagttggcacttagattatcagatggctgagcatttcagttgggggaaggttttggggaggcatcacagtgtgctggttgggacatgcaaaagaactggatactcccaggtgttaagggggaactgcctgctggagggatggggaagtgggccgaggggactttgaagctcatcagaacttggggtaaagtagctctctccccaacagggagactgtggccgctttctgtctaaccgagccctcaagcgggtcagatgcagcctccatccgaacctctgctgtgcccagcccctgtggaaaatactataccctcaatggaagcaagctttggatcagcaacctgcctcccatttctccccttctcctccgcccaattccaggccccactgctccccgtcctccacgccctgaatatcccattcttccacagtaatgggggcctagcagacatcttcacggtctttgccaagacaccagttacagatccagccacaggagccgtgaaggagaagatcacagcttttgtggtggagaggggcttcgggggcattacccagtgagtgaatttgggttgggggagcttaggactgaggggcaggactgggctcctgggcagatggctgttgcaagtcaccctggggacgtgtgcaaaagccaaagcaggtggactgaatgtggcctttgggactaatatgtatgcaactgagctaaagttttggctccagcaaccaagtccaacacaaaataggacatagccaggcctccttagccctcagggcctgaggggaagtggtggctgtagcctctaatagtctagtggtcgtcattcctccctggtgcataaggagcgaaggagcagtttttcccccagtgacaacctgttgaacacacctctgctttcccacactgccctgacacagtgggccccctgagaagaagatgggcatcaaggcttcaaacacagcagaggtgttctttgatggagtacgggtgccatcggagaacgtgctgggtgaggttgggagtggcttcaaggttgccatgcacatcctcaacaatggaaggtttggcatggctgcggccctggcaggtaccatgagaggcatcattgctaaggcggcggtgagtaccctgcccgagtccctaggtaacccaaacagaagtctcactgtcccccttgccatgtgtccctgatcacttgcaggcactccctacactagaaactcctcccctaccagcagcccgacttgctagcttaggtctccatccagcgtagactgaactctggttgtatgcaaaacccatccctctggcgcaagcccagcccctctcctagggagactgcagaaccacactgaaccacagcgggatgtgtggaccctcttccaggtagatcatgccactaatcgtacccagtttggggagaaaattcacaactttgggctgatccaggagaagctggcacggatggttatgctgcagtatgtaactgagtccatggcttacatggtgagtgctaacatggaccagggagccacggacttccagatagaggccgccatcagcaaaatctttggctcgggtgaggtcccaggcatgctgggagggagtccagtttgggtgctcagctcccaaaaccagtctcatctgttctttgtccctaggaggcagcctggaaggtgacagatgaatgcatccaaatcatggggggtatgggcttcatgaaggcttcatgaaggtacaggacggtcttctgcagagcctcggctgggccaggggtgggtaggcacatctcagcacgggcatataatttgtgtggccctgtgctagaacctggagtagagcgtgtgctccgagatcttcgcatcttccggatctttgaggggacaaatgacattcttcggctgtttgtggctctgcagggctgtatggacaaaggaaaggagctctctgggcttggcagtgctctaaagaatccctttgggaatgctggcctcctgctaggagaggcaggcaaacagctgaggcggcgggcagggctgggcagcggcctgagtctcagcggacttgtccacccggagttgagtcggagtggcgagctggcagtacgggctctggagcagtttgccactgtggtggaggccaagctgataaaacacaagaaggggattgtcaatgaacagtttctgctgcagcggctggcagacggggccatcgacctctatgccatggtggtggttctctcgaggtgaggaggcaggcagggaatgcctgagccgcagggggcctgggcctggatcccagccggcccagatttattttcatctcctgcttcctgccagggcctcaagatccctgagtgagggccaccccacggcccagcatgagaaaatgctctgtgacacctggtgtatcgaggtgagactcggggctgccaagctcaggtgagggctggaggtgcaggcccaacccctccttccctctccccaggctgcgctgcagctcggatccgagagggcatggccgccctgcagtctgacccctggcagcaagagctctaccgcaacttcaaaagcatctccaaggccttggtggagcggggtggtgtggtcaccagcaacccacttggcttctgaatactcccggccagggcctgtcccagttatgtgccttccctcaagccaaagccgaagcccctttccttaaggccctggtttgtcccgaaggggcctagtgttcccagcactgtgcctgctctcaagagcacttactgcctcgcaaataataaaaatttctagccagtca

SEQ ID NO: 450910 - DNA, 3453 bp, Homo sapiens
cgcctctgcctctctgcccagataataagcaggccatggcggctatctacttttcttgagctgtagcgcaagtagttcccttgccatgtcaccaccgatcaagtgtgccacattagccggtccgttgcttctactaacttatgtactcacccaggcatccctataaatgagtcgtcgcgttagagaagtactgatatcgcctctctctacgaaggaagtgaacgatcccgccaagaatgacgctctggagatggtggaggagaccacttggcagggcctcaaggagctgggggcctttggtctgcaagtgcccagtgagctgggtggtgtgggcctttgcaacacccaggtgagggcgccctatcgccacatcccagtatgccataccccagcttggcagactcagctcttttgccatagacctagagactagggctaaggtctcttctaagcacctgccctgggtgcctgtgggatggatgttaactgtccaaacataacacaatttacatgcagtcccctaggcctgagccatgggcctcaccctggttcccaagtccttacaaatctctaagttggggattgcctaacaatagactgactagtagcaagtcaccctcctacctagacctaagacagaccagcattctctgctgtgccctttgcacaccccacttcttttctacacactggggatggcccaggtcaggcactgccctaggccaggaactgccctgttgcccacactctcctgttaaggtcaggtccccctgcagccagtgacaaccccagattcctgcttcccctccagtacgcccgtttggtggagatcgtgggcatgcatgaccttggcgtgggcattaccctgggggcccatcagagcatcggtttcaaaggcatcctgctctttggcacaaaggcccagaaagaaaaatacctccccaagctggcatctggtgaggcaaccctaggagagccagggattggggggcacactgggcttggcacagattaggccagttggcacttagattatcagatggctgagcatttcagttgggggaaggttttggggaggcatcacagtgtgctggttgggacatgcaaaagaactggatactcccaggtgttaagggggaactgcctgctggagggatggggaagtgggccgaggggactttgaagctcatcagaacttggggtaaagtagctctctccccaacagggagactgtggccgctttctgtctaaccgagccctcaagcgggtcagatgcagcctccatccgaacctctgctgtgcccagcccctgtggaaaatactataccctcaatggaagcaagctttggatcagcaacctgcctcccatttctccccttctcctccgcccaattccaggccccactgctccccgtcctccacgccctgaatatcccattcttccacagtaatgggggcctagcagacatcttcacggtctttgccaagacaccagttacagatccagccacaggagccgtgaaggagaagatcacagcttttgtggtggagaggggcttcgggggcattacccagtgagtgaatttgggttgggggagcttaggactgaggggcaggactgggctcctgggcagatggctgttgcaagtcaccctggggacgtgtgcaaaagccaaagcaggtggactgaatgtggcctttgggactaatatgtatgcaactgagctaaagttttggctccagcaaccaagtccaacacaaaataggacatagccaggcctccttagccctcagggcctgaggggaagtggtggctgtagcctctaatagtctagtggtcgtcattcctccctggtgcataaggagcgaaggagcagtttttcccccagtgacaacctgttgaacacacctctgctttcccacactgccctgacacagtgggccccctgagaagaagatgggcatcaaggcttcaaacacagcagaggtgttctttgatggagtacgggtgccatcggagaacgtgctgggtgaggttgggagtggcttcaaggttgccatgcacatcctcaacaatggaaggtttggcatggctgcggccctggcaggtaccatgagaggcatcattgctaaggcggcggtgagtaccctgcccgagtccctaggtaacccaaacagaagtctcactgtcccccttgccatgtgtccctgatcacttgcaggcactccctacactagaaactcctcccctaccagcagcccgacttgctagcttaggtctccatccagcgtagactgaactctggttgtatgcaaaacccatccctctggcgcaagcccagcccctctcctagggagactgcagaaccacactgaaccacagcgggatgtgtggaccctcttccaggtagatcatgccactaatcgtacccagtttggggagaaaattcacaactttgggctgatccaggagaagctggcacggatggttatgctgcagtatgtaactgagtccatggcttacatggtgagtgctaacatggaccagggagccacggacttccagatagaggccgccatcagcaaaatctttggctcgggtgaggtcccaggcatgctgggagggagtccagtttgggtgctcagctcccaaaaccagtctcatctgttctttgtccctaggaggcagcctggaaggtgacagatgaatgcatccaaatcatggggggtatgggcttcatgaaggcttcatgaaggaacctggagtagagcgtgtgctccgagatcttcgcatcttccggatctttgaggggacaaatgacattcttcggctgtttgtggctctgcagggctgtatggacaaaggaaaggagctctctgggcttggcagtgctctaaagaatccctttgggaatgctggcctcctgctaggagaggcaggcaaacagctgaggcggcgggcagggctgggcagcggcctgagtctcagcggacttgtccacccggagttgagtcggagtggcgagctggcagtacgggctctggagcagtttgccactgtggtggaggccaagctgataaaacacaagaaggggattgtcaatgaacagtttctgctgcagcggctggcagacggggccatcgacctctatgccatggtggtggttctctcgagggcctcaagatccctgagtgagggccaccccacggcccagcatgagaaaatgctctgtgacacctggtgtatcgaggctgcagctcggatccgagagggcatggccgccctgcagtctgacccctggcagcaagagctctaccgcaacttcaaaagcatctccaaggccttggtggagcggggtggtgtggtcaccagcaacccacttggcttctgaatactcctggttgtcccgaaggggcctagtgtacccacgcaggggtgatgcccttgctttc

SEQ ID NO: 450911 - DNA, 3503 bp, Homo sapiens
cgcctctgcctctctgcccagataataagcaggccatggcggctatctacttttcttgagctgtagcgcaagtagttcccttgccatgtcaccaccgatcaagtgtgccacattagccggtccgttgcttctactaacttatgtactcacccaggcatccctataaatgagtcgtcgcgttagagaagtactgatatcgcctctctctacgaaggaagtgaacgatcccgccaagaatgacgctctggagatggtggaggagaccacttggcagggcctcaaggagctgggggcctttggtctgcaagtgcccagtgagctgggtggtgtgggcctttgcaacacccaggtgagggcgccctatcgccacatcccagtatgccataccccagcttggcagactcagctcttttgccatagacctagagactagggctaaggtctcttctaagcacctgccctgggtgcctgtgggatggatgttaactgtccaaacataacacaatttacatgcagtcccctaggcctgagccatgggcctcaccctggttcccaagtccttacaaatctctaagttggggattgcctaacaatagactgactagtagcaagtcaccctcctacctagacctaagacagaccagcattctctgctgtgccctttgcacaccccacttcttttctacacactggggatggcccaggtcaggcactgccctaggccaggaactgccctgttgcccacactctcctgttaaggtcaggtccccctgcagccagtgacaaccccagattcctgcttcccctccagtacgcccgtttggtggagatcgtgggcatgcatgaccttggcgtgggcattaccctgggggcccatcagagcatcggtttcaaaggcatcctgctctttggcacaaaggcccagaaagaaaaatacctccccaagctggcatctggtgaggcaaccctaggagagccagggattggggggcacactgggcttggcacagattaggccagttggcacttagattatcagatggctgagcatttcagttgggggaaggttttggggaggcatcacagtgtgctggttgggacatgcaaaagaactggatactcccaggtgttaagggggaactgcctgctggagggatggggaagtgggccgaggggactttgaagctcatcagaacttggggtaaagtagctctctccccaacagggagactgtggccgctttctgtctaaccgagccctcaagcgggtcagatgcagcctccatccgaacctctgctgtgcccagcccctgtggaaaatactataccctcaatggaagcaagctttggatcagcaacctgcctcccatttctccccttctcctccgcccaattccaggccccactgctccccgtcctccacgccctgaatatcccattcttccacagtaatgggggcctagcagacatcttcacggtctttgccaagacaccagttacagatccagccacaggagccgtgaaggagaagatcacagcttttgtggtggagaggggcttcgggggcattacccagtgagtgaatttgggttgggggagcttaggactgaggggcaggactgggctcctgggcagatggctgttgcaagtcaccctggggacgtgtgcaaaagccaaagcaggtggactgaatgtggcctttgggactaatatgtatgcaactgagctaaagttttggctccagcaaccaagtccaacacaaaataggacatagccaggcctccttagccctcagggcctgaggggaagtggtggctgtagcctctaatagtctagtggtcgtcattcctccctggtgcataaggagcgaaggagcagtttttcccccagtgacaacctgttgaacacacctctgctttcccacactgccctgacacagtgggccccctgagaagaagatgggcatcaaggcttcaaacacagcagaggtgttctttgatggagtacgggtgccatcggagaacgtgctgggtgaggttgggagtggcttcaaggttgccatgcacatcctcaacaatggaaggtttggcatggctgcggccctggcaggtaccatgagaggcatcattgctaaggcggcggtgagtaccctgcccgagtccctaggtaacccaaacagaagtctcactgtcccccttgccatgtgtccctgatcacttgcaggcactccctacactagaaactcctcccctaccagcagcccgacttgctagcttaggtctccatccagcgtagactgaactctggttgtatgcaaaacccatccctctggcgcaagcccagcccctctcctagggagactgcagaaccacactgaaccacagcgggatgtgtggaccctcttccaggtagatcatgccactaatcgtacccagtttggggagaaaattcacaactttgggctgatccaggagaagctggcacggatggttatgctgcagtatgtaactgagtccatggcttacatggtgagtgctaacatggaccagggagccacggacttccagatagaggccgccatcagcaaaatctttggctcgggtgaggtcccaggcatgctgggagggagtccagtttgggtgctcagctcccaaaaccagtctcatctgttctttgtccctaggaggcagcctggaaggtgacagatgaatgcatccaaatcatggggggtatgggcttcatgaaggcttcatgaaggtacaggacggtcttctgcagagcctcggctgggccaggggtgggtaggcacatctcagcacgggcatataatttgtgtggccctgtgctagaacctggagtagagcgtgtgctccgagatcttcgcatcttccggatctttgaggggacaaatgacattcttcggctgtttgtggctctgcagggctgtatggacaaaggaaaggagctctctgggcttggcagtgctctaaagaatccctttgggaatgctggcctcctgctaggagaggcaggcaaacagctgaggcggcgggcagggctgggcagcggcctgagtctcagcggacttgtccacccggagttgagtcggagtggcgagctggcagtacgggctctggagcagtttgccactgtggtggaggccaagctgataaaacacaagaaggggattgtcagctgcagctcggatccgagagggcatggccgccctgcagtctgacccctggcagcaagagctctaccgcaacttcaaaagcatctccaaggccttggtggagcggggtggtgtggtcaccagcaacccacttggcttctgaatactcccggccagggcctgtcccagttatgtgccttccctcaagccaaagccgaagcccctttccttaaggccctggtttgtcccgaaggggcctagtgttcccagcactgtgcctgctctcaagagcacttactgcctcgcaaataataaaaatttctagccagtca

SEQ ID NO: 450912 - DNA, 3816 bp, Homo sapiens
cgcctctgcctctctgcccagataataagcaggccatggcggctatctacttttcttgagctgtagcgcaagtagttcccttgccatgtcaccaccgatcaagtgtgccacattagccggtccgttgcttctactaacttatgtactcacccaggcatccctataaatgagtcgtcgcgttagagaagtactgatatcgcctctctctacgaaggaagtgaacgatcccgccaagaatgacgctctggagatggtggaggagaccacttggcagggcctcaaggagctgggggcctttggtctgcaagtgcccagtgagctgggtggtgtgggcctttgcaacacccaggtgagggcgccctatcgccacatcccagtatgccataccccagcttggcagactcagctcttttgccatagacctagagactagggctaaggtctcttctaagcacctgccctgggtgcctgtgggatggatgttaactgtccaaacataacacaatttacatgcagtcccctaggcctgagccatgggcctcaccctggttcccaagtccttacaaatctctaagttggggattgcctaacaatagactgactagtagcaagtcaccctcctacctagacctaagacagaccagcattctctgctgtgccctttgcacaccccacttcttttctacacactggggatggcccaggtcaggcactgccctaggccaggaactgccctgttgcccacactctcctgttaaggtcaggtccccctgcagccagtgacaaccccagattcctgcttcccctccagtacgcccgtttggtggagatcgtgggcatgcatgaccttggcgtgggcattaccctgggggcccatcagagcatcggtttcaaaggcatcctgctctttggcacaaaggcccagaaagaaaaatacctccccaagctggcatctggtgaggcaaccctaggagagccagggattggggggcacactgggcttggcacagattaggccagttggcacttagattatcagatggctgagcatttcagttgggggaaggttttggggaggcatcacagtgtgctggttgggacatgcaaaagaactggatactcccaggtgttaagggggaactgcctgctggagggatggggaagtgggccgaggggactttgaagctcatcagaacttggggtaaagtagctctctccccaacagggagactgtggccgctttctgtctaaccgagccctcaagcgggtcagatgcagcctccatccgaacctctgctgtgcccagcccctgtggaaaatactataccctcaatggaagcaagctttggatcagcaacctgcctcccatttctccccttctcctccgcccaattccaggccccactgctccccgtcctccacgccctgaatatcccattcttccacagtaatgggggcctagcagacatcttcacggtctttgccaagacaccagttacagatccagccacaggagccgtgaaggagaagatcacagcttttgtggtggagaggggcttcgggggcattacccagtgagtgaatttgggttgggggagcttaggactgaggggcaggactgggctcctgggcagatggctgttgcaagtcaccctggggacgtgtgcaaaagccaaagcaggtggactgaatgtggcctttgggactaatatgtatgcaactgagctaaagttttggctccagcaaccaagtccaacacaaaataggacatagccaggcctccttagccctcagggcctgaggggaagtggtggctgtagcctctaatagtctagtggtcgtcattcctccctggtgcataaggagcgaaggagcagtttttcccccagtgacaacctgttgaacacacctctgctttcccacactgccctgacacagtgggccccctgagaagaagatgggcatcaaggcttcaaacacagcagaggtgttctttgatggagtacgggtgccatcggagaacgtgctgggtgaggttgggagtggcttcaaggttgccatgcacatcctcaacaatggaaggtttggcatggctgcggccctggcaggtaccatgagaggcatcattgctaaggcggcggtgagtaccctgcccgagtccctaggtaacccaaacagaagtctcactgtcccccttgccatgtgtccctgatcacttgcaggcactccctacactagaaactcctcccctaccagcagcccgacttgctagcttaggtctccatccagcgtagactgaactctggttgtatgcaaaacccatccctctggcgcaagcccagcccctctcctagggagactgcagaaccacactgaaccacagcgggatgtgtggaccctcttccaggtagatcatgccactaatcgtacccagtttggggagaaaattcacaactttgggctgatccaggagaagctggcacggatggttatgctgcagtatgtaactgagtccatggcttacatggtgagtgctaacatggaccagggagccacggacttccagatagaggccgccatcagcaaaatctttggctcgggtgaggtcccaggcatgctgggagggagtccagtttgggtgctcagctcccaaaaccagtctcatctgttctttgtccctaggaggcagcctggaaggtgacagatgaatgcatccaaatcatggggggtatgggcttcatgaaggcttcatgaaggtacaggacggtcttctgcagagcctcggctgggccaggggtgggtaggcacatctcagcacgggcatataatttgtgtggccctgtgctagaacctggagtagagcgtgtgctccgagatcttcgcatcttccggatctttgaggggacaaatgacattcttcggctgtttgtggctctgcagggctgtatggtaagacagagaattgggtgggggtagaggtggggaggacagtgagtcctgactgctggaccctcttcccccatagggacaaaggaaaggagctctctgggcttggcagtgctctaaagaatccctttgggaatgctggcctcctgctaggagaggcaggcaaacagctgaggcgggtaggcttagggccagagccaggggagggcagggtggtgtatggcaactaaccagtcattctccctcttcctctcaggcgggcagggctgggcagcggcctgagtctcagcggacttgtccacccggagttgagtcggagtggcgagctggtaagcggccaggggtccaggagagcctgcatcagggactgcaccgatggcccctctgagccccgcactgtccccatctcttaaggcagtacgggctctggagcagtttgccactgtggtggaggccaagctgataaaacacaagaaggggattgtcaatgaacagtttctgctgcagcggctggcagacggggccatcgacctctatgccatggtggtggttctctcgaggctgcagctcggatccgagagggcatggccgccctgcagtctgacccctggcagcaagagctctaccgcaacttcaaaagcatctccaaggccttggtggagcggggtggtgtggtcaccagcaacccacttggcttctgaatactcccggccagggcctgtcccagttatgtgccttccctcaagccaaagccgaagcccctttccttaaggccctggtttgtcccgaaggggcctagtgttcccagcactgtgcctgctctcaagagcacttactgcctcgcaaataataaaaatttctagccagtca

SEQ ID NO: 450913 - DNA, 3772 bp, Homo sapiens
cgcctctgcctctctgcccagataataagcaggccatggcggctatctacttttcttgagctgtagcgcaagtagttcccttgccatgtcaccaccgatcaagtgtgccacattagccggtccgttgcttctactaacttatgtactcacccaggcatccctataaatgagtcgtcgcgttagagaagtactgatatcgcctctctctacgaaggaagtgaacgatcccgccaagaatgacgctctggagatggtggaggagaccacttggcagggcctcaaggagctgggggcctttggtctgcaagtgcccagtgagctgggtggtgtgggcctttgcaacacccaggtgagggcgccctatcgccacatcccagtatgccataccccagcttggcagactcagctcttttgccatagacctagagactagggctaaggtctcttctaagcacctgccctgggtgcctgtgggatggatgttaactgtccaaacataacacaatttacatgcagtcccctaggcctgagccatgggcctcaccctggttcccaagtccttacaaatctctaagttggggattgcctaacaatagactgactagtagcaagtcaccctcctacctagacctaagacagaccagcattctctgctgtgccctttgcacaccccacttcttttctacacactggggatggcccaggtcaggcactgccctaggccaggaactgccctgttgcccacactctcctgttaaggtcaggtccccctgcagccagtgacaaccccagattcctgcttcccctccagtacgcccgtttggtggagatcgtgggcatgcatgaccttggcgtgggcattaccctgggggcccatcagagcatcggtttcaaaggcatcctgctctttggcacaaaggcccagaaagaaaaatacctccccaagctggcatctggtgaggcaaccctaggagagccagggattggggggcacactgggcttggcacagattaggccagttggcacttagattatcagatggctgagcatttcagttgggggaaggttttggggaggcatcacagtgtgctggttgggacatgcaaaagaactggatactcccaggtgttaagggggaactgcctgctggagggatggggaagtgggccgaggggactttgaagctcatcagaacttggggtaaagtagctctctccccaacagggagactgtggccgctttctgtctaaccgagccctcaagcgggtcagatgcagcctccatccgaacctctgctgtgcccagcccctgtggaaaatactataccctcaatggaagcaagctttggatcagcaacctgcctcccatttctccccttctcctccgcccaattccaggccccactgctccccgtcctccacgccctgaatatcccattcttccacagtaatgggggcctagcagacatcttcacggtctttgccaagacaccagttacagatccagccacaggagccgtgaaggagaagatcacagcttttgtggtggagaggggcttcgggggcattacccagtgagtgaatttgggttgggggagcttaggactgaggggcaggactgggctcctgggcagatggctgttgcaagtcaccctggggacgtgtgcaaaagccaaagcaggtggactgaatgtggcctttgggactaatatgtatgcaactgagctaaagttttggctccagcaaccaagtccaacacaaaataggacatagccaggcctccttagccctcagggcctgaggggaagtggtggctgtagcctctaatagtctagtggtcgtcattcctccctggtgcataaggagcgaaggagcagtttttcccccagtgacaacctgttgaacacacctctgctttcccacactgccctgacacagtgggccccctgagaagaagatgggcatcaaggcttcaaacacagcagaggtgttctttgatggagtacgggtgccatcggagaacgtgctgggtgaggttgggagtggcttcaaggttgccatgcacatcctcaacaatggaaggtttggcatggctgcggccctggcaggtaccatgagaggcatcattgctaaggcggcggtgagtaccctgcccgagtccctaggtaacccaaacagaagtctcactgtcccccttgccatgtgtccctgatcacttgcaggcactccctacactagaaactcctcccctaccagcagcccgacttgctagcttaggtctccatccagcgtagactgaactctggttgtatgcaaaacccatccctctggcgcaagcccagcccctctcctagggagactgcagaaccacactgaaccacagcgggatgtgtggaccctcttccaggtagatcatgccactaatcgtacccagtttggggagaaaattcacaactttgggctgatccaggagaagctggcacggatggttatgctgcagtatgtaactgagtccatggcttacatggtgagtgctaacatggaccagggagccacggacttccagatagaggccgccatcagcaaaatctttggctcgggtgaggtcccaggcatgctgggagggagtccagtttgggtgctcagctcccaaaaccagtctcatctgttctttgtccctaggaggcagcctggaaggtgacagatgaatgcatccaaatcatggggggtatgggcttcatgaaggcttcatgaaggtacaggacggtcttctgcagagcctcggctgggccaggggtgggtaggcacatctcagcacgggcatataatttgtgtggccctgtgctagaacctggagtagagcgtgtgctccgagatcttcgcatcttccggatctttgaggggacaaatgacattcttcggctgtttgtggctctgcagggctgtatggacaaaggaaaggagctctctgggcttggcagtgctctaaagaatccctttgggaatgctggcctcctgctaggagaggcaggcaaacagctgaggcggcgggcagggctgggcagcggcctgagtctcagcggacttgtccacccggagttgagtcggagtggcgagctggcagtacgggctctggagcagtttgccactgtggtggaggccaagctgataaaacacaagaaggggattgtcaatgaacagtttctgctgcagcggctggcagacggggccatcgacctctatgccatggtggtggttctctcgaggtgaggaggcaggcagggaatgcctgagccgcagggggcctgggcctggatcccagccggcccagatttattttcatctcctgcttcctgccagggcctcaagatccctgagtgagggccaccccacggcccagcatgagaaaatgctctgtgacacctggtgtatcgaggctgcagctcggatccgagagggcatggccgccctgcagtctgacccctggcagcaagagctctaccgcaacttcaaaagcatctccaaggccttggtggagcggggtggtgtggtcaccagcaacccacttggcttctgaatactcccggccagggcctgtcccagttatgtgccttccctcaagccaaagccgaagcccctttccttaaggccctggtttgtcccgaaggggcctagtgttcccagcactgtgcctgctctcaagagcacttactgcctcgcaaataataaaaatttctagccagtcaaaaaaaaagtcgacgcggccgcgaat

SEQ ID NO: 450914 - DNA, 3253 bp, Homo sapiens
cgcctctgcctctctgcccagataataagcaggccatggcggctatctacttttcttgagctgtagcgcaagtagttcccttgccatgtcaccaccgatcaagtgtgccacattagccggtccgttgcttctactaacttatgtactcacccaggcatccctataaatgagtcgtcgcgttagagaagtactgatatcgcctctctctacgaaggaagtgaacgatcccgccaagaatgacgctctggagatggtggaggagaccacttggcagggcctcaaggagctgggggcctttggtctgcaagtgcccagtgagctgggtggtgtgggcctttgcaacacccaggtgagggcgccctatcgccacatcccagtatgccataccccagcttggcagactcagctcttttgccatagacctagagactagggctaaggtctcttctaagcacctgccctgggtgcctgtgggatggatgttaactgtccaaacataacacaatttacatgcagtcccctaggcctgagccatgggcctcaccctggttcccaagtccttacaaatctctaagttggggattgcctaacaatagactgactagtagcaagtcaccctcctacctagacctaagacagaccagcattctctgctgtgccctttgcacaccccacttcttttctacacactggggatggcccaggtcaggcactgccctaggccaggaactgccctgttgcccacactctcctgttaaggtcaggtccccctgcagccagtgacaaccccagattcctgcttcccctccagtacgcccgtttggtggagatcgtgggcatgcatgaccttggcgtgggcattaccctgggggcccatcagagcatcggtttcaaaggcatcctgctctttggcacaaaggcccagaaagaaaaatacctccccaagctggcatctggtgaggcaaccctaggagagccagggattggggggcacactgggcttggcacagattaggccagttggcacttagattatcagatggctgagcatttcagttgggggaaggttttggggaggcatcacagtgtgctggttgggacatgcaaaagaactggatactcccaggtgttaagggggaactgcctgctggagggatggggaagtgggccgaggggactttgaagctcatcagaacttggggtaaagtagctctctccccaacagggagactgtggccgctttctgtctaaccgagccctcaagcgggtcagatgcagcctccatccgaacctctgctgtgcccagcccctgtggaaaatactataccctcaatggaagcaagctttggatcagcaacctgcctcccatttctccccttctcctccgcccaattccaggccccactgctccccgtcctccacgccctgaatatcccattcttccacagtaatgggggcctagcagacatcttcacggtctttgccaagacaccagttacagatccagccacaggagccgtgaaggagaagatcacagcttttgtggtggagaggggcttcgggggcattacccagtgagtgaatttgggttgggggagcttaggactgaggggcaggactgggctcctgggcagatggctgttgcaagtcaccctggggacgtgtgcaaaagccaaagcaggtggactgaatgtggcctttgggactaatatgtatgcaactgagctaaagttttggctccagcaaccaagtccaacacaaaataggacatagccaggcctccttagccctcagggcctgaggggaagtggtggctgtagcctctaatagtctagtggtcgtcattcctccctggtgcataaggagcgaaggagcagtttttcccccagtgacaacctgttgaacacacctctgctttcccacactgccctgacacagtgggccccctgagaagaagatgggcatcaaggcttcaaacacagcagaggtgttctttgatggagtacgggtgccatcggagaacgtgctgggtgaggttgggagtggcttcaaggttgccatgcacatcctcaacaatggaaggtttggcatggctgcggccctggcaggtaccatgagaggcatcattgctaaggcggcggtgagtaccctgcccgagtccctaggtaacccaaacagaagtctcactgtcccccttgccatgtgtccctgatcacttgcaggcactccctacactagaaactcctcccctaccagcagcccgacttgctagcttaggtctccatccagcgtagactgaactctggttgtatgcaaaacccatccctctggcgcaagcccagcccctctcctagggagactgcagaaccacactgaaccacagcgggatgtgtggaccctcttccaggtagatcatgccactaatcgtacccagtttggggagaaaattcacaactttgggctgatccaggagaagctggcacggatggttatgctgcagtatgtaactgagtccatggcttacatggtgagtgctaacatggaccagggagccacggacttccagatagaggccgccatcagcaaaatctttggctcgggtgaggtcccaggcatgctgggagggagtccagtttgggtgctcagctcccaaaaccagtctcatctgttctttgtccctaggaggcagcctggaaggtgacagatgaatgcatccaaatcatggggggtatgggcttcatgaaggcttcatgaaggtacaggacggtcttctgcagagcctcggctgggccaggggtgggtaggcacatctcagcacgggcatataatttgtgtggccctgtgctagaacctggagtagagcgtgtgctccgagatcttcgcatcttccggatctttgaggggacaaatgacattcttcggctgtttgtggctctgcagggctgtatggacaaaggaaaggagctctctgggcttggcagtgctctaaagaatccctttgggaatgctggcctcctgctaggagaggcaggcaaacagctgaggcggcgggcagggctgggcagcggcctgagtctcagcggacttgtccacccggagttgagtcggagtggcgagctggcagtacgggctctggagcagtttgccactgtggtggaggccaagctgataaaacacaagaaggggattgtcagtaagtgagctctacaccattccgcccctccctttcctctccttgagactaatgccccca

SEQ ID NO: 450915 - DNA, 3408 bp, Homo sapiens
cgcctctgcctctctgcccagataataagcaggccatggcggctatctacttttcttgagctgtagcgcaagtagttcccttgccatgtcaccaccgatcaagtgtgccacattagccggtccgttgcttctactaacttatgtactcacccaggcatccctataaatgagtcgtcgcgttagagaagtactgatatcgcctctctctacgaaggaagtgaacgatcccgccaagaatgacgctctggagatggtggaggagaccacttggcagggcctcaaggagctgggggcctttggtctgcaagtgcccagtgagctgggtggtgtgggcctttgcaacacccaggtgagggcgccctatcgccacatcccagtatgccataccccagcttggcagactcagctcttttgccatagacctagagactagggctaaggtctcttctaagcacctgccctgggtgcctgtgggatggatgttaactgtccaaacataacacaatttacatgcagtcccctaggcctgagccatgggcctcaccctggttcccaagtccttacaaatctctaagttggggattgcctaacaatagactgactagtagcaagtcaccctcctacctagacctaagacagaccagcattctctgctgtgccctttgcacaccccacttcttttctacacactggggatggcccaggtcaggcactgccctaggccaggaactgccctgttgcccacactctcctgttaaggtcaggtccccctgcagccagtgacaaccccagattcctgcttcccctccagtacgcccgtttggtggagatcgtgggcatgcatgaccttggcgtgggcattaccctgggggcccatcagagcatcggtttcaaaggcatcctgctctttggcacaaaggcccagaaagaaaaatacctccccaagctggcatctggtgaggcaaccctaggagagccagggattggggggcacactgggcttggcacagattaggccagttggcacttagattatcagatggctgagcatttcagttgggggaaggttttggggaggcatcacagtgtgctggttgggacatgcaaaagaactggatactcccaggtgttaagggggaactgcctgctggagggatggggaagtgggccgaggggactttgaagctcatcagaacttggggtaaagtagctctctccccaacagggagactgtggccgctttctgtctaaccgagccctcaagcgggtcagatgcagcctccatccgaacctctgctgtgcccagcccctgtggaaaatactataccctcaatggaagcaagctttggatcagcaacctgcctcccatttctccccttctcctccgcccaattccaggccccactgctccccgtcctccacgccctgaatatcccattcttccacagtaatgggggcctagcagacatcttcacggtctttgccaagacaccagttacagatccagccacaggagccgtgaaggagaagatcacagcttttgtggtggagaggggcttcgggggcattacccagtgagtgaatttgggttgggggagcttaggactgaggggcaggactgggctcctgggcagatggctgttgcaagtcaccctggggacgtgtgcaaaagccaaagcaggtggactgaatgtggcctttgggactaatatgtatgcaactgagctaaagttttggctccagcaaccaagtccaacacaaaataggacatagccaggcctccttagccctcagggcctgaggggaagtggtggctgtagcctctaatagtctagtggtcgtcattcctccctggtgcataaggagcgaaggagcagtttttcccccagtgacaacctgttgaacacacctctgctttcccacactgccctgacacagtgggccccctgagaagaagatgggcatcaaggcttcaaacacagcagaggtgttctttgatggagtacgggtgccatcggagaacgtgctgggtgaggttgggagtggcttcaaggttgccatgcacatcctcaacaatggaaggtttggcatggctgcggccctggcaggtaccatgagaggcatcattgctaaggcggcggtgagtaccctgcccgagtccctaggtaacccaaacagaagtctcactgtcccccttgccatgtgtccctgatcacttgcaggcactccctacactagaaactcctcccctaccagcagcccgacttgctagcttaggtctccatccagcgtagactgaactctggttgtatgcaaaacccatccctctggcgcaagcccagcccctctcctagggagactgcagaaccacactgaaccacagcgggatgtgtggaccctcttccaggtagatcatgccactaatcgtacccagtttggggagaaaattcacaactttgggctgatccaggagaagctggcacggatggttatgctgcagtatgtaactgagtccatggcttacatggtgagtgctaacatggaccagggagccacggacttccagatagaggccgccatcagcaaaatctttggctcgggtgaggtcccaggcatgctgggagggagtccagtttgggtgctcagctcccaaaaccagtctcatctgttctttgtccctaggaggcagcctggaaggtgacagatgaatgcatccaaatcatggggggtatgggcttcatgaaggcttcatgaaggtacaggacggtcttctgcagagcctcggctgggccaggggtgggtaggcacatctcagcacgggcatataatttgtgtggccctgtgctagaacctggagtagagcgtgtgctccgagatcttcgcatcttccggatctttgaggggacaaatgacattcttcggctgtttgtggctctgcagggctgtatggtaagacagagaattgggtgggggtagaggtggggaggacagtgagtcctgactgctggaccctcttcccccatagggacaaaggaaaggagctctctgggcttggcagtgctctaaagaatccctttgggaatgctggcctcctgctaggagaggcaggcaaacagctgaggcgggtaggcttagggccagagccaggggagggcagggtggtgtatggcaactaaccagtcattctccctcttcctctcaggcgggcagggctgggcagcggcctgagtctcagcggacttgtccacccggagttgagtcggagtggcgagctggcagtacgggctctggagcagtttgccactgtggtggaggccaagctgataaaacacaagaaggggattgtcagtaagtgagctctacaccattccgcccctccctttcctctccttgagactaatgccccca

SEQ ID NO: 450916 - DNA, 2556 bp, Homo sapiens
cgcctctgcctctctgcccagataataagcaggccatggcggctatctacttttcttgagctgtagcgcaagtagttcccttgccatgtcaccaccgatcaagtgtgccacattagccggtccgttgcttctactaacttatgtactcacccaggcatccctataaatgagtcgtcgcgttagagaagtactgatatcgcctctctctacgaaggaagtgaacgatcccgccaagaatgacgctctggagatggtggaggagaccacttggcagggcctcaaggagctgggggcctttggtctgcaagtgcccagtgagctgggtggtgtgggcctttgcaacacccaggtgagggcgccctatcgccacatcccagtatgccataccccagcttggcagactcagctcttttgccatagacctagagactagggctaaggtctcttctaagcacctgccctgggtgcctgtgggatggatgttaactgtccaaacataacacaatttacatgcagtcccctaggcctgagccatgggcctcaccctggttcccaagtccttacaaatctctaagttggggattgcctaacaatagactgactagtagcaagtcaccctcctacctagacctaagacagaccagcattctctgctgtgccctttgcacaccccacttcttttctacacactggggatggcccaggtcaggcactgccctaggccaggaactgccctgttgcccacactctcctgttaaggtcaggtccccctgcagccagtgacaaccccagattcctgcttcccctccagtacgcccgtttggtggagatcgtgggcatgcatgaccttggcgtgggcattaccctgggggcccatcagagcatcggtttcaaaggcatcctgctctttggcacaaaggcccagaaagaaaaatacctccccaagctggcatctggtgaggcaaccctaggagagccagggattggggggcacactgggcttggcacagattaggccagttggcacttagattatcagatggctgagcatttcagttgggggaaggttttggggaggcatcacagtgtgctggttgggacatgcaaaagaactggatactcccaggtgttaagggggaactgcctgctggagggatggggaagtgggccgaggggactttgaagctcatcagaacttggggtaaagtagctctctccccaacagggagactgtggccgctttctgtctaaccgagccctcaagcgggtcagatgcagcctccatccgaacctctgctgtgcccagcccctgtggaaaatactataccctcaatggaagcaagctttggatcagcaacctgcctcccatttctccccttctcctccgcccaattccaggccccactgctccccgtcctccacgccctgaatatcccattcttccacagtaatgggggcctagcagacatcttcacggtctttgccaagacaccagttacagatccagccacaggagccgtgaaggagaagatcacagcttttgtggtggagaggggcttcgggggcattacccagtgagtgaatttgggttgggggagcttaggactgaggggcaggactgggctcctgggcagatggctgttgcaagtcaccctggggacgtgtgcaaaagccaaagcaggtggactgaatgtggcctttgggactaatatgtatgcaactgagctaaagttttggctccagcaaccaagtccaacacaaaataggacatagccaggcctccttagccctcagggcctgaggggaagtggtggctgtagcctctaatagtctagtggtcgtcattcctccctggtgcataaggagcgaaggagcagtttttcccccagtgacaacctgttgaacacacctctgctttcccacactgccctgacacagtgggccccctgagaagaagatgggcatcaaggcttcaaacacagcagaggtgttctttgatggagtacgggtgccatcggagaacgtgctgggtgaggttgggagtggcttcaaggttgccatgcacatcctcaacaatggaaggtttggcatggctgcggccctggcaggtaccatgagaggcatcattgctaaggcggcggtgagtaccctgcccgagtccctaggtaacccaaacagaagtctcactgtcccccttgccatgtgtccctgatcacttgcaggcactccctacactagaaactcctcccctaccagcagcccgacttgctagcttaggtctccatccagcgtagactgaactctggttgtatgcaaaacccatccctctggcgcaagcccagcccctctcctagggagactgcagaaccacactgaaccacagcgggatgtgtggaccctcttccaggtagatcatgccactaatcgtacccagtttggggagaaaattcacaactttgggctgatccaggagaagctggcacggatggttatgctgcagtatgtaactgaggtgagggcctcccaagcccctctccctggagccctggggctttc

SEQ ID NO: 450917 - DNA, 763 bp, Homo sapiens
tctcttcccacctccgtggcattctaattacttctcccttctcctttacaaagatgggggtgccctctctggattggttttattcctctcctctcccaggaggaccagcccaggcacagacgctgtcctttgagaattttctctgcttttccgttcaagggctggttgcagggagggagctcaggcagagacttttcatttaagaactcttttggctaaggcctgcaggggattcccagcatctgaaatattagcactggagctgatccctactcaggtgaaattcctttactggacaccacaagaatgtgtcagaacaggttccctgtgcaaggggcttcaaaaccaaaatattcccactgcgctctttacgctttttaaaccaccgggagggggcaaaagacataactgggttgttaactattcatttcaccgtgtaaaaaaaaatgtaggtgtttcttctgcttttggtttgatgtatccatccatttgcttattccaccccctccaaaaaagggacttcaccttcctactagtgtatctaaattgtttaagtgaatcagagtgagatggtttactctgaaaggtgctggactttacagactgaccattgattttgtacacagagtcctacttagtaattgtagccactgtctgttgctccaatgactttagttggcagccaccatcctgtaggatgtttttcgggcaacattacctgaggtactttagaaatattgtagttttgaatgtcaaaaaaaaa

SEQ ID NO: 450918 - DNA, 516 bp, Homo sapiens
gtgtaaaaaaaaatgtaggtgtttcttctgcttttggtttgatgtatccatccatttgcttattccaccccctccaaaaaagggacttcaccttcctactagtgtatctaaattgtttaagtgaatcagagtgagatggtttactctgaaaggtgctggactttacagactgaccattgattttgtacacagagtcctacttagtaattgtagccactgtctgttgctccaatgactttagttggcagccaccatcctgtaggatgtttttcgggcaacattacctgaggtactttagaaatattgtagttttgaatgtcaaaaaaaaaagagacatatcaagagatgattcttagagcagggctaatgtgttagaattgagtgctaaaaatagccaagacattaacaccatttggggagtaatcatcagataattttccatgaaacatatactttatgaaaatctaagtttagcttcgagaccaatgtagagacaattcagcctcttttgcgggg

SEQ ID NO: 450919 - DNA, 690 bp, Homo sapiens
  misc_feature (29)..(29): n is a, c, g, or t
ctgctctagagcatccccccgatgaaganggcgaggaggaaggctccgaatccgaatctcggtccgtcaaagtgaagatcaagcttggccggaaggagaaggcacaggaccggctgaagggcggccggcggcggccgagccgagggtcccgagccaagccggtcgtgagtgacgatgacagtgaggaggaacaagaggaggaccgctcaggaagtggcagcgaagaagactgagccccgacattccagtctcgaccccgagcccctcgttccagagctgagatggcataggccttagcagtaacgggtagcagcagatgtagtttcagacttggagtaaaactgtataaacaaaagaatcttccatatttatacagcagagaagctgtaggactgtttgtgactggccctgtcctggcatcagtagcatctgtaacagcattaactgtcttaaagagagagagagagaattccgaattggggaacacacgatacctgtttttcttttccgttgctggcagtactgttgcgccgcagtttggagtcactgtagttaagtgtggatgcatgtgcgtcaccgtccactcctcctactgtattttattggacaggtcagactcgccgggggcccggcgagggtatgtcagtgtcactggatgtcaaacagtaataaattaaaccaacaacaaaa

SEQ ID NO: 450920 - DNA, 528 bp, Homo sapiens
ggcccctcaggctctcagcttcccatcttctctaagacatgtctgctccatcattctggtgtctctctcttccctccttcctggcacctgacacgtttgttaccccacttgtggggtgttgctgtctgatcaccatcttccttccaagggtaggggaaagggccctggctggttcaagtcacagctctgtcctcagcgccaggcacagtgcccagctcactggcacagcctcagattccctggacacctggctccccggctgcattttttaccattgggataagttattagtaccattgaaaattaatacctggggattctcttaatattgttcatattcatgttcttctcagcagttttaccatgaggaatctgtcttaaacaatgtcagttgtcaatagcgttatttaaaatagcaacaacaataaaaagcatacattaaatatagtaaatgcatagttcagccaagaatcaaagatgcagaagtactatgcatttatttgtgtattccgtgatagaggtgaaagt

SEQ ID NO: 450921 - DNA, 6492 bp, Homo sapiens
tccctaagtgctgggattacaggcatgagctaccgcgcccggctaatttttgtatttttaatagagacgggtttcaccatggtggtcaggctcgtttctaactcccgacctcaggtgatccggccgcctcggcctcccaaagtgctggattacaggcgtgagccaccaagtccggcctctcatactgcactattttgcttattaatcttgcttcttgtcctccttccccactagaccgagggctccacggcggctgggacacagtagcagatcaataaatatttgctaagctaattaatggcacttgggaagttttgcagagaaggcggccacggtcgggccccgccttgcctccccaaataggcctcgccgccccaggtcagggatcaaagcggttcccaggcgcgcccttggcccgcgggaaaccactgcccggtcttggtccaggcggcccgtcctacggtccagggttcctatttccgagcctcagggacctcctttccccacggaccccacggccaccgggatcccattctccagttgccccatcgtcaccgcggccgccgccaccgccgccgcagtggcgtccgctctgcgcatgctccggggcgtcaagacgcgaggcgtgcagaaggcgaagcgtgcgcaggcgcggggccatcgcggcccgagtggggcggtgcatcggacgcgcgtgcttcctccgggccacgcccacccccgtccgcccagggacgggcgcgcacgcgcgccgggagcggaagggcgggctggcgcgcgcacgaggccgggcaggcggcggaagctggagaggccgccgcggtgctgagggggaggggagccggcgagcgcgcgcgcagcgggggcgcgggtggcgcgcgtgtgtgtgaagggggggcggtggccgaggcgggcgggcgcgcgcgcgaggcttcccctcgtttggcggcggcggcggcttctttgtttcgtgaagagaagcgagacgcccattctgcccccggccccgcgcggaggggcgggggaggcgccgggaagtcgacggcgccggcggctcctgcaggaggccactgtctgcagctcccgtgaagatgtccactccagacccacccctgggcggaactcctcggccaggtccttccccgggccctggcccttcccctggagccatgctgggccctagcccgggtccctcgccgggctccgcccacagcatgatggggcccagcccagggccgccctcagcaggacaccccatccccacccaggggcctggagggtaccctcaggacaacatgcaccagatgcacaagcccatggagtccatgcatgagaagggcatgtcggacgacccgcgctacaaccagatgaaaggaatggggatgcggtcagggggccatgctgggatggggcccccgcccagccccatggaccagcactcccaaggttacccctcgcccctgggtggctctgagcatgcctctagtccagttccagccagtggcccgtcttcggggccccagatgtcttccgggccaggaggtgccccgctggatggtgctgacccccaggccttggggcagcagaaccggggcccaaccccatttaaccagaaccagctgcaccagctcagagctcagatcatggcctacaagatgctggccagggggcagcccctccccgaccacctgcagatggcggtgcagggcaagcggccgatgcccgggatgcagcagcagatgccaacgctacctccaccctcggtgtccgcaacaggacccggccctggccctggccctggccccggcccgggtcccggcccggcacctccaaattacagcaggcctcatggtatgggagggcccaacatgcctcccccaggaccctcgggcgtgccccccgggatgccaggccagcctcctggagggcctcccaagccctggcctgaaggacccatggcgaatgctgctgcccccacgagcacccctcagaagctgattcccccgcagccaacgggccgcccttcccccgcgccccctgccgtcccacccgccgcctcgcccgtgatgccaccgcagacccagtcccccgggcagccggcccagcccgcgcccatggtgccactgcaccagaagcagagccgcatcacccccatccagaagccgcggggcctcgaccctgtggagatcctgcaggagcgcgagtacaggctgcaggctcgcatcgcacaccgaattcaggaacttgaaaaccttcccgggtccctggccggggatttgcgaaccaaagcgaccattgagctcaaggccctcaggctgctgaacttccagaggcagctgcgccaggaggtggtggtgtgcatgcggagggacacagcgctggagacagccctcaatgctaaggcctacaagcgcagcaagcgccagtccctgcgcgaggcccgcatcactgagaagctggagaagcagcagaagatcgagcaggagcgcaagcgccggcagaagcaccaggaatacctcaatagcattctccagcatgccaaggatttcaaggaatatcacagatccgtcacaggcaaaatccagaagctgaccaaggcagtggccacgtaccatgccaacacggagcgggagcagaagaaagagaacgagcggatcgagaaggagcgcatgcggaggctcatggctgaagatgaggaggggtaccgcaagctcatcgaccagaagaaggacaagcgcctggcctacctcttgcagcagacagacgagtacgtggctaacctcacggagctggtgcggcagcacaaggctgcccaggtcgccaaggagaaaaagaagaaaaagaaaaagaagaaggcagaaaatgcagaaggacagacgcctgccattgggccggatggcgagcctctggacgagaccagccagatgagcgacctcccggtgaaggtgatccacgtggagagtgggaagatcctcacaggcacagatgcccccaaagccgggcagctggaggcctggctcgagatgaacccggggtatgaagtagctccgaggtctgatagtgaagaaagtggctcagaagaagaggaagaggaggaggaggaagagcagccgcaggcagcacagcctcccaccctgcccgtggaggagaagaagaagattccagatccagacagcgatgacgtctctgaggtggacgcgcggcacatcattgagaatgccaagcaagatgtcgatgatgaatatggcgtgtcccaggcccttgcacgtggcctgcagtcctactatgccgtggcccatgctgtcactgagagagtggacaagcagtcagcgcttatggtcaatggtgtcctcaaacagtaccagatcaaaggtttggagtggctggtgtccctgtacaacaacaacctgaacggcatcctggccgacgagatgggcctggggaagaccatccagaccatcgcgctcatcacgtacctcatggagcacaaacgcatcaatgggcccttcctcatcatcgtgcctctctcaacgctgtccaactgggcgtacgagtttgacaagtgggccccctccgtggtgaaggtgtcttacaagggatccccagcagcaagacgggcctttgtcccccagctccggagtgggaagttcaacgtcttgctgacgacgtacgagtacatcatcaaagacaagcacatcctcgccaagatccgttggaagtacatgattgtggacgaaggtcaccgcatgaagaaccaccactgcaagctgacgcaggtgctcaacacgcactatgtggcaccccgccgcctgctgctgacgggcacaccgctgcagaacaagcttcccgagctctgggcgctgctcaacttcctgctgcccaccatcttcaagagctgcagcaccttcgagcagtggtttaacgcaccctttgccatgaccggggaaaaggtggacctgaatgaggaggaaaccattctcatcatccggcgtctccacaaagtgctgcggcccttcttgctccgacgactcaagaaggaagtcgaggcccagttgcccgaaaaggtggagtacgtcatcaagtgcgacatgtctgcgctgcagcgagtgctctaccgccacatgcaggccaagggcgtgctgctgactgatggctccgagaaggacaagaagggcaaaggcggcaccaagaccctgatgaacaccatcatgcagctgcggaagatctgcaaccacccctacatgttccagcacatcgaggagtccttttccgagcacttggggttcactggcggcattgtccaagggctggacctgtaccgagcctcgggtaaatttgagcttcttgatagaattcttcccaaactccgagcaaccaaccacaaagtgctgctgttctgccaaatgacctccctcatgaccatcatggaagattactttgcgtatcgcggctttaaatacctcaggcttgatggaaccacgaaggcggaggaccggggcatgctgctgaaaaccttcaacgagcccggctctgagtacttcatcttcctgctcagcacccgggctggggggctcggcctgaacctccagtcggcagacactgtgatcatttttgacagcgactggaatcctcaccaggacctgcaagcgcaggaccgagcccaccgcatcgggcagcagaacgaggtgcgtgtgctccgcctctgcaccgtcaacagcgtggaggagaagatcctagctgcagccaagtacaagctcaacgtggaccagaaggtgatccaggccggcatgttcgaccagaagtcctccagccatgagcggcgcgccttcctgcaggccatcctggagcacgaggagcaggatgagagcagacactgcagcacgggcagcggcagtgccagcttcgcccacactgcccctccgccagcgggcgtcaaccccgacttggaggagccacctctaaaggaggaagacgaggtgcccgacgacgagaccgtcaaccagatgatcgcccggcacgaggaggagtttgatctgttcatgcgcatggacctggaccgcaggcgcgaggaggcccgcaaccccaagcggaagccgcgcctcatggaggaggacgagctcccctcgtggatcatcaaggacgacgcggaggtggagcggctgacctgtgaggaggaggaggagaagatgttcggccgtggctcccgccaccgcaaggaggtggactacagcgactcactgacggagaagcagtggctcaaggccatcgaggagggcacgctggaggagatcgaagaggaggtccggcagaagaaatcatcacggaagcgcaagcgagacagcgacgccggctcctccaccccgaccaccagcacccgcagccgcgacaaggacgacgagagcaagaagcagaagaagcgcgggcggccgcctgccgagaaactctcccctaacccacccaacctcaccaagaagatgaagaagattgtggatgccgtgatcaagtacaaggacagcagcagtggacgtcagctcagcgaggtcttcatccagctgccctcgcgaaaggagctgcccgagtactacgagctcatccgcaagcccgtggacttcaagaagataaaggagcgcattcgcaaccacaagtaccgcagcctcaacgacctagagaaggacgtcatgctcctgtgccagaacgcacagaccttcaacctggagggctccctgatctatgaagactccatcgtcttgcagtcggtcttcaccagcgtgcggcagaaaatcgagaaggaggatgacagtgaaggcgaggagagtgaggaggaggaagagggcgaggaggaaggctccgaatccgaatctcggtccgtcaaagtgaagatcaagcttggccggaaggagaaggcacaggaccggctgaagggcggccggcggcggccgagccgagggtcccgagccaagccggtcgtgagtgacgatgacagtgaggaggaacaagaggaggaccgctcaggaagtggcagcgaagaagactgagccccgacattccagtctcgaccccgagcccctcgttccagagctgagatggcataggccttagcagtaacgggtagcagcagatgtagtttcagacttggagtaaaactgtataaacaaaagaatcttccatatttatacagcagagaagctgtaggactgtttgtgactggccctgtcctggcatcagtagcatctgtaacagcattaactgtcttaaagagagagagagagaattccgaattggggaacacacgatacctgtttttcttttccgttgctggcagtactgttgcgccgcagtttggagtcactgtagttaagtgtggatgcatgtgcgtcaccgtccactcctcctactgtattttattggacaggtcagactcgccgggggcccggcgagggtatgtcagtgtcactggatgtcaaacagtaataaattaaaccaacaacaaaa

SEQ ID NO: 450922 - DNA, 6706 bp, Homo sapiens
tccctaagtgctgggattacaggcatgagctaccgcgcccggctaatttttgtatttttaatagagacgggtttcaccatggtggtcaggctcgtttctaactcccgacctcaggtgatccggccgcctcggcctcccaaagtgctggattacaggcgtgagccaccaagtccggcctctcatactgcactattttgcttattaatcttgcttcttgtcctccttccccactagaccgagggctccacggcggctgggacacagtagcagatcaataaatatttgctaagctaattaatggcacttgggaagttttgcagagaaggcggccacggtcgggccccgccttgcctccccaaataggcctcgccgccccaggtcagggatcaaagcggttcccaggcgcgcccttggcccgcgggaaaccactgcccggtcttggtccaggcggcccgtcctacggtccagggttcctatttccgagcctcagggacctcctttccccacggaccccacggccaccgggatcccattctccagttgccccatcgtcaccgcggccgccgccaccgccgccgcagtggcgtccgctctgcgcatgctccggggcgtcaagacgcgaggcgtgcagaaggcgaagcgtgcgcaggcgcggggccatcgcggcccgagtggggcggtgcatcggacgcgcgtgcttcctccgggccacgcccacccccgtccgcccagggacgggcgcgcacgcgcgccgggagcggaagggcgggctggcgcgcgcacgaggccgggcaggcggcggaagctggagaggccgccgcggtgctgagggggaggggagccggcgagcgcgcgcgcagcgggggcgcgggtggcgcgcgtgtgtgtgaagggggggcggtggccgaggcgggcgggcgcgcgcgcgaggcttcccctcgtttggcggcggcggcggcttctttgtttcgtgaagagaagcgagacgcccattctgcccccggccccgcgcggaggggcgggggaggcgccgggaagtcgacggcgccggcggctcctgcaggaggccactgtctgcagctcccgtgaagatgtccactccagacccacccctgggcggaactcctcggccaggtccttccccgggccctggcccttcccctggagccatgctgggccctagcccgggtccctcgccgggctccgcccacagcatgatggggcccagcccagggccgccctcagcaggacaccccatccccacccaggggcctggagggtaccctcaggacaacatgcaccagatgcacaagcccatggagtccatgcatgagaagggcatgtcggacgacccgcgctacaaccagatgaaaggaatggggatgcggtcagggggccatgctgggatggggcccccgcccagccccatggaccagcactcccaaggttacccctcgcccctgggtggctctgagcatgcctctagtccagttccagccagtggcccgtcttcggggccccagatgtcttccgggccaggaggtgccccgctggatggtgctgacccccaggccttggggcagcagaaccggggcccaaccccatttaaccagaaccagctgcaccagctcagagctcagatcatggcctacaagatgctggccagggggcagcccctccccgaccacctgcagatggcggtgcagggcaagcggccgatgcccgggatgcagcagcagatgccaacgctacctccaccctcggtgtccgcaacaggacccggccctggccctggccctggccccggcccgggtcccggcccggcacctccaaattacagcaggcctcatggtatgggagggcccaacatgcctcccccaggaccctcgggcgtgccccccgggatgccaggccagcctcctggagggcctcccaagccctggcctgaaggacccatggcgaatgctgctgcccccacgagcacccctcagaagctgattcccccgcagccaacgggccgcccttcccccgcgccccctgccgtcccacccgccgcctcgcccgtgatgccaccgcagacccagtcccccgggcagccggcccagcccgcgcccatggtgccactgcaccagaagcagagccgcatcacccccatccagaagccgcggggcctcgaccctgtggagatcctgcaggagcgcgagtacaggctgcaggctcgcatcgcacaccgaattcaggaacttgaaaaccttcccgggtccctggccggggatttgcgaaccaaagcgaccattgagctcaaggccctcaggctgctgaacttccagaggcagctgcgccaggaggtggtggtgtgcatgcggagggacacagcgctggagacagccctcaatgctaaggcctacaagcgcagcaagcgccagtccctgcgcgaggcccgcatcactgagaagctggagaagcagcagaagatcgagcaggagcgcaagcgccggcagaagcaccaggaatacctcaatagcattctccagcatgccaaggatttcaaggaatatcacagatccgtcacaggcaaaatccagaagctgaccaaggcagtggccacgtaccatgccaacacggagcgggagcagaagaaagagaacgagcggatcgagaaggagcgcatgcggaggctcatggctgaagatgaggaggggtaccgcaagctcatcgaccagaagaaggacaagcgcctggcctacctcttgcagcagacagacgagtacgtggctaacctcacggagctggtgcggcagcacaaggctgcccaggtcgccaaggagaaaaagaagaaaaagaaaaagaagaaggcagaaaatgcagaaggacagacgcctgccattgggccggatggcgagcctctggacgagaccagccagatgagcgacctcccggtgaaggtgatccacgtggagagtgggaagatcctcacaggcacagatgcccccaaagccgggcagctggaggcctggctcgagatgaacccggggtatgaagtagctccgaggtctgatagtgaagaaagtggctcagaagaagaggaagaggaggaggaggaagagcagccgcaggcagcacagcctcccaccctgcccgtggaggagaagaagaagattccagatccagacagcgatgacgtctctgaggtggacgcgcggcacatcattgagaatgccaagcaagatgtcgatgatgaatatggcgtgtcccaggcccttgcacgtggcctgcagtcctactatgccgtggcccatgctgtcactgagagagtggacaagcagtcagcgcttatggtcaatggtgtcctcaaacagtaccagatcaaaggtttggagtggctggtgtccctgtacaacaacaacctgaacggcatcctggccgacgagatgggcctggggaagaccatccagaccatcgcgctcatcacgtacctcatggagcacaaacgcatcaatgggcccttcctcatcatcgtgcctctctcaacgctgtccaactgggcgtacgagtttgacaagtgggccccctccgtggtgaaggtgtcttacaagggatccccagcagcaagacgggcctttgtcccccagctccggagtgggaagttcaacgtcttgctgacgacgtacgagtacatcatcaaagacaagcacatcctcgccaagatccgttggaagtacatgattgtggacgaaggtcaccgcatgaagaaccaccactgcaagctgacgcaggtgctcaacacgcactatgtggcaccccgccgcctgctgctgacgggcacaccgctgcagaacaagcttcccgagctctgggcgctgctcaacttcctgctgcccaccatcttcaagagctgcagcaccttcgagcagtggtttaacgcaccctttgccatgaccggggaaaaggtggacctgaatgaggaggaaaccattctcatcatccggcgtctccacaaagtgctgcggcccttcttgctccgacgactcaagaaggaagtcgaggcccagttgcccgaaaaggtggagtacgtcatcaagtgcgacatgtctgcgctgcagcgagtgctctaccgccacatgcaggccaagggcgtgctgctgactgatggctccgagaaggacaagaagggcaaaggcggcaccaagaccctgatgaacaccatcatgcagctgcggaagatctgcaaccacccctacatgttccagcacatcgaggagtccttttccgagcacttggggttcactggcggcattgtccaagggctggacctgtaccgagcctcgggtaaatttgagcttcttgatagaattcttcccaaactccgagcaaccaaccacaaagtgctgctgttctgccaaatgacctccctcatgaccatcatggaagattactttgcgtatcgcggctttaaatacctcaggcttgatggaaccacgaaggcggaggaccggggcatgctgctgaaaaccttcaacgagcccggctctgagtacttcatcttcctgctcagcacccgggctggggggctcggcctgaacctccagtcggcagacactgtgatcatttttgacagcgactggaatcctcaccaggacctgcaagcgcaggaccgagcccaccgcatcgggcagcagaacgaggtgcgtgtgctccgcctctgcaccgtcaacagcgtggaggagaagatcctagctgcagccaagtacaagctcaacgtggaccagaaggtgatccaggccggcatgttcgaccagaagtcctccagccatgagcggcgcgccttcctgcaggccatcctggagcacgaggagcaggatgagagcagacactgcagcacgggcagcggcagtgccagcttcgcccacactgcccctccgccagcgggcgtcaaccccgacttggaggagccacctctaaaggaggaagacgaggtgcccgacgacgagaccgtcaaccagatgatcgcccggcacgaggaggagtttgatctgttcatgcgcatggacctggaccgcaggcgcgaggaggcccgcaaccccaagcggaagccgcgcctcatggaggaggacgagctcccctcgtggatcatcaaggacgacgcggaggtggagcggctgacctgtgaggaggaggaggagaagatgttcggccgtggctcccgccaccgcaaggaggtggactacagcgactcactgacggagaagcagtggctcaaggccatcgaggagggcacgctggaggagatcgaagaggaggtccggcagaagaaatcatcacggaagcgcaagcgagacagcgacgccggctcctccaccccgaccaccagcacccgcagccgcgacaaggacgacgagagcaagaagcagaagaagcgcgggcggccgcctgccgagaaactctcccctaacccacccaacctcaccaagaagatgaagaagattgtggatgccgtgatcaagtacaaggacagcagcagtggacgtcagctcagcgaggtcttcatccagctgccctcgcgaaaggagctgcccgagtactacgagctcatccgcaagcccgtggacttcaagaagataaaggagcgcattcgcaaccacaagtaccgcagcctcaacgacctagagaaggacgtcatgctcctgtgccagaacgcacagaccttcaacctggagggctccctgatctatgaagactccatcgtcttgcagtcggtcttcaccagcgtgcggcagaaaatcgagaaggaggatgacagtgaaggcgaggagagtgaggaggaggaagagggcgaggaggaaggctccgaatccgaatctcggtccgtcaaagtgaagatcaagcttggccggaaggagaaggcacaggaccggctgaagggcggccggcggcggccgagccgagggtcccgagccaagccggtcgtgagtgacgatgacagtgaggaggaacaagaggaggaccgctcaggaagtggcagcgaagaagactgagccccgacattccagtctcgaccccgagcccctcgttccagagctgagatggcataggccttagcagtaacgggtagcagcagatgtagtttcagacttggagtaaaactgtataaacaaaagaatcttccatatttatacagcagagaagctgtaggactgtttgtgactggccctgtcctggcatcagtagcatctgtaacagcattaactgtcttaaagagagagagagagaattccgaattggggaacacacgatacctgtttttcttttccgttgctggcagtactgttgcgccgcagtttggagtcactgtagttaagtgtggatgcatgtgcgtcaccgtccactcctcctactgtattttattggacaggtcagactcgccgggggcccggcgagggtatgtcagtgtcactggatgtcaaacagtaataaattaaaccaacaacaaaaaaaaaacaaaaaaaattcccggggacatacatttggtcgggggcgccggaccacagcgggctcttggcaatctgggcccttggggccctacaggtggtttccttgaccccaggtcttcttggtgcccaagtgggcatatccggccggtcccccaaaaaagggcccggttaaattcggaaaacccgggtacctggcttagttccgccggagacgg

SEQ ID NO: 450923 - DNA, 6582 bp, Homo sapiens
tccctaagtgctgggattacaggcatgagctaccgcgcccggctaatttttgtatttttaatagagacgggtttcaccatggtggtcaggctcgtttctaactcccgacctcaggtgatccggccgcctcggcctcccaaagtgctggattacaggcgtgagccaccaagtccggcctctcatactgcactattttgcttattaatcttgcttcttgtcctccttccccactagaccgagggctccacggcggctgggacacagtagcagatcaataaatatttgctaagctaattaatggcacttgggaagttttgcagagaaggcggccacggtcgggccccgccttgcctccccaaataggcctcgccgccccaggtcagggatcaaagcggttcccaggcgcgcccttggcccgcgggaaaccactgcccggtcttggtccaggcggcccgtcctacggtccagggttcctatttccgagcctcagggacctcctttccccacggaccccacggccaccgggatcccattctccagttgccccatcgtcaccgcggccgccgccaccgccgccgcagtggcgtccgctctgcgcatgctccggggcgtcaagacgcgaggcgtgcagaaggcgaagcgtgcgcaggcgcggggccatcgcggcccgagtggggcggtgcatcggacgcgcgtgcttcctccgggccacgcccacccccgtccgcccagggacgggcgcgcacgcgcgccgggagcggaagggcgggctggcgcgcgcacgaggccgggcaggcggcggaagctggagaggccgccgcggtgctgagggggaggggagccggcgagcgcgcgcgcagcgggggcgcgggtggcgcgcgtgtgtgtgaagggggggcggtggccgaggcgggcgggcgcgcgcgcgaggcttcccctcgtttggcggcggcggcggcttctttgtttcgtgaagagaagcgagacgcccattctgcccccggccccgcgcggaggggcgggggaggcgccgggaagtcgacggcgccggcggctcctgcaggaggccactgtctgcagctcccgtgaagatgtccactccagacccacccctgggcggaactcctcggccaggtccttccccgggccctggcccttcccctggagccatgctgggccctagcccgggtccctcgccgggctccgcccacagcatgatggggcccagcccagggccgccctcagcaggacaccccatccccacccaggggcctggagggtaccctcaggacaacatgcaccagatgcacaagcccatggagtccatgcatgagaagggcatgtcggacgacccgcgctacaaccagatgaaaggaatggggatgcggtcagggggccatgctgggatggggcccccgcccagccccatggaccagcactcccaaggttacccctcgcccctgggtggctctgagcatgcctctagtccagttccagccagtggcccgtcttcggggccccagatgtcttccgggccaggaggtgccccgctggatggtgctgacccccaggccttggggcagcagaaccggggcccaaccccatttaaccagaaccagctgcaccagctcagagctcagatcatggcctacaagatgctggccagggggcagcccctccccgaccacctgcagatggcggtgcagggcaagcggccgatgcccgggatgcagcagcagatgccaacgctacctccaccctcggtgtccgcaacaggacccggccctggccctggccctggccccggcccgggtcccggcccggcacctccaaattacagcaggcctcatggtatgggagggcccaacatgcctcccccaggaccctcgggcgtgccccccgggatgccaggccagcctcctggagggcctcccaagccctggcctgaaggacccatggcgaatgctgctgcccccacgagcacccctcagaagctgattcccccgcagccaacgggccgcccttcccccgcgccccctgccgtcccacccgccgcctcgcccgtgatgccaccgcagacccagtcccccgggcagccggcccagcccgcgcccatggtgccactgcaccagaagcagagccgcatcacccccatccagaagccgcggggcctcgaccctgtggagatcctgcaggagcgcgagtacaggctgcaggctcgcatcgcacaccgaattcaggaacttgaaaaccttcccgggtccctggccggggatttgcgaaccaaagcgaccattgagctcaaggccctcaggctgctgaacttccagaggcagctgcgccaggaggtggtggtgtgcatgcggagggacacagcgctggagacagccctcaatgctaaggcctacaagcgcagcaagcgccagtccctgcgcgaggcccgcatcactgagaagctggagaagcagcagaagatcgagcaggagcgcaagcgccggcagaagcaccaggaatacctcaatagcattctccagcatgccaaggatttcaaggaatatcacagatccgtcacaggcaaaatccagaagctgaccaaggcagtggccacgtaccatgccaacacggagcgggagcagaagaaagagaacgagcggatcgagaaggagcgcatgcggaggctcatggctgaagatgaggaggggtaccgcaagctcatcgaccagaagaaggacaagcgcctggcctacctcttgcagcagacagacgagtacgtggctaacctcacggagctggtgcggcagcacaaggctgcccaggtcgccaaggagaaaaagaagaaaaagaaaaagaagaaggcagaaaatgcagaaggacagacgcctgccattgggccggatggcgagcctctggacgagaccagccagatgagcgacctcccggtgaaggtgatccacgtggagagtgggaagatcctcacaggcacagatgcccccaaagccgggcagctggaggcctggctcgagatgaacccggggtatgaagtagctccgaggtctgatagtgaagaaagtggctcagaagaagaggaagaggaggaggaggaagagcagccgcaggcagcacagcctcccaccctgcccgtggaggagaagaagaagattccagatccagacagcgatgacgtctctgaggtggacgcgcggcacatcattgagaatgccaagcaagatgtcgatgatgaatatggcgtgtcccaggcccttgcacgtggcctgcagtcctactatgccgtggcccatgctgtcactgagagagtggacaagcagtcagcgcttatggtcaatggtgtcctcaaacagtaccagatcaaaggtttggagtggctggtgtccctgtacaacaacaacctgaacggcatcctggccgacgagatgggcctggggaagaccatccagaccatcgcgctcatcacgtacctcatggagcacaaacgcatcaatgggcccttcctcatcatcgtgcctctctcaacgctgtccaactgggcgtacgagtttgacaagtgggccccctccgtggtgaaggtgtcttacaagggatccccagcagcaagacgggcctttgtcccccagctccggagtgggaagttcaacgtcttgctgacgacgtacgagtacatcatcaaagacaagcacatcctcgccaagatccgttggaagtacatgattgtggacgaaggtcaccgcatgaagaaccaccactgcaagctgacgcaggtgctcaacacgcactatgtggcaccccgccgcctgctgctgacgggcacaccgctgcagaacaagcttcccgagctctgggcgctgctcaacttcctgctgcccaccatcttcaagagctgcagcaccttcgagcagtggtttaacgcaccctttgccatgaccggggaaaaggtggacctgaatgaggaggaaaccattctcatcatccggcgtctccacaaagtgctgcggcccttcttgctccgacgactcaagaaggaagtcgaggcccagttgcccgaaaaggtggagtacgtcatcaagtgcgacatgtctgcgctgcagcgagtgctctaccgccacatgcaggccaagggcgtgctgctgactgatggctccgagaaggacaagaagggcaaaggcggcaccaagaccctgatgaacaccatcatgcagctgcggaagatctgcaaccacccctacatgttccagcacatcgaggagtccttttccgagcacttggggttcactggcggcattgtccaagggctggacctgtaccgagcctcgggtaaatttgagcttcttgatagaattcttcccaaactccgagcaaccaaccacaaagtgctgctgttctgccaaatgacctccctcatgaccatcatggaagattactttgcgtatcgcggctttaaatacctcaggcttgatggaaccacgaaggcggaggaccggggcatgctgctgaaaaccttcaacgagcccggctctgagtacttcatcttcctgctcagcacccgggctggggggctcggcctgaacctccagtcggcagacactgtgatcatttttgacagcgactggaatcctcaccaggacctgcaagcgcaggaccgagcccaccgcatcgggcagcagaacgaggtgcgtgtgctccgcctctgcaccgtcaacagcgtggaggagaagatcctagctgcagccaagtacaagctcaacgtggaccagaaggtgatccaggccggcatgttcgaccagaagtcctccagccatgagcggcgcgccttcctgcaggccatcctggagcacgaggagcaggatgagagcagacactgcagcacgggcagcggcagtgccagcttcgcccacactgcccctccgccagcgggcgtcaaccccgacttggaggagccacctctaaaggaggaagacgaggtgcccgacgacgagaccgtcaaccagatgatcgcccggcacgaggaggagtttgatctgttcatgcgcatggacctggaccgcaggcgcgaggaggcccgcaaccccaagcggaagccgcgcctcatggaggaggacgagctcccctcgtggatcatcaaggacgacgcggaggtggagcggctgacctgtgaggaggaggaggagaagatgttcggccgtggctcccgccaccgcaaggaggtggactacagcgactcactgacggagaagcagtggctcaaggccatcgaggagggcacgctggaggagatcgaagaggaggtccggcagaagaaatcatcacggaagcgcaagcgagacagcgacgccggctcctccaccccgaccaccagcacccgcagccgcgacaaggacgacgagagcaagaagcagaagaagcgcgggcggccgcctgccgagaaactctcccctaacccacccaacctcaccaagaagatgaagaagattgtggatgccgtgatcaagtacaaggacagcagcagtggacgtcagctcagcgaggtcttcatccagctgccctcgcgaaaggagctgcccgagtactacgagctcatccgcaagcccgtggacttcaagaagataaaggagcgcattcgcaaccacaagtaccgcagcctcaacgacctagagaaggacgtcatgctcctgtgccagaacgcacagaccttcaacctggagggctccctgatctatgaagactccatcgtcttgcagtcggtcttcaccagcgtgcggcagaaaatcgagaaggaggatgacagtgaaggcgaggagagtgaggaggaggaagagggcgaggaggaaggctccgaatccgaatctcggtccgtcaaagtgaagatcaagcttggccggaaggagaaggcacaggaccggctgaagggcggccggcggcggccgagccgagggtcccgagccaagccggtcgtgagtgacgatgacagtgaggaggaacaagaggaggaccgctcaggaagtggcagcgaagaagactgagccccgacattccagtctcgaccccgagcccctcgttccagagctgagatggcataggccttagcagtaacgggtagcagcagatgtagtttcagacttggagtaaaactgtataaacaaaagaatcttccatatttatacagcagagaagctgtaggactgtttgtgactggccctgtcctggcatcagtagcatctgtaacagcattaactgtcttaaagagagagagagagaattccgaattggggaacacacgatacctgtttttctttttctcgctgtcctctctgtggccaccctcctttttctcacttctgctctccctgtccggctcttctctctcctctctcccttctagcagattctctggctgtttcctctcctctccctctgtgctcctccctcctcctctctcctcccggccactatcctctctcttcaccctcttctctttctgtctcatgtctcctcctagctcttttccttcccagttcctagctctctcctttctctttcctcttctctgctgatacatggaccagctca

SEQ ID NO: 450924 - DNA, 6213 bp, Homo sapiens
tccctaagtgctgggattacaggcatgagctaccgcgcccggctaatttttgtatttttaatagagacgggtttcaccatggtggtcaggctcgtttctaactcccgacctcaggtgatccggccgcctcggcctcccaaagtgctggattacaggcgtgagccaccaagtccggcctctcatactgcactattttgcttattaatcttgcttcttgtcctccttccccactagaccgagggctccacggcggctgggacacagtagcagatcaataaatatttgctaagctaattaatggcacttgggaagttttgcagagaaggcggccacggtcgggccccgccttgcctccccaaataggcctcgccgccccaggtcagggatcaaagcggttcccaggcgcgcccttggcccgcgggaaaccactgcccggtcttggtccaggcggcccgtcctacggtccagggttcctatttccgagcctcagggacctcctttccccacggaccccacggccaccgggatcccattctccagttgccccatcgtcaccgcggccgccgccaccgccgccgcagtggcgtccgctctgcgcatgctccggggcgtcaagacgcgaggcgtgcagaaggcgaagcgtgcgcaggcgcggggccatcgcggcccgagtggggcggtgcatcggacgcgcgtgcttcctccgggccacgcccacccccgtccgcccagggacgggcgcgcacgcgcgccgggagcggaagggcgggctggcgcgcgcacgaggccgggcaggcggcggaagctggagaggccgccgcggtgctgagggggaggggagccggcgagcgcgcgcgcagcgggggcgcgggtggcgcgcgtgtgtgtgaagggggggcggtggccgaggcgggcgggcgcgcgcgcgaggcttcccctcgtttggcggcggcggcggcttctttgtttcgtgaagagaagcgagacgcccattctgcccccggccccgcgcggaggggcgggggaggcgccgggaagtcgacggcgccggcggctcctgcaggaggccactgtctgcagctcccgtgaagatgtccactccagacccacccctgggcggaactcctcggccaggtccttccccgggccctggcccttcccctggagccatgctgggccctagcccgggtccctcgccgggctccgcccacagcatgatggggcccagcccagggccgccctcagcaggacaccccatccccacccaggggcctggagggtaccctcaggacaacatgcaccagatgcacaagcccatggagtccatgcatgagaagggcatgtcggacgacccgcgctacaaccagatgaaaggaatggggatgcggtcagggggccatgctgggatggggcccccgcccagccccatggaccagcactcccaaggttacccctcgcccctgggtggctctgagcatgcctctagtccagttccagccagtggcccgtcttcggggccccagatgtcttccgggccaggaggtgccccgctggatggtgctgacccccaggccttggggcagcagaaccggggcccaaccccatttaaccagaaccagctgcaccagctcagagctcagatcatggcctacaagatgctggccagggggcagcccctccccgaccacctgcagatggcggtgcagggcaagcggccgatgcccgggatgcagcagcagatgccaacgctacctccaccctcggtgtccgcaacaggacccggccctggccctggccctggccccggcccgggtcccggcccggcacctccaaattacagcaggcctcatggtatgggagggcccaacatgcctcccccaggaccctcgggcgtgccccccgggatgccaggccagcctcctggagggcctcccaagccctggcctgaaggacccatggcgaatgctgctgcccccacgagcacccctcagaagctgattcccccgcagccaacgggccgcccttcccccgcgccccctgccgtcccacccgccgcctcgcccgtgatgccaccgcagacccagtcccccgggcagccggcccagcccgcgcccatggtgccactgcaccagaagcagagccgcatcacccccatccagaagccgcggggcctcgaccctgtggagatcctgcaggagcgcgagtacaggctgcaggctcgcatcgcacaccgaattcaggaacttgaaaaccttcccgggtccctggccggggatttgcgaaccaaagcgaccattgagctcaaggccctcaggctgctgaacttccagaggcagctgcgccaggaggtggtggtgtgcatgcggagggacacagcgctggagacagccctcaatgctaaggcctacaagcgcagcaagcgccagtccctgcgcgaggcccgcatcactgagaagctggagaagcagcagaagatcgagcaggagcgcaagcgccggcagaagcaccaggaatacctcaatagcattctccagcatgccaaggatttcaaggaatatcacagatccgtcacaggcaaaatccagaagctgaccaaggcagtggccacgtaccatgccaacacggagcgggagcagaagaaagagaacgagcggatcgagaaggagcgcatgcggaggctcatggctgaagatgaggaggggtaccgcaagctcatcgaccagaagaaggacaagcgcctggcctacctcttgcagcagacagacgagtacgtggctaacctcacggagctggtgcggcagcacaaggctgcccaggtcgccaaggagaaaaagaagaaaaagaaaaagaagaaggcagaaaatgcagaaggacagacgcctgccattgggccggatggcgagcctctggacgagaccagccagatgagcgacctcccggtgaaggtgatccacgtggagagtgggaagatcctcacaggcacagatgcccccaaagccgggcagctggaggcctggctcgagatgaacccggggtatgaagtagctccgaggtctgatagtgaagaaagtggctcagaagaagaggaagaggaggaggaggaagagcagccgcaggcagcacagcctcccaccctgcccgtggaggagaagaagaagattccagatccagacagcgatgacgtctctgaggtggacgcgcggcacatcattgagaatgccaagcaagatgtcgatgatgaatatggcgtgtcccaggcccttgcacgtggcctgcagtcctactatgccgtggcccatgctgtcactgagagagtggacaagcagtcagcgcttatggtcaatggtgtcctcaaacagtaccagatcaaaggtttggagtggctggtgtccctgtacaacaacaacctgaacggcatcctggccgacgagatgggcctggggaagaccatccagaccatcgcgctcatcacgtacctcatggagcacaaacgcatcaatgggcccttcctcatcatcgtgcctctctcaacgctgtccaactgggcgtacgagtttgacaagtgggccccctccgtggtgaaggtgtcttacaagggatccccagcagcaagacgggcctttgtcccccagctccggagtgggaagttcaacgtcttgctgacgacgtacgagtacatcatcaaagacaagcacatcctcgccaagatccgttggaagtacatgattgtggacgaaggtcaccgcatgaagaaccaccactgcaagctgacgcaggtgctcaacacgcactatgtggcaccccgccgcctgctgctgacgggcacaccgctgcagaacaagcttcccgagctctgggcgctgctcaacttcctgctgcccaccatcttcaagagctgcagcaccttcgagcagtggtttaacgcaccctttgccatgaccggggaaaaggtggacctgaatgaggaggaaaccattctcatcatccggcgtctccacaaagtgctgcggcccttcttgctccgacgactcaagaaggaagtcgaggcccagttgcccgaaaaggtggagtacgtcatcaagtgcgacatgtctgcgctgcagcgagtgctctaccgccacatgcaggccaagggcgtgctgctgactgatggctccgagaaggacaagaagggcaaaggcggcaccaagaccctgatgaacaccatcatgcagctgcggaagatctgcaaccacccctacatgttccagcacatcgaggagtccttttccgagcacttggggttcactggcggcattgtccaagggctggacctgtaccgagcctcgggtaaatttgagcttcttgatagaattcttcccaaactccgagcaaccaaccacaaagtgctgctgttctgccaaatgacctccctcatgaccatcatggaagattactttgcgtatcgcggctttaaatacctcaggcttgatggaaccacgaaggcggaggaccggggcatgctgctgaaaaccttcaacgagcccggctctgagtacttcatcttcctgctcagcacccgggctggggggctcggcctgaacctccagtcggcagacactgtgatcatttttgacagcgactggaatcctcaccaggacctgcaagcgcaggaccgagcccaccgcatcgggcagcagaacgaggtgcgtgtgctccgcctctgcaccgtcaacagcgtggaggagaagatcctagctgcagccaagtacaagctcaacgtggaccagaaggtgatccaggccggcatgttcgaccagaagtcctccagccatgagcggcgcgccttcctgcaggccatcctggagcacgaggagcaggatgaggaggaagacgaggtgcccgacgacgagaccgtcaaccagatgatcgcccggcacgaggaggagtttgatctgttcatgcgcatggacctggaccgcaggcgcgaggaggcccgcaaccccaagcggaagccgcgcctcatggaggaggacgagctcccctcgtggatcatcaaggacgacgcggaggtggagcggctgacctgtgaggaggaggaggagaagatgttcggccgtggctcccgccaccgcaaggaggtggactacagcgactcactgacggagaagcagtggctcaaggccatcgaggagggcacgctggaggagatcgaagaggaggtccggcagaagaaatcatcacggaagcgcaagcgagacagcgacgccggctcctccaccccgaccaccagcacccgcagccgcgacaaggacgacgagagcaagaagcagaagaagcgcgggcggccgcctgccgagaaactctcccctaacccacccaacctcaccaagaagatgaagaagattgtggatgccgtgatcaagtacaaggacagcagcagtggacgtcagctcagcgaggtcttcatccagctgccctcgcgaaaggagctgcccgagtactacgagctcatccgcaagcccgtggacttcaagaagataaaggagcgcattcgcaaccacaagtaccgcagcctcaacgacctagagaaggacgtcatgctcctgtgccagaacgcacagaccttcaacctggagggctccctgatctatgaagactccatcgtcttgcagtcggtcttcaccagcgtgcggcagaaaatcgagaaggaggatgacagtgaaggcgaggagagtgaggaggaggaagagggcgaggaggaaggctccgaatccgaatctcggtccgtcaaagtgaagatcaagcttggccggaaggagaaggcacaggaccggctgaagggcggccggcggcggccgagccgagggtcccgagccaagccggtcgtgagtgacgatgacagtgaggaggaacaagaggaggaccgctcaggaagtggcagcgaagaagactgagccccgacattccagtctcgaccccgagcccctcgttccagagctgagatggcataggccttagcagtaacgggtagcagcagatgtagtttcagacttggagtaaaactgtataaacaaaaaaaaaaaaataaaaaaaaaaaaaaaaaaaaaaaaaagcgggaggataaatgggggggggggaaaaaagggtaaaaaaagggaaggggtaaggtttcgggacccttttggaaaaggggaaaggggggcccaaagggggagaaagaaagcgggacga

SEQ ID NO: 450925 - DNA, 5726 bp, Homo sapiens
tggggaaggccacagtgtcgcgaggccgtggcagcggcggcccccgcggagcggcggggtgggtggggggcccgggccgcgtggaggccgcgcgatcctctccgcgcgcgctctcgccggggtcgccggacaaagctcgcccccctcgcccggcacccctacagtcgccctcccaattacagcggctgcaacaataggcaggcgttggggcttttctggctgcgtggtaacgggtccgacccgaatgttgcgtttttggcgaagctgcgatcggggctcagccaaacctccagatatgtccggcgtcggccggacacgggcattagcggtccccttgggctagccgacctcaaattgtcttaaaaacgtgtcattccagattttcaaggaaagcaggaggccactgtctgcagctcccgtgaagatgtccactccagacccacccctgggcggaactcctcggccaggtccttccccgggccctggcccttcccctggagccatgctgggccctagcccgggtccctcgccgggctccgcccacagcatgatggggcccagcccagggccgccctcagcaggacaccccatccccacccaggggcctggagggtaccctcaggacaacatgcaccagatgcacaagcccatggagtccatgcatgagaagggcatgtcggacgacccgcgctacaaccagatgaaaggaatggggatgcggtcagggggccatgctgggatggggcccccgcccagccccatggaccagcactcccaaggttacccctcgcccctgggtggctctgagcatgcctctagtccagttccagccagtggcccgtcttcggggccccagatgtcttccgggccaggaggtgccccgctggatggtgctgacccccaggccttggggcagcagaaccggggcccaaccccatttaaccagaaccagctgcaccagctcagagctcagatcatggcctacaagatgctggccagggggcagcccctccccgaccacctgcagatggcggtgcagggcaagcggccgatgcccgggatgcagcagcagatgccaacgctacctccaccctcggtgtccgcaacaggacccggccctggccctggccctggccccggcccgggtcccggcccggcacctccaaattacagcaggcctcatggtatgggagggcccaacatgcctcccccaggaccctcgggcgtgccccccgggatgccaggccagcctcctggagggcctcccaagccctggcctgaaggacccatggcgaatgctgctgcccccacgagcacccctcagaagctgattcccccgcagccaacgggccgcccttcccccgcgccccctgccgtcccacccgccgcctcgcccgtgatgccaccgcagacccagtcccccgggcagccggcccagcccgcgcccatggtgccactgcaccagaagcagagccgcatcacccccatccagaagccgcggggcctcgaccctgtggagatcctgcaggagcgcgagtacaggctgcaggctcgcatcgcacaccgaattcaggaacttgaaaaccttcccgggtccctggccggggatttgcgaaccaaagcgaccattgagctcaaggccctcaggctgctgaacttccagaggcagctgcgccaggaggtggtggtgtgcatgcggagggacacagcgctggagacagccctcaatgctaaggcctacaagcgcagcaagcgccagtccctgcgcgaggcccgcatcactgagaagctggagaagcagcagaagatcgagcaggagcgcaagcgccggcagaagcaccaggaatacctcaatagcattctccagcatgccaaggatttcaaggaatatcacagatccgtcacaggcaaaatccagaagctgaccaaggcagtggccacgtaccatgccaacacggagcgggagcagaagaaagagaacgagcggatcgagaaggagcgcatgcggaggctcatggctgaagatgaggaggggtaccgcaagctcatcgaccagaagaaggacaagcgcctggcctacctcttgcagcagacagacgagtacgtggctaacctcacggagctggtgcggcagcacaaggctgcccaggtcgccaaggagaaaaagaagaaaaagaaaaagaagaaggcagaaaatgcagaaggacagacgcctgccattgggccggatggcgagcctctggacgagaccagccagatgagcgacctcccggtgaaggtgatccacgtggagagtgggaagatcctcacaggcacagatgcccccaaagccgggcagctggaggcctggctcgagatgaacccggggtatgaagtagctccgaggtctgatagtgaagaaagtggctcagaagaagaggaagaggaggaggaggaagagcagccgcaggcagcacagcctcccaccctgcccgtggaggagaagaagaagattccagatccagacagcgatgacgtctctgaggtggacgcgcggcacatcattgagaatgccaagcaagatgtcgatgatgaatatggcgtgtcccaggcccttgcacgtggcctgcagtcctactatgccgtggcccatgctgtcactgagagagtggacaagcagtcagcgcttatggtcaatggtgtcctcaaacagtaccagatcaaaggtttggagtggctggtgtccctgtacaacaacaacctgaacggcatcctggccgacgagatgggcctggggaagaccatccagaccatcgcgctcatcacgtacctcatggagcacaaacgcatcaatgggcccttcctcatcatcgtgcctctctcaacgctgtccaactgggcgtacgagtttgacaagtgggccccctccgtggtgaaggtgtcttacaagggatccccagcagcaagacgggcctttgtcccccagctccggagtgggaagttcaacgtcttgctgacgacgtacgagtacatcatcaaagacaagcacatcctcgccaagatccgttggaagtacatgattgtggacgaaggtcaccgcatgaagaaccaccactgcaagctgacgcaggtgctcaacacgcactatgtggcaccccgccgcctgctgctgacgggcacaccgctgcagaacaagcttcccgagctctgggcgctgctcaacttcctgctgcccaccatcttcaagagctgcagcaccttcgagcagtggtttaacgcaccctttgccatgaccggggaaaaggtggacctgaatgaggaggaaaccattctcatcatccggcgtctccacaaagtgctgcggcccttcttgctccgacgactcaagaaggaagtcgaggcccagttgcccgaaaaggtggagtacgtcatcaagtgcgacatgtctgcgctgcagcgagtgctctaccgccacatgcaggccaagggcgtgctgctgactgatggctccgagaaggacaagaagggcaaaggcggcaccaagaccctgatgaacaccatcatgcagctgcggaagatctgcaaccacccctacatgttccagcacatcgaggagtccttttccgagcacttggggttcactggcggcattgtccaagggctggacctgtaccgagcctcgggtaaatttgagcttcttgatagaattcttcccaaactccgagcaaccaaccacaaagtgctgctgttctgccaaatgacctccctcatgaccatcatggaagattactttgcgtatcgcggctttaaatacctcaggcttgatggaaccacgaaggcggaggaccggggcatgctgctgaaaaccttcaacgagcccggctctgagtacttcatcttcctgctcagcacccgggctggggggctcggcctgaacctccagtcggcagacactgtgatcatttttgacagcgactggaatcctcaccaggacctgcaagcgcaggaccgagcccaccgcatcgggcagcagaacgaggtgcgtgtgctccgcctctgcaccgtcaacagcgtggaggagaagatcctagctgcagccaagtacaagctcaacgtggaccagaaggtgatccaggccggcatgttcgaccagaagtcctccagccatgagcggcgcgccttcctgcaggccatcctggagcacgaggagcaggatgaggaggaagacgaggtgcccgacgacgagaccgtcaaccagatgatcgcccggcacgaggaggagtttgatctgttcatgcgcatggacctggaccgcaggcgcgaggaggcccgcaaccccaagcggaagccgcgcctcatggaggaggacgagctcccctcgtggatcatcaaggacgacgcggaggtggagcggctgacctgtgaggaggaggaggagaagatgttcggccgtggctcccgccaccgcaaggaggtggactacagcgactcactgacggagaagcagtggctcaaggccatcgaggagggcacgctggaggagatcgaagaggaggtccggcagaagaaatcatcacggaagcgcaagcgagacagcgacgccggctcctccaccccgaccaccagcacccgcagccgcgacaaggacgacgagagcaagaagcagaagaagcgcgggcggccgcctgccgagaaactctcccctaacccacccaacctcaccaagaagatgaagaagattgtggatgccgtgatcaagtacaaggacagcagcagtggacgtcagctcagcgaggtcttcatccagctgccctcgcgaaaggagctgcccgagtactacgagctcatccgcaagcccgtggacttcaagaagataaaggagcgcattcgcaaccacaagtaccgcagcctcaacgacctagagaaggacgtcatgctcctgtgccagaacgcacagaccttcaacctggagggctccctgatctatgaagactccatcgtcttgcagtcggtcttcaccagcgtgcggcagaaaatcgagaaggaggatgacagtgaaggcgaggagagtgaggaggaggaagagggcgaggaggaaggctccgaatccgaatctcggtccgtcaaagtgaagatcaagcttggccggaaggagaaggcacaggaccggctgaagggcggccggcggcggccgagccgagggtcccgagccaagccggtcgtgagtgacgatgacagtgaggaggaacaagaggaggaccgctcaggaagtggcagcgaagaagactgagccccgacattccagtctcgaccccgagcccctcgttccagagctgagatggcataggccttagcagtaacgggtagcagcagatgtagtttcagacttggagtaaaactgtataaacaaaagaatcttccatatttatacagcagagaagctgtaggactgtttgtgactggccctgtcctggcatcagtagcatctgtaacagcattaactgtcttaaagagagagagagagaattccgaattggggaacacacgatacctgtttttcttttccgttgctggcagtactgttgcgccgcagtttggagtcactgtagttaagtgtggatgcatgtgcgtcaccgtccactcctcctactgtattttattggacaggtcagactcgccgggggcccggcgagggtatgtcagtgtcactggatgtcaaacagtaataaattaaaccaacaacaaaa

SEQ ID NO: 450926 - DNA, 6044 bp, Homo sapiens
tccctaagtgctgggattacaggcatgagctaccgcgcccggctaatttttgtatttttaatagagacgggtttcaccatggtggtcaggctcgtttctaactcccgacctcaggtgatccggccgcctcggcctcccaaagtgctggattacaggcgtgagccaccaagtccggcctctcatactgcactattttgcttattaatcttgcttcttgtcctccttccccactagaccgagggctccacggcggctgggacacagtagcagatcaataaatatttgctaagctaattaatggcacttgggaagttttgcagagaaggcggccacggtcgggccccgccttgcctccccaaataggcctcgccgccccaggtcagggatcaaagcggttcccaggcgcgcccttggcccgcgggaaaccactgcccggtcttggtccaggcggcccgtcctacggtccagggttcctatttccgagcctcagggacctcctttccccacggaccccacggccaccgggatcccattctccagttgccccatcgtcaccgcggccgccgccaccgccgccgcagtggcgtccgctctgcgcatgctccggggcgtcaagacgcgaggcgtgcagaaggcgaagcgtgcgcaggcgcggggccatcgcggcccgagtggggcggtgcatcggacgcgcgtgcttcctccgggccacgcccacccccgtccgcccagggacgggcgcgcacgcgcgccgggagcggaagggcgggctggcgcgcgcacgaggccgggcaggcggcggaagctggagaggccgccgcggtgctgagggggaggggagccggcgagcgcgcgcgcagcgggggcgcgggtggcgcgcgtgtgtgtgaagggggggcggtggccgaggcgggcgggcgcgcgcgcgaggcttcccctcgtttggcggcggcggcggcttctttgtttcgtgaagagaagcgagacgcccattctgcccccggccccgcgcggaggggcgggggaggcgccgggaagtcgacggcgccggcggctcctgcaggaggccactgtctgcagctcccgtgaagatgtccactccagacccacccctgggcggaactcctcggccaggtccttccccgggccctggcccttcccctggagccatgctgggccctagcccgggtccctcgccgggctccgcccacagcatgatggggcccagcccagggccgccctcagcaggacaccccatccccacccaggggcctggagggtaccctcaggacaacatgcaccagatgcacaagcccatggagtccatgcatgagaagggcatgtcggacgacccgcgctacaaccagatgaaaggaatggggatgcggtcagggggccatgctgggatggggcccccgcccagccccatggaccagcactcccaaggttacccctcgcccctgggtggctctgagcatgcctctagtccagttccagccagtggcccgtcttcggggccccagatgtcttccgggccaggaggtgccccgctggatggtgctgacccccaggccttggggcagcagaaccggggcccaaccccatttaaccagaaccagctgcaccagctcagagctcagatcatggcctacaagatgctggccagggggcagcccctccccgaccacctgccgtcccacccgccgcctcgcccgtgatgccaccgcagacccagtcccccgggcagccggcccagcccgcgcccatggtgccactgcaccagaagcagagccgcatcacccccatccagaagccgcggggcctcgaccctgtggagatcctgcaggagcgcgagtacaggctgcaggctcgcatcgcacaccgaattcaggaacttgaaaaccttcccgggtccctggccggggatttgcgaaccaaagcgaccattgagctcaaggccctcaggctgctgaacttccagaggcagctgcgccaggaggtggtggtgtgcatgcggagggacacagcgctggagacagccctcaatgctaaggcctacaagcgcagcaagcgccagtccctgcgcgaggcccgcatcactgagaagctggagaagcagcagaagatcgagcaggagcgcaagcgccggcagaagcaccaggaatacctcaatagcattctccagcatgccaaggatttcaaggaatatcacagatccgtcacaggcaaaatccagaagctgaccaaggcagtggccacgtaccatgccaacacggagcgggagcagaagaaagagaacgagcggatcgagaaggagcgcatgcggaggctcatggctgaagatgaggaggggtaccgcaagctcatcgaccagaagaaggacaagcgcctggcctacctcttgcagcagacagacgagtacgtggctaacctcacggagctggtgcggcagcacaaggctgcccaggtcgccaaggagaaaaagaagaaaaagaaaaagaagaaggcagaaaatgcagaaggacagacgcctgccattgggccggatggcgagcctctggacgagaccagccagatgagcgacctcccggtgaaggtgatccacgtggagagtgggaagatcctcacaggcacagatgcccccaaagccgggcagctggaggcctggctcgagatgaacccggggtatgaagtagctccgaggtctgatagtgaagaaagtggctcagaagaagaggaagaggaggaggaggaagagcagccgcaggcagcacagcctcccaccctgcccgtggaggagaagaagaagattccagatccagacagcgatgacgtctctgaggtggacgcgcggcacatcattgagaatgccaagcaagatgtcgatgatgaatatggcgtgtcccaggcccttgcacgtggcctgcagtcctactatgccgtggcccatgctgtcactgagagagtggacaagcagtcagcgcttatggtcaatggtgtcctcaaacagtaccagatcaaaggtttggagtggctggtgtccctgtacaacaacaacctgaacggcatcctggccgacgagatgggcctggggaagaccatccagaccatcgcgctcatcacgtacctcatggagcacaaacgcatcaatgggcccttcctcatcatcgtgcctctctcaacgctgtccaactgggcgtacgagtttgacaagtgggccccctccgtggtgaaggtgtcttacaagggatccccagcagcaagacgggcctttgtcccccagctccggagtgggaagttcaacgtcttgctgacgacgtacgagtacatcatcaaagacaagcacatcctcgccaagatccgttggaagtacatgattgtggacgaaggtcaccgcatgaagaaccaccactgcaagctgacgcaggtgctcaacacgcactatgtggcaccccgccgcctgctgctgacgggcacaccgctgcagaacaagcttcccgagctctgggcgctgctcaacttcctgctgcccaccatcttcaagagctgcagcaccttcgagcagtggtttaacgcaccctttgccatgaccggggaaaaggtggacctgaatgaggaggaaaccattctcatcatccggcgtctccacaaagtgctgcggcccttcttgctccgacgactcaagaaggaagtcgaggcccagttgcccgaaaaggtggagtacgtcatcaagtgcgacatgtctgcgctgcagcgagtgctctaccgccacatgcaggccaagggcgtgctgctgactgatggctccgagaaggacaagaagggcaaaggcggcaccaagaccctgatgaacaccatcatgcagctgcggaagatctgcaaccacccctacatgttccagcacatcgaggagtccttttccgagcacttggggttcactggcggcattgtccaagggctggacctgtaccgagcctcgggtaaatttgagcttcttgatagaattcttcccaaactccgagcaaccaaccacaaagtgctgctgttctgccaaatgacctccctcatgaccatcatggaagattactttgcgtatcgcggctttaaatacctcaggcttgatggaaccacgaaggcggaggaccggggcatgctgctgaaaaccttcaacgagcccggctctgagtacttcatcttcctgctcagcacccgggctggggggctcggcctgaacctccagtcggcagacactgtgatcatttttgacagcgactggaatcctcaccaggacctgcaagcgcaggaccgagcccaccgcatcgggcagcagaacgaggtgcgtgtgctccgcctctgcaccgtcaacagcgtggaggagaagatcctagctgcagccaagtacaagctcaacgtggaccagaaggtgatccaggccggcatgttcgaccagaagtcctccagccatgagcggcgcgccttcctgcaggccatcctggagcacgaggagcaggatgaggaggaagacgaggtgcccgacgacgagaccgtcaaccagatgatcgcccggcacgaggaggagtttgatctgttcatgcgcatggacctggaccgcaggcgcgaggaggcccgcaaccccaagcggaagccgcgcctcatggaggaggacgagctcccctcgtggatcatcaaggacgacgcggaggtggagcggctgacctgtgaggaggaggaggagaagatgttcggccgtggctcccgccaccgcaaggaggtggactacagcgactcactgacggagaagcagtggctcaaggccatcgaggagggcacgctggaggagatcgaagaggaggtccggcagaagaaatcatcacggaagcgcaagcgagacagcgacgccggctcctccaccccgaccaccagcacccgcagccgcgacaaggacgacgagagcaagaagcagaagaagcgcgggcggccgcctgccgagaaactctcccctaacccacccaacctcaccaagaagatgaagaagattgtggatgccgtgatcaagtacaaggacagcagcagtggacgtcagctcagcgaggtcttcatccagctgccctcgcgaaaggagctgcccgagtactacgagctcatccgcaagcccgtggacttcaagaagataaaggagcgcattcgcaaccacaagtaccgcagcctcaacgacctagagaaggacgtcatgctcctgtgccagaacgcacagaccttcaacctggagggctccctgatctatgaagactccatcgtcttgcagtcggtcttcaccagcgtgcggcagaaaatcgagaaggaggatgacagtgaaggcgaggagagtgaggaggaggaagagggcgaggaggaaggctccgaatccgaatctcggtccgtcaaagtgaagatcaagcttggccggaaggagaaggcacaggaccggctgaagggcggccggcggcggccgagccgagggtcccgagccaagccggtcgtgagtgacgatgacagtgaggaggaacaagaggaggaccgctcaggaagtggcagcgaagaagactgagccccgacattccagtctcgaccccgagcccctcgttccagagctgagatggcataggccttagcagtaacgggtagcagcagatgtagtttcagacttggagtaaaactgtataaacaaaagaatcttccatatttatacagcagagaagctgtaggactgtttgtgactggccctgtcctggcatcagtagcatctgtaacagcattaactgtcttaaagagagagagagagaattccgaattggggaacacacgatacctgtttttcttttccgttgctggcagtactgttgcgccgcagtttggagtcactgtagttaagtgtggatgcatgtgcgtcaccgtccactcctcctactgtattttattggacaggtcagactcgccgggggcccggcgagggtatgtcagtgtcactggatgtcaaacagtaataaattaaaccaacaacaaaa

SEQ ID NO: 450927 - DNA, 4249 bp, Homo sapiens
gtaatgtgtacccagctaatcactggaactcgacctgtggagatcctgcaggagcgcgagtacaggctgcaggctcgcatcgcacaccgaattcaggaacttgaaaaccttcccgggtccctggccggggatttgcgaaccaaagcgaccattgagctcaaggccctcaggctgctgaacttccagaggcagctgcgccaggaggtggtggtgtgcatgcggagggacacagcgctggagacagccctcaatgctaaggcctacaagcgcagcaagcgccagtccctgcgcgaggcccgcatcactgagaagctggagaagcagcagaagatcgagcaggagcgcaagcgccggcagaagcaccaggaatacctcaatagcattctccagcatgccaaggatttcaaggaatatcacagatccgtcacaggcaaaatccagaagctgaccaaggcagtggccacgtaccatgccaacacggagcgggagcagaagaaagagaacgagcggatcgagaaggagcgcatgcggaggctcatggctgaagatgaggaggggtaccgcaagctcatcgaccagaagaaggacaagcgcctggcctacctcttgcagcagacagacgagtacgtggctaacctcacggagctggtgcggcagcacaaggctgcccaggtcgccaaggagaaaaagaagaaaaagaaaaagaagaaggcagaaaatgcagaaggacagacgcctgccattgggccggatggcgagcctctggacgagaccagccagatgagcgacctcccggtgaaggtgatccacgtggagagtgggaagatcctcacaggcacagatgcccccaaagccgggcagctggaggcctggctcgagatgaacccggggtatgaagtagctccgaggtctgatagtgaagaaagtggctcagaagaagaggaagaggaggaggaggaagagcagccgcaggcagcacagcctcccaccctgcccgtggaggagaagaagaagattccagatccagacagcgatgacgtctctgaggtggacgcgcggcacatcattgagaatgccaagcaagatgtcgatgatgaatatggcgtgtcccaggcccttgcacgtggcctgcagtcctactatgccgtggcccatgctgtcactgagagagtggacaagcagtcagcgcttatggtcaatggtgtcctcaaacagtaccagatcaaaggtttggagtggctggtgtccctgtacaacaacaacctgaacggcatcctggccgacgagatgggcctggggaagaccatccagaccatcgcgctcatcacgtacctcatggagcacaaacgcatcaatgggcccttcctcatcatcgtgcctctctcaacgctgtccaactgggcgtacgagtttgacaagtgggccccctccgtggtgaaggtgtcttacaagggatccccagcagcaagacgggcctttgtcccccagctccggagtgggaagttcaacgtcttgctgacgacgtacgagtacatcatcaaagacaagcacatcctcgccaagatccgttggaagtacatgattgtggacgaaggtcaccgcatgaagaaccaccactgcaagctgacgcaggtgctcaacacgcactatgtggcaccccgccgcctgctgctgacgggcacaccgctgcagaacaagcttcccgagctctgggcgctgctcaacttcctgctgcccaccatcttcaagagctgcagcaccttcgagcagtggtttaacgcaccctttgccatgaccggggaaaaggtggacctgaatgaggaggaaaccattctcatcatccggcgtctccacaaagtgctgcggcccttcttgctccgacgactcaagaaggaagtcgaggcccagttgcccgaaaaggtggagtacgtcatcaagtgcgacatgtctgcgctgcagcgagtgctctaccgccacatgcaggccaagggcgtgctgctgactgatggctccgagaaggacaagaagggcaaaggcggcaccaagaccctgatgaacaccatcatgcagctgcggaagatctgcaaccacccctacatgttccagcacatcgaggagtccttttccgagcacttggggttcactggcggcattgtccaagggctggacctgtaccgagcctcgggtaaatttgagcttcttgatagaattcttcccaaactccgagcaaccaaccacaaagtgctgctgttctgccaaatgacctccctcatgaccatcatggaagattactttgcgtatcgcggctttaaatacctcaggcttgatggaaccacgaaggcggaggaccggggcatgctgctgaaaaccttcaacgagcccggctctgagtacttcatcttcctgctcagcacccgggctggggggctcggcctgaacctccagtcggcagacactgtgatcatttttgacagcgactggaatcctcaccaggacctgcaagcgcaggaccgagcccaccgcatcgggcagcagaacgaggtgcgtgtgctccgcctctgcaccgtcaacagcgtggaggagaagatcctagctgcagccaagtacaagctcaacgtggaccagaaggtgatccaggccggcatgttcgaccagaagtcctccagccatgagcggcgcgccttcctgcaggccatcctggagcacgaggagcaggatgaggaggaagacgaggtgcccgacgacgagaccgtcaaccagatgatcgcccggcacgaggaggagtttgatctgttcatgcgcatggacctggaccgcaggcgcgaggaggcccgcaaccccaagcggaagccgcgcctcatggaggaggacgagctcccctcgtggatcatcaaggacgacgcggaggtggagcggctgacctgtgaggaggaggaggagaagatgttcggccgtggctcccgccaccgcaaggaggtggactacagcgactcactgacggagaagcagtggctcaaggccatcgaggagggcacgctggaggagatcgaagaggaggtccggcagaagaaatcatcacggaagcgcaagcgagacagcgacgccggctcctccaccccgaccaccagcacccgcagccgcgacaaggacgacgagagcaagaagcagaagaagcgcgggcggccgcctgccgagaaactctcccctaacccacccaacctcaccaagaagatgaagaagattgtggatgccgtgatcaagtacaaggacagcagcagtggacgtcagctcagcgaggtcttcatccagctgccctcgcgaaaggagctgcccgagtactacgagctcatccgcaagcccgtggacttcaagaagataaaggagcgcattcgcaaccacaagtaccgcagcctcaacgacctagagaaggacgtcatgctcctgtgccagaacgcacagaccttcaacctggagggctccctgatctatgaagactccatcgtcttgcagtcggtcttcaccagcgtgcggcagaaaatcgagaaggaggatgacagtgaaggcgaggagagtgaggaggaggaagagggcgaggaggaaggctccgaatccgaatctcggtccgtcaaagtgaagatcaagcttggccggaaggagaaggcacaggaccggctgaagggcggccggcggcggccgagccgagggtcccgagccaagccggtcgtgagtgacgatgacagtgaggaggaacaagaggaggaccgctcaggaagtggcagcgaagaagactgagccccgacattccagtctcgaccccgagcccctcgttccagagctgagatggcataggccttagcagtaacgggtagcagcagatgtagtttcagacttggagtaaaactgtataaacaaaagaatcttccatatttatacagcagagaagctgtaggactgtttgtgactggccctgtcctggcatcagtagcatctgtaacagcattaactgtcttaaagagagagagagagaattccgaattggggaacacacgatacctgtttttcttttccgttgctggcagtactgttgcgccgcagtttggagtcactgtagttaagtgtggatgcatgtgcgtcaccgtccactcctcctactgtattttattggacaggtcagactcgccgggggcccggcgagggtatgtcagtgtcactggatgtcaaacagtaataaattaaaccaacaacaaaa

SEQ ID NO: 450928 - DNA, 4248 bp, Homo sapiens
gtattagaggatcccaccaacattggactcgtccctgtgagatcctgcaggagcgcgagtacaggctgcaggctcgcatcgcacaccgaattcaggaacttgaaaaccttcccgggtccctggccggggatttgcgaaccaaagcgaccattgagctcaaggccctcaggctgctgaacttccagaggcagctgcgccaggaggtggtggtgtgcatgcggagggacacagcgctggagacagccctcaatgctaaggcctacaagcgcagcaagcgccagtccctgcgcgaggcccgcatcactgagaagctggagaagcagcagaagatcgagcaggagcgcaagcgccggcagaagcaccaggaatacctcaatagcattctccagcatgccaaggatttcaaggaatatcacagatccgtcacaggcaaaatccagaagctgaccaaggcagtggccacgtaccatgccaacacggagcgggagcagaagaaagagaacgagcggatcgagaaggagcgcatgcggaggctcatggctgaagatgaggaggggtaccgcaagctcatcgaccagaagaaggacaagcgcctggcctacctcttgcagcagacagacgagtacgtggctaacctcacggagctggtgcggcagcacaaggctgcccaggtcgccaaggagaaaaagaagaaaaagaaaaagaagaaggcagaaaatgcagaaggacagacgcctgccattgggccggatggcgagcctctggacgagaccagccagatgagcgacctcccggtgaaggtgatccacgtggagagtgggaagatcctcacaggcacagatgcccccaaagccgggcagctggaggcctggctcgagatgaacccggggtatgaagtagctccgaggtctgatagtgaagaaagtggctcagaagaagaggaagaggaggaggaggaagagcagccgcaggcagcacagcctcccaccctgcccgtggaggagaagaagaagattccagatccagacagcgatgacgtctctgaggtggacgcgcggcacatcattgagaatgccaagcaagatgtcgatgatgaatatggcgtgtcccaggcccttgcacgtggcctgcagtcctactatgccgtggcccatgctgtcactgagagagtggacaagcagtcagcgcttatggtcaatggtgtcctcaaacagtaccagatcaaaggtttggagtggctggtgtccctgtacaacaacaacctgaacggcatcctggccgacgagatgggcctggggaagaccatccagaccatcgcgctcatcacgtacctcatggagcacaaacgcatcaatgggcccttcctcatcatcgtgcctctctcaacgctgtccaactgggcgtacgagtttgacaagtgggccccctccgtggtgaaggtgtcttacaagggatccccagcagcaagacgggcctttgtcccccagctccggagtgggaagttcaacgtcttgctgacgacgtacgagtacatcatcaaagacaagcacatcctcgccaagatccgttggaagtacatgattgtggacgaaggtcaccgcatgaagaaccaccactgcaagctgacgcaggtgctcaacacgcactatgtggcaccccgccgcctgctgctgacgggcacaccgctgcagaacaagcttcccgagctctgggcgctgctcaacttcctgctgcccaccatcttcaagagctgcagcaccttcgagcagtggtttaacgcaccctttgccatgaccggggaaaaggtggacctgaatgaggaggaaaccattctcatcatccggcgtctccacaaagtgctgcggcccttcttgctccgacgactcaagaaggaagtcgaggcccagttgcccgaaaaggtggagtacgtcatcaagtgcgacatgtctgcgctgcagcgagtgctctaccgccacatgcaggccaagggcgtgctgctgactgatggctccgagaaggacaagaagggcaaaggcggcaccaagaccctgatgaacaccatcatgcagctgcggaagatctgcaaccacccctacatgttccagcacatcgaggagtccttttccgagcacttggggttcactggcggcattgtccaagggctggacctgtaccgagcctcgggtaaatttgagcttcttgatagaattcttcccaaactccgagcaaccaaccacaaagtgctgctgttctgccaaatgacctccctcatgaccatcatggaagattactttgcgtatcgcggctttaaatacctcaggcttgatggaaccacgaaggcggaggaccggggcatgctgctgaaaaccttcaacgagcccggctctgagtacttcatcttcctgctcagcacccgggctggggggctcggcctgaacctccagtcggcagacactgtgatcatttttgacagcgactggaatcctcaccaggacctgcaagcgcaggaccgagcccaccgcatcgggcagcagaacgaggtgcgtgtgctccgcctctgcaccgtcaacagcgtggaggagaagatcctagctgcagccaagtacaagctcaacgtggaccagaaggtgatccaggccggcatgttcgaccagaagtcctccagccatgagcggcgcgccttcctgcaggccatcctggagcacgaggagcaggatgaggaggaagacgaggtgcccgacgacgagaccgtcaaccagatgatcgcccggcacgaggaggagtttgatctgttcatgcgcatggacctggaccgcaggcgcgaggaggcccgcaaccccaagcggaagccgcgcctcatggaggaggacgagctcccctcgtggatcatcaaggacgacgcggaggtggagcggctgacctgtgaggaggaggaggagaagatgttcggccgtggctcccgccaccgcaaggaggtggactacagcgactcactgacggagaagcagtggctcaaggccatcgaggagggcacgctggaggagatcgaagaggaggtccggcagaagaaatcatcacggaagcgcaagcgagacagcgacgccggctcctccaccccgaccaccagcacccgcagccgcgacaaggacgacgagagcaagaagcagaagaagcgcgggcggccgcctgccgagaaactctcccctaacccacccaacctcaccaagaagatgaagaagattgtggatgccgtgatcaagtacaaggacagcagcagtggacgtcagctcagcgaggtcttcatccagctgccctcgcgaaaggagctgcccgagtactacgagctcatccgcaagcccgtggacttcaagaagataaaggagcgcattcgcaaccacaagtaccgcagcctcaacgacctagagaaggacgtcatgctcctgtgccagaacgcacagaccttcaacctggagggctccctgatctatgaagactccatcgtcttgcagtcggtcttcaccagcgtgcggcagaaaatcgagaaggaggatgacagtgaaggcgaggagagtgaggaggaggaagagggcgaggaggaaggctccgaatccgaatctcggtccgtcaaagtgaagatcaagcttggccggaaggagaaggcacaggaccggctgaagggcggccggcggcggccgagccgagggtcccgagccaagccggtcgtgagtgacgatgacagtgaggaggaacaagaggaggaccgctcaggaagtggcagcgaagaagactgagccccgacattccagtctcgaccccgagcccctcgttccagagctgagatggcataggccttagcagtaacgggtagcagcagatgtagtttcagacttggagtaaaactgtataaacaaaagaatcttccatatttatacagcagagaagctgtaggactgtttgtgactggccctgtcctggcatcagtagcatctgtaacagcattaactgtcttaaagagagagagagagaattccgaattggggaacacacgatacctgtttttcttttccgttgctggcagtactgttgcgccgcagtttggagtcactgtagttaagtgtggatgcatgtgcgtcaccgtccactcctcctactgtattttattggacaggtcagactcgccgggggcccggcgagggtatgtcagtgtcactggatgtcaaacagtaataaattaaaccaacaacaaaa

SEQ ID NO: 450929 - DNA, 3987 bp, Homo sapiens
tcgcgcagggtatggcctgctgcgcttgtaggccttagcattgtagggctgtgtagaagcagcagaagatcgagcaggagcgcaagcgccggcagaagcaccaggaatacctcaatagcattctccagcatgccaaggatttcaaggaatatcacagatccgtcacaggcaaaatccagaagctgaccaaggcagtggccacgtaccatgccaacacggagcgggagcagaagaaagagaacgagcggatcgagaaggagcgcatgcggaggctcatggctgaagatgaggaggggtaccgcaagctcatcgaccagaagaaggacaagcgcctggcctacctcttgcagcagacagacgagtacgtggctaacctcacggagctggtgcggcagcacaaggctgcccaggtcgccaaggagaaaaagaagaaaaagaaaaagaagaaggcagaaaatgcagaaggacagacgcctgccattgggccggatggcgagcctctggacgagaccagccagatgagcgacctcccggtgaaggtgatccacgtggagagtgggaagatcctcacaggcacagatgcccccaaagccgggcagctggaggcctggctcgagatgaacccggggtatgaagtagctccgaggtctgatagtgaagaaagtggctcagaagaagaggaagaggaggaggaggaagagcagccgcaggcagcacagcctcccaccctgcccgtggaggagaagaagaagattccagatccagacagcgatgacgtctctgaggtggacgcgcggcacatcattgagaatgccaagcaagatgtcgatgatgaatatggcgtgtcccaggcccttgcacgtggcctgcagtcctactatgccgtggcccatgctgtcactgagagagtggacaagcagtcagcgcttatggtcaatggtgtcctcaaacagtaccagatcaaaggtttggagtggctggtgtccctgtacaacaacaacctgaacggcatcctggccgacgagatgggcctggggaagaccatccagaccatcgcgctcatcacgtacctcatggagcacaaacgcatcaatgggcccttcctcatcatcgtgcctctctcaacgctgtccaactgggcgtacgagtttgacaagtgggccccctccgtggtgaaggtgtcttacaagggatccccagcagcaagacgggcctttgtcccccagctccggagtgggaagttcaacgtcttgctgacgacgtacgagtacatcatcaaagacaagcacatcctcgccaagatccgttggaagtacatgattgtggacgaaggtcaccgcatgaagaaccaccactgcaagctgacgcaggtgctcaacacgcactatgtggcaccccgccgcctgctgctgacgggcacaccgctgcagaacaagcttcccgagctctgggcgctgctcaacttcctgctgcccaccatcttcaagagctgcagcaccttcgagcagtggtttaacgcaccctttgccatgaccggggaaaaggtggacctgaatgaggaggaaaccattctcatcatccggcgtctccacaaagtgctgcggcccttcttgctccgacgactcaagaaggaagtcgaggcccagttgcccgaaaaggtggagtacgtcatcaagtgcgacatgtctgcgctgcagcgagtgctctaccgccacatgcaggccaagggcgtgctgctgactgatggctccgagaaggacaagaagggcaaaggcggcaccaagaccctgatgaacaccatcatgcagctgcggaagatctgcaaccacccctacatgttccagcacatcgaggagtccttttccgagcacttggggttcactggcggcattgtccaagggctggacctgtaccgagcctcgggtaaatttgagcttcttgatagaattcttcccaaactccgagcaaccaaccacaaagtgctgctgttctgccaaatgacctccctcatgaccatcatggaagattactttgcgtatcgcggctttaaatacctcaggcttgatggaaccacgaaggcggaggaccggggcatgctgctgaaaaccttcaacgagcccggctctgagtacttcatcttcctgctcagcacccgggctggggggctcggcctgaacctccagtcggcagacactgtgatcatttttgacagcgactggaatcctcaccaggacctgcaagcgcaggaccgagcccaccgcatcgggcagcagaacgaggtgcgtgtgctccgcctctgcaccgtcaacagcgtggaggagaagatcctagctgcagccaagtacaagctcaacgtggaccagaaggtgatccaggccggcatgttcgaccagaagtcctccagccatgagcggcgcgccttcctgcaggccatcctggagcacgaggagcaggatgaggaggaagacgaggtgcccgacgacgagaccgtcaaccagatgatcgcccggcacgaggaggagtttgatctgttcatgcgcatggacctggaccgcaggcgcgaggaggcccgcaaccccaagcggaagccgcgcctcatggaggaggacgagctcccctcgtggatcatcaaggacgacgcggaggtggagcggctgacctgtgaggaggaggaggagaagatgttcggccgtggctcccgccaccgcaaggaggtggactacagcgactcactgacggagaagcagtggctcaaggccatcgaggagggcacgctggaggagatcgaagaggaggtccggcagaagaaatcatcacggaagcgcaagcgagacagcgacgccggctcctccaccccgaccaccagcacccgcagccgcgacaaggacgacgagagcaagaagcagaagaagcgcgggcggccgcctgccgagaaactctcccctaacccacccaacctcaccaagaagatgaagaagattgtggatgccgtgatcaagtacaaggacagcagcagtggacgtcagctcagcgaggtcttcatccagctgccctcgcgaaaggagctgcccgagtactacgagctcatccgcaagcccgtggacttcaagaagataaaggagcgcattcgcaaccacaagtaccgcagcctcaacgacctagagaaggacgtcatgctcctgtgccagaacgcacagaccttcaacctggagggctccctgatctatgaagactccatcgtcttgcagtcggtcttcaccagcgtgcggcagaaaatcgagaaggaggatgacagtgaaggcgaggagagtgaggaggaggaagagggcgaggaggaaggctccgaatccgaatctcggtccgtcaaagtgaagatcaagcttggccggaaggagaaggcacaggaccggctgaagggcggccggcggcggccgagccgagggtcccgagccaagccggtcgtgagtgacgatgacagtgaggaggaacaagaggaggaccgctcaggaagtggcagcgaagaagactgagccccgacattccagtctcgaccccgagcccctcgttccagagctgagatggcataggccttagcagtaacgggtagcagcagatgtagtttcagacttggagtaaaactgtataaacaaaagaatcttccatatttatacagcagagaagctgtaggactgtttgtgactggccctgtcctggcatcagtagcatctgtaacagcattaactgtcttaaagagagagagagagaattccgaattggggaacacacgatacctgtttttcttttccgttgctggcagtactgttgcgccgcagtttggagtcactgtagttaagtgtggatgcatgtgcgtcaccgtccactcctcctactgtattttattggacaggtcagactcgccgggggcccggcgagggtatgtcagtgtcactggatgtcaaacagtaataaattaaaccaacaacaaaa

SEQ ID NO: 450930 - DNA, 3715 bp, Homo sapiens
  misc_feature (10)..(12): n is a, c, g, or t
  misc_feature (15)..(16): n is a, c, g, or t
  misc_feature (41)..(41): n is a, c, g, or t
ggaaaaaccnnnaannctaggctaggtacgaggctgggtgntgagaagaaggacaagcgcctggcctacctcttgcagcagacagacgagtacgtggctaacctcacggagctggtgcggcagcacaaggctgcccaggtcgccaaggagaaaaagaagaaaaagaaaaagaagaaggcagaaaatgcagaaggacagacgcctgccattgggccggatggcgagcctctggacgagaccagccagatgagcgacctcccggtgaaggtgatccacgtggagagtgggaagatcctcacaggcacagatgcccccaaagccgggcagctggaggcctggctcgagatgaacccggggtatgaagtagctccgaggtctgatagtgaagaaagtggctcagaagaagaggaagaggaggaggaggaagagcagccgcaggcagcacagcctcccaccctgcccgtggaggagaagaagaagattccagatccagacagcgatgacgtctctgaggtggacgcgcggcacatcattgagaatgccaagcaagatgtcgatgatgaatatggcgtgtcccaggcccttgcacgtggcctgcagtcctactatgccgtggcccatgctgtcactgagagagtggacaagcagtcagcgcttatggtcaatggtgtcctcaaacagtaccagatcaaaggtttggagtggctggtgtccctgtacaacaacaacctgaacggcatcctggccgacgagatgggcctggggaagaccatccagaccatcgcgctcatcacgtacctcatggagcacaaacgcatcaatgggcccttcctcatcatcgtgcctctctcaacgctgtccaactgggcgtacgagtttgacaagtgggccccctccgtggtgaaggtgtcttacaagggatccccagcagcaagacgggcctttgtcccccagctccggagtgggaagttcaacgtcttgctgacgacgtacgagtacatcatcaaagacaagcacatcctcgccaagatccgttggaagtacatgattgtggacgaaggtcaccgcatgaagaaccaccactgcaagctgacgcaggtgctcaacacgcactatgtggcaccccgccgcctgctgctgacgggcacaccgctgcagaacaagcttcccgagctctgggcgctgctcaacttcctgctgcccaccatcttcaagagctgcagcaccttcgagcagtggtttaacgcaccctttgccatgaccggggaaaaggtggacctgaatgaggaggaaaccattctcatcatccggcgtctccacaaagtgctgcggcccttcttgctccgacgactcaagaaggaagtcgaggcccagttgcccgaaaaggtggagtacgtcatcaagtgcgacatgtctgcgctgcagcgagtgctctaccgccacatgcaggccaagggcgtgctgctgactgatggctccgagaaggacaagaagggcaaaggcggcaccaagaccctgatgaacaccatcatgcagctgcggaagatctgcaaccacccctacatgttccagcacatcgaggagtccttttccgagcacttggggttcactggcggcattgtccaagggctggacctgtaccgagcctcgggtaaatttgagcttcttgatagaattcttcccaaactccgagcaaccaaccacaaagtgctgctgttctgccaaatgacctccctcatgaccatcatggaagattactttgcgtatcgcggctttaaatacctcaggcttgatggaaccacgaaggcggaggaccggggcatgctgctgaaaaccttcaacgagcccggctctgagtacttcatcttcctgctcagcacccgggctggggggctcggcctgaacctccagtcggcagacactgtgatcatttttgacagcgactggaatcctcaccaggacctgcaagcgcaggaccgagcccaccgcatcgggcagcagaacgaggtgcgtgtgctccgcctctgcaccgtcaacagcgtggaggagaagatcctagctgcagccaagtacaagctcaacgtggaccagaaggtgatccaggccggcatgttcgaccagaagtcctccagccatgagcggcgcgccttcctgcaggccatcctggagcacgaggagcaggatgaggaggaagacgaggtgcccgacgacgagaccgtcaaccagatgatcgcccggcacgaggaggagtttgatctgttcatgcgcatggacctggaccgcaggcgcgaggaggcccgcaaccccaagcggaagccgcgcctcatggaggaggacgagctcccctcgtggatcatcaaggacgacgcggaggtggagcggctgacctgtgaggaggaggaggagaagatgttcggccgtggctcccgccaccgcaaggaggtggactacagcgactcactgacggagaagcagtggctcaaggccatcgaggagggcacgctggaggagatcgaagaggaggtccggcagaagaaatcatcacggaagcgcaagcgagacagcgacgccggctcctccaccccgaccaccagcacccgcagccgcgacaaggacgacgagagcaagaagcagaagaagcgcgggcggccgcctgccgagaaactctcccctaacccacccaacctcaccaagaagatgaagaagattgtggatgccgtgatcaagtacaaggacagcagcagtggacgtcagctcagcgaggtcttcatccagctgccctcgcgaaaggagctgcccgagtactacgagctcatccgcaagcccgtggacttcaagaagataaaggagcgcattcgcaaccacaagtaccgcagcctcaacgacctagagaaggacgtcatgctcctgtgccagaacgcacagaccttcaacctggagggctccctgatctatgaagactccatcgtcttgcagtcggtcttcaccagcgtgcggcagaaaatcgagaaggaggatgacagtgaaggcgaggagagtgaggaggaggaagagggcgaggaggaaggctccgaatccgaatctcggtccgtcaaagtgaagatcaagcttggccggaaggagaaggcacaggaccggctgaagggcggccggcggcggccgagccgagggtcccgagccaagccggtcgtgagtgacgatgacagtgaggaggaacaagaggaggaccgctcaggaagtggcagcgaagaagactgagccccgacattccagtctcgaccccgagcccctcgttccagagctgagatggcataggccttagcagtaacgggtagcagcagatgtagtttcagacttggagtaaaactgtataaacaaaagaatcttccatatttatacagcagagaagctgtaggactgtttgtgactggccctgtcctggcatcagtagcatctgtaacagcattaactgtcttaaagagagagagagagaattccgaattggggaacacacgatacctgtttttcttttccgttgctggcagtactgttgcgccgcagtttggagtcactgtagttaagtgtggatgcatgtgcgtcaccgtccactcctcctactgtattttattggacaggtcagactcgccgggggcccggcgagggtatgtcagtgtcactggatgtcaaacagtaataaattaaaccaacaacaaaa

SEQ ID NO: 450931 - DNA, 5643 bp, Homo sapiens
tccctaagtgctgggattacaggcatgagctaccgcgcccggctaatttttgtatttttaatagagacgggtttcaccatggtggtcaggctcgtttctaactcccgacctcaggtgatccggccgcctcggcctcccaaagtgctggattacaggcgtgagccaccaagtccggcctctcatactgcactattttgcttattaatcttgcttcttgtcctccttccccactagaccgagggctccacggcggctgggacacagtagcagatcaataaatatttgctaagctaattaatggcacttgggaagttttgcagagaaggcggccacggtcgggccccgccttgcctccccaaataggcctcgccgccccaggtcagggatcaaagcggttcccaggcgcgcccttggcccgcgggaaaccactgcccggtcttggtccaggcggcccgtcctacggtccagggttcctatttccgagcctcagggacctcctttccccacggaccccacggccaccgggatcccattctccagttgccccatcgtcaccgcggccgccgccaccgccgccgcagtggcgtccgctctgcgcatgctccggggcgtcaagacgcgaggcgtgcagaaggcgaagcgtgcgcaggcgcggggccatcgcggcccgagtggggcggtgcatcggacgcgcgtgcttcctccgggccacgcccacccccgtccgcccagggacgggcgcgcacgcgcgccgggagcggaagggcgggctggcgcgcgcacgaggccgggcaggcggcggaagctggagaggccgccgcggtgctgagggggaggggagccggcgagcgcgcgcgcagcgggggcgcgggtggcgcgcgtgtgtgtgaagggggggcggtggccgaggcgggcgggcgcgcgcgcgaggcttcccctcgtttggcggcggcggcggcttctttgtttcgtgaagagaagcgagacgcccattctgcccccggccccgcgcggaggggcgggggaggcgccgggaagtcgacggcgccggcggctcctgcaggaggccactgtctgcagctcccgtgaagatgtccactccagacccacccctgggcggaactcctcggccaggtccttccccgggccctggcccttcccctggagccatgctgggccctagcccgggtccctcgccgggctccgcccacagcatgatggggcccagcccagggccgccctcagcaggacaccccatccccacccaggggcctggagggtaccctcaggacaacatgcaccagatgcacaagcccatggagtccatgcatgagaagggcatgtcggacgacccgcgctacaaccagatgaaaggaatggggatgcggtcagggggccatgctgggatggggcccccgcccagccccatggaccagcactcccaaggttacccctcgcccctgggtggctctgagcatgcctctagtccagttccagccagtggcccgtcttcggggccccagatgtcttccgggccaggaggtgccccgctggatggtgctgacccccaggccttggggcagcagaaccggggcccaaccccatttaaccagaaccagctgcaccagctcagagctcagatcatggcctacaagatgctggccagggggcagcccctccccgaccacctgcagatggcggtgcagggcaagcggccgatgcccgggatgcagcagcagatgccaacgctacctccaccctcggtgtccgcaacaggacccggccctggccctggccctggccccggcccgggtcccggcccggcacctccaaattacagcaggcctcatggtatgggagggcccaacatgcctcccccaggaccctcgggcgtgccccccgggatgccaggccagcctcctggagggcctcccaagccctggcctgaaggacccatggcgaatgctgctgcccccacgagcacccctcagaagctgattcccccgcagccaacgggccgcccttcccccgcgccccctgccgtcccacccgccgcctcgcccgtgatgccaccgcagacccagtcccccgggcagccggcccagcccgcgcccatggtgccactgcaccagaagcagagccgcatcacccccatccagaagccgcggggcctcgaccctgtggagatcctgcaggagcgcgagtacaggctgcaggctcgcatcgcacaccgaattcaggaacttgaaaaccttcccgggtccctggccggggatttgcgaaccaaagcgaccattgagctcaaggccctcaggctgctgaacttccagaggcagctgcgccaggaggtggtggtgtgcatgcggagggacacagcgctggagacagccctcaatgctaaggcctacaagcgcagcaagcgccagtccctgcgcgaggcccgcatcactgagaagctggagaagcagcagaagatcgagcaggagcgcaagcgccggcagaagcaccaggaatacctcaatagcattctccagcatgccaaggatttcaaggaatatcacagatccgtcacaggcaaaatccagaagctgaccaaggcagtggccacgtaccatgccaacacggagcgggagcagaagaaagagaacgagcggatcgagaaggagcgcatgcggaggctcatggctgaagatgaggaggggtaccgcaagctcatcgaccagaagaaggacaagcgcctggcctacctcttgcagcagacagacgagtacgtggctaacctcacggagctggtgcggcagcacaaggctgcccaggtcgccaaggagaaaaagaagaaaaagaaaaagaagaaggcagaaaatgcagaaggacagacgcctgccattgggccggatggcgagcctctggacgagaccagccagatgagcgacctcccggtgaaggtgatccacgtggagagtgggaagatcctcacaggcacagatgcccccaaagccgggcagctggaggcctggctcgagatgaacccggggtatgaagtagctccgaggtctgatagtgaagaaagtggctcagaagaagaggaagaggaggaggaggaagagcagccgcaggcagcacagcctcccaccctgcccgtggaggagaagaagaagattccagatccagacagcgatgacgtctctgaggtggacgcgcggcacatcattgagaatgccaagcaagatgtcgatgatgaatatggcgtgtcccaggcccttgcacgtggcctgcagtcctactatgccgtggcccatgctgtcactgagagagtggacaagcagtcagcgcttatggtcaatggtgtcctcaaacagtaccagatcaaaggtttggagtggctggtgtccctgtacaacaacaacctgaacggcatcctggccgacgagatgggcctggggaagaccatccagaccatcgcgctcatcacgtacctcatggagcacaaacgcatcaatgggcccttcctcatcatcgtgcctctctcaacgctgtccaactgggcgtacgagtttgacaagtgggccccctccgtggtgaaggtgtcttacaagggatccccagcagcaagacgggcctttgtcccccagctccggagtgggaagttcaacgtcttgctgacgacgtacgagtacatcatcaaagacaagcacatcctcgccaagatccgttggaagtacatgattgtggacgaaggtcaccgcatgaagaaccaccactgcaagctgacgcaggtgctcaacacgcactatgtggcaccccgccgcctgctgctgacgggcacaccgctgcagaacaagcttcccgagctctgggcgctgctcaacttcctgctgcccaccatcttcaagagctgcagcaccttcgagcagtggtttaacgcaccctttgccatgaccggggaaaaggtggacctgaatgaggaggaaaccattctcatcatccggcgtctccacaaagtgctgcggcccttcttgctccgacgactcaagaaggaagtcgaggcccagttgcccgaaaaggtggagtacgtcatcaagtgcgacatgtctgcgctgcagcgagtgctctaccgccacatgcaggccaagggcgtgctgctgactgatggctccgagaaggacaagaagggcaaaggcggcaccaagaccctgatgaacaccatcatgcagctgcggaagatctgcaaccacccctacatgttccagcacatcgaggagtccttttccgagcacttggggttcactggcggcattgtccaagggctggacctgtaccgagcctcgggtaaatttgagcttcttgatagaattcttcccaaactccgagcaaccaaccacaaagtgctgctgttctgccaaatgacctccctcatgaccatcatggaagattactttgcgtatcgcggctttaaatacctcaggcttgatggaaccacgaaggcggaggaccggggcatgctgctgaaaaccttcaacgagcccggctctgagtacttcatcttcctgctcagcacccgggctggggggctcggcctgaacctccagtcggcagacactgtgatcatttttgacagcgactggaatcctcaccaggacctgcaagcgcaggaccgagcccaccgcatcgggcagcagaacgaggtgcgtgtgctccgcctctgcaccgtcaacagcgtggaggagaagatcctagctgcagccaagtacaagctcaacgtggaccagaaggtgatccaggccggcatgttcgaccagaagtcctccagccatgagcggcgcgccttcctgcaggccatcctggagcacgaggagcaggatgaggaggaagacgaggtgcccgacgacgagaccgtcaaccagatgatcgcccggcacgaggaggagtttgatctgttcatgcgcatggacctggaccgcaggcgcgaggaggcccgcaaccccaagcggaagccgcgcctcatggaggaggacgagctcccctcgtggatcatcaaggacgacgcggaggtggagcggctgacctgtgaggaggaggaggagaagatgttcggccgtggctcccgccaccgcaaggaggtggactacagcgactcactgacggagaagcagtggctcaaggccatcgaggagggcacgctggaggagatcgaagaggaggtccggcagaagaaatcatcacggaagcgcaagcgagacagcgacgccggctcctccaccccgaccaccagcacccgcagccgcgacaaggacgacgagagcaagaagcagaagaagcgcgggcggccgcctgccgagaaactctcccctaacccacccaacctcaccaagaagatgaagaagattgtggatgctcctgtgccagaacgcacagaccttcaacctggagggctccctggtgagggcaccgctgggggttggggatgggccactcccacagctgggctttgacccaacccgcccctccttcccttctgaattgatgggttaaaaacaagtcccgctagctgtggtggttcgtgcctgtaatcccagcactttgggaggccaaggcgggaggatcacttgagaccaggagttcacgaccagcctgggcaacata

SEQ ID NO: 450932 - DNA, 2681 bp, Homo sapiens
tgatgcaataaaagacctattgatttggaaaaaaaaaaaaaaaaaaaaaaaaaaactgacgcaggtgctcaacacgcactatgtggcaccccgccgcctgctgctgacgggcacaccgctgcagaacaagcttcccgagctctgggcgctgctcaacttcctgctgcccaccatcttcaagagctgcagcaccttcgagcagtggtttaacgcaccctttgccatgaccggggaaaaggtggacctgaatgaggaggaaaccattctcatcatccggcgtctccacaaagtgctgcggcccttcttgctccgacgactcaagaaggaagtcgaggcccagttgcccgaaaaggtggagtacgtcatcaagtgcgacatgtctgcgctgcagcgagtgctctaccgccacatgcaggccaagggcgtgctgctgactgatggctccgagaaggacaagaagggcaaaggcggcaccaagaccctgatgaacaccatcatgcagctgcggaagatctgcaaccacccctacatgttccagcacatcgaggagtccttttccgagcacttggggttcactggcggcattgtccaagggctggacctgtaccgagcctcgggtaaatttgagcttcttgatagaattcttcccaaactccgagcaaccaaccacaaagtgctgctgttctgccaaatgacctccctcatgaccatcatggaagattactttgcgtatcgcggctttaaatacctcaggcttgatggaaccacgaaggcggaggaccggggcatgctgctgaaaaccttcaacgagcccggctctgagtacttcatcttcctgctcagcacccgggctggggggctcggcctgaacctccagtcggcagacactgtgatcatttttgacagcgactggaatcctcaccaggacctgcaagcgcaggaccgagcccaccgcatcgggcagcagaacgaggtgcgtgtgctccgcctctgcaccgtcaacagcgtggaggagaagatcctagctgcagccaagtacaagctcaacgtggaccagaaggtgatccaggccggcatgttcgaccagaagtcctccagccatgagcggcgcgccttcctgcaggccatcctggagcacgaggagcaggatgaggaggaagacgaggtgcccgacgacgagaccgtcaaccagatgatcgcccggcacgaggaggagtttgatctgttcatgcgcatggacctggaccgcaggcgcgaggaggcccgcaaccccaagcggaagccgcgcctcatggaggaggacgagctcccctcgtggatcatcaaggacgacgcggaggtggagcggctgacctgtgaggaggaggaggagaagatgttcggccgtggctcccgccaccgcaaggaggtggactacagcgactcactgacggagaagcagtggctcaaggccatcgaggagggcacgctggaggagatcgaagaggaggtccggcagaagaaatcatcacggaagcgcaagcgagacagcgacgccggctcctccaccccgaccaccagcacccgcagccgcgacaaggacgacgagagcaagaagcagaagaagcgcgggcggccgcctgccgagaaactctcccctaacccacccaacctcaccaagaagatgaagaagattgtggatgccgtgatcaagtacaaggacagcagcagtggacgtcagctcagcgaggtcttcatccagctgccctcgcgaaaggagctgcccgagtactacgagctcatccgcaagcccgtggacttcaagaagataaaggagcgcattcgcaaccacaagtaccgcagcctcaacgacctagagaaggacgtcatgctcctgtgccagaacgcacagaccttcaacctggagggctccctgatctatgaagactccatcgtcttgcagtcggtcttcaccagcgtgcggcagaaaatcgagaaggaggatgacagtgaaggcgaggagagtgaggaggaggaagagggcgaggaggaaggctccgaatccgaatctcggtccgtcaaagtgaagatcaagcttggccggaaggagaaggcacaggaccggctgaagggcggccggcggcggccgagccgagggtcccgagccaagccggtcgtgagtgacgatgacagtgaggaggaacaagaggaggaccgctcaggaagtggcagcgaagaagactgagccccgacattccagtctcgaccccgagcccctcgttccagagctgagatggcataggccttagcagtaacgggtagcagcagatgtagtttcagacttggagtaaaactgtataaacaaaagaatcttccatatttatacagcagagaagctgtaggactgtttgtgactggccctgtcctggcatcagtagcatctgtaacagcattaactgtcttaaagagagagagagagaattccgaattggggaacacacgatacctgtttttcttttccgttgctggcagtactgttgcgccgcagtttggagtcactgtagttaagtgtggatgcatgtgcgtcaccgtccactcctcctactgtattttattggacaggtcagactcgccgggggcccggcgagggtatgtcagtgtcactggatgtcaaacagtaataaattaaaccaacaacaaaa

SEQ ID NO: 450933 - DNA, 2731 bp, Homo sapiens
  misc_feature (10)..(12): n is a, c, g, or t
  misc_feature (15)..(16): n is a, c, g, or t
  misc_feature (41)..(41): n is a, c, g, or t
ggaaaaaccnnnaannctaggctaggtacgaggctgggtgntgagatccgttggaagtacatgattgtggacgaaggtcaccgcatgaagaaccaccactgcaagctgacgcaggtgctcaacacgcactatgtggcaccccgccgcctgctgctgacgggcacaccgctgcagaacaagcttcccgagctctgggcgctgctcaacttcctgctgcccaccatcttcaagagctgcagcaccttcgagcagtggtttaacgcaccctttgccatgaccggggaaaaggtggacctgaatgaggaggaaaccattctcatcatccggcgtctccacaaagtgctgcggcccttcttgctccgacgactcaagaaggaagtcgaggcccagttgcccgaaaaggtggagtacgtcatcaagtgcgacatgtctgcgctgcagcgagtgctctaccgccacatgcaggccaagggcgtgctgctgactgatggctccgagaaggacaagaagggcaaaggcggcaccaagaccctgatgaacaccatcatgcagctgcggaagatctgcaaccacccctacatgttccagcacatcgaggagtccttttccgagcacttggggttcactggcggcattgtccaagggctggacctgtaccgagcctcgggtaaatttgagcttcttgatagaattcttcccaaactccgagcaaccaaccacaaagtgctgctgttctgccaaatgacctccctcatgaccatcatggaagattactttgcgtatcgcggctttaaatacctcaggcttgatggaaccacgaaggcggaggaccggggcatgctgctgaaaaccttcaacgagcccggctctgagtacttcatcttcctgctcagcacccgggctggggggctcggcctgaacctccagtcggcagacactgtgatcatttttgacagcgactggaatcctcaccaggacctgcaagcgcaggaccgagcccaccgcatcgggcagcagaacgaggtgcgtgtgctccgcctctgcaccgtcaacagcgtggaggagaagatcctagctgcagccaagtacaagctcaacgtggaccagaaggtgatccaggccggcatgttcgaccagaagtcctccagccatgagcggcgcgccttcctgcaggccatcctggagcacgaggagcaggatgaggaggaagacgaggtgcccgacgacgagaccgtcaaccagatgatcgcccggcacgaggaggagtttgatctgttcatgcgcatggacctggaccgcaggcgcgaggaggcccgcaaccccaagcggaagccgcgcctcatggaggaggacgagctcccctcgtggatcatcaaggacgacgcggaggtggagcggctgacctgtgaggaggaggaggagaagatgttcggccgtggctcccgccaccgcaaggaggtggactacagcgactcactgacggagaagcagtggctcaaggccatcgaggagggcacgctggaggagatcgaagaggaggtccggcagaagaaatcatcacggaagcgcaagcgagacagcgacgccggctcctccaccccgaccaccagcacccgcagccgcgacaaggacgacgagagcaagaagcagaagaagcgcgggcggccgcctgccgagaaactctcccctaacccacccaacctcaccaagaagatgaagaagattgtggatgccgtgatcaagtacaaggacagcagcagtggacgtcagctcagcgaggtcttcatccagctgccctcgcgaaaggagctgcccgagtactacgagctcatccgcaagcccgtggacttcaagaagataaaggagcgcattcgcaaccacaagtaccgcagcctcaacgacctagagaaggacgtcatgctcctgtgccagaacgcacagaccttcaacctggagggctccctgatctatgaagactccatcgtcttgcagtcggtcttcaccagcgtgcggcagaaaatcgagaaggaggatgacagtgaaggcgaggagagtgaggaggaggaagagggcgaggaggaaggctccgaatccgaatctcggtccgtcaaagtgaagatcaagcttggccggaaggagaaggcacaggaccggctgaagggcggccggcggcggccgagccgagggtcccgagccaagccggtcgtgagtgacgatgacagtgaggaggaacaagaggaggaccgctcaggaagtggcagcgaagaagactgagccccgacattccagtctcgaccccgagcccctcgttccagagctgagatggcataggccttagcagtaacgggtagcagcagatgtagtttcagacttggagtaaaactgtataaacaaaagaatcttccatatttatacagcagagaagctgtaggactgtttgtgactggccctgtcctggcatcagtagcatctgtaacagcattaactgtcttaaagagagagagagagaattccgaattggggaacacacgatacctgtttttcttttccgttgctggcagtactgttgcgccgcagtttggagtcactgtagttaagtgtggatgcatgtgcgtcaccgtccactcctcctactgtattttattggacaggtcagactcgccgggggcccggcgagggtatgtcagtgtcactggatgtcaaacagtaataaattaaaccaacaacaaaa

SEQ ID NO: 450934 - DNA, 2385 bp, Homo sapiens
caaggacggctacatgatatgctacaacagaaacagcagcgcgtcgtttaataatcacgtactgggcccacgttaaaccttagtaaagcgagtaccgttaatgtgtcagacgcagtgccatgtggctgcgcagaaatttcgagcgacgcaagtgccaaagcaccggcaaaggcggcaccaagaccctgatgaacaccatcatgcagctgcggaagatctgcaaccacccctacatgttccagcacatcgaggagtccttttccgagcacttggggttcactggcggcattgtccaagggctggacctgtaccgagcctcgggtaaatttgagcttcttgatagaattcttcccaaactccgagcaaccaaccacaaagtgctgctgttctgccaaatgacctccctcatgaccatcatggaagattactttgcgtatcgcggctttaaatacctcaggcttgatggaaccacgaaggcggaggaccggggcatgctgctgaaaaccttcaacgagcccggctctgagtacttcatcttcctgctcagcacccgggctggggggctcggcctgaacctccagtcggcagacactgtgatcatttttgacagcgactggaatcctcaccaggacctgcaagcgcaggaccgagcccaccgcatcgggcagcagaacgaggtgcgtgtgctccgcctctgcaccgtcaacagcgtggaggagaagatcctagctgcagccaagtacaagctcaacgtggaccagaaggtgatccaggccggcatgttcgaccagaagtcctccagccatgagcggcgcgccttcctgcaggccatcctggagcacgaggagcaggatgaggaggaagacgaggtgcccgacgacgagaccgtcaaccagatgatcgcccggcacgaggaggagtttgatctgttcatgcgcatggacctggaccgcaggcgcgaggaggcccgcaaccccaagcggaagccgcgcctcatggaggaggacgagctcccctcgtggatcatcaaggacgacgcggaggtggagcggctgacctgtgaggaggaggaggagaagatgttcggccgtggctcccgccaccgcaaggaggtggactacagcgactcactgacggagaagcagtggctcaaggccatcgaggagggcacgctggaggagatcgaagaggaggtccggcagaagaaatcatcacggaagcgcaagcgagacagcgacgccggctcctccaccccgaccaccagcacccgcagccgcgacaaggacgacgagagcaagaagcagaagaagcgcgggcggccgcctgccgagaaactctcccctaacccacccaacctcaccaagaagatgaagaagattgtggatgccgtgatcaagtacaaggacagcagcagtggacgtcagctcagcgaggtcttcatccagctgccctcgcgaaaggagctgcccgagtactacgagctcatccgcaagcccgtggacttcaagaagataaaggagcgcattcgcaaccacaagtaccgcagcctcaacgacctagagaaggacgtcatgctcctgtgccagaacgcacagaccttcaacctggagggctccctgatctatgaagactccatcgtcttgcagtcggtcttcaccagcgtgcggcagaaaatcgagaaggaggatgacagtgaaggcgaggagagtgaggaggaggaagagggcgaggaggaaggctccgaatccgaatctcggtccgtcaaagtgaagatcaagcttggccggaaggagaaggcacaggaccggctgaagggcggccggcggcggccgagccgagggtcccgagccaagccggtcgtgagtgacgatgacagtgaggaggaacaagaggaggaccgctcaggaagtggcagcgaagaagactgagccccgacattccagtctcgaccccgagcccctcgttccagagctgagatggcataggccttagcagtaacgggtagcagcagatgtagtttcagacttggagtaaaactgtataaacaaaagaatcttccatatttatacagcagagaagctgtaggactgtttgtgactggccctgtcctggcatcagtagcatctgtaacagcattaactgtcttaaagagagagagagagaattccgaattggggaacacacgatacctgtttttcttttccgttgctggcagtactgttgcgccgcagtttggagtcactgtagttaagtgtggatgcatgtgcgtcaccgtccactcctcctactgtattttattggacaggtcagactcgccgggggcccggcgagggtatgtcagtgtcactggatgtcaaacagtaataaattaaaccaacaacaaaa

SEQ ID NO: 450935 - DNA, 2259 bp, Homo sapiens
aacttagctagtacgaggctggtgttaatcggccgaggggcaaaggcggcaccaagaccctgatgaacaccatcatgcagctgcggaagatctgcaaccacccctacatgttccagcacatcgaggagtccttttccgagcacttggggttcactggcggcattgtccaagggctggacctgtaccgagcctcgggtaaatttgagcttcttgatagaattcttcccaaactccgagcaaccaaccacaaagtgctgctgttctgccaaatgacctccctcatgaccatcatggaagattactttgcgtatcgcggctttaaatacctcaggcttgatggaaccacgaaggcggaggaccggggcatgctgctgaaaaccttcaacgagcccggctctgagtacttcatcttcctgctcagcacccgggctggggggctcggcctgaacctccagtcggcagacactgtgatcatttttgacagcgactggaatcctcaccaggacctgcaagcgcaggaccgagcccaccgcatcgggcagcagaacgaggtgcgtgtgctccgcctctgcaccgtcaacagcgtggaggagaagatcctagctgcagccaagtacaagctcaacgtggaccagaaggtgatccaggccggcatgttcgaccagaagtcctccagccatgagcggcgcgccttcctgcaggccatcctggagcacgaggagcaggatgaggaggaagacgaggtgcccgacgacgagaccgtcaaccagatgatcgcccggcacgaggaggagtttgatctgttcatgcgcatggacctggaccgcaggcgcgaggaggcccgcaaccccaagcggaagccgcgcctcatggaggaggacgagctcccctcgtggatcatcaaggacgacgcggaggtggagcggctgacctgtgaggaggaggaggagaagatgttcggccgtggctcccgccaccgcaaggaggtggactacagcgactcactgacggagaagcagtggctcaaggccatcgaggagggcacgctggaggagatcgaagaggaggtccggcagaagaaatcatcacggaagcgcaagcgagacagcgacgccggctcctccaccccgaccaccagcacccgcagccgcgacaaggacgacgagagcaagaagcagaagaagcgcgggcggccgcctgccgagaaactctcccctaacccacccaacctcaccaagaagatgaagaagattgtggatgccgtgatcaagtacaaggacagcagcagtggacgtcagctcagcgaggtcttcatccagctgccctcgcgaaaggagctgcccgagtactacgagctcatccgcaagcccgtggacttcaagaagataaaggagcgcattcgcaaccacaagtaccgcagcctcaacgacctagagaaggacgtcatgctcctgtgccagaacgcacagaccttcaacctggagggctccctgatctatgaagactccatcgtcttgcagtcggtcttcaccagcgtgcggcagaaaatcgagaaggaggatgacagtgaaggcgaggagagtgaggaggaggaagagggcgaggaggaaggctccgaatccgaatctcggtccgtcaaagtgaagatcaagcttggccggaaggagaaggcacaggaccggctgaagggcggccggcggcggccgagccgagggtcccgagccaagccggtcgtgagtgacgatgacagtgaggaggaacaagaggaggaccgctcaggaagtggcagcgaagaagactgagccccgacattccagtctcgaccccgagcccctcgttccagagctgagatggcataggccttagcagtaacgggtagcagcagatgtagtttcagacttggagtaaaactgtataaacaaaagaatcttccatatttatacagcagagaagctgtaggactgtttgtgactggccctgtcctggcatcagtagcatctgtaacagcattaactgtcttaaagagagagagagagaattccgaattggggaacacacgatacctgtttttcttttccgttgctggcagtactgttgcgccgcagtttggagtcactgtagttaagtgtggatgcatgtgcgtcaccgtccactcctcctactgtattttattggacaggtcagactcgccgggggcccggcgagggtatgtcagtgtcactggatgtcaaacagtaataaattaaaccaacaacaaaa

SEQ ID NO: 450936 - DNA, 5005 bp, Homo sapiens
tccctaagtgctgggattacaggcatgagctaccgcgcccggctaatttttgtatttttaatagagacgggtttcaccatggtggtcaggctcgtttctaactcccgacctcaggtgatccggccgcctcggcctcccaaagtgctggattacaggcgtgagccaccaagtccggcctctcatactgcactattttgcttattaatcttgcttcttgtcctccttccccactagaccgagggctccacggcggctgggacacagtagcagatcaataaatatttgctaagctaattaatggcacttgggaagttttgcagagaaggcggccacggtcgggccccgccttgcctccccaaataggcctcgccgccccaggtcagggatcaaagcggttcccaggcgcgcccttggcccgcgggaaaccactgcccggtcttggtccaggcggcccgtcctacggtccagggttcctatttccgagcctcagggacctcctttccccacggaccccacggccaccgggatcccattctccagttgccccatcgtcaccgcggccgccgccaccgccgccgcagtggcgtccgctctgcgcatgctccggggcgtcaagacgcgaggcgtgcagaaggcgaagcgtgcgcaggcgcggggccatcgcggcccgagtggggcggtgcatcggacgcgcgtgcttcctccgggccacgcccacccccgtccgcccagggacgggcgcgcacgcgcgccgggagcggaagggcgggctggcgcgcgcacgaggccgggcaggcggcggaagctggagaggccgccgcggtgctgagggggaggggagccggcgagcgcgcgcgcagcgggggcgcgggtggcgcgcgtgtgtgtgaagggggggcggtggccgaggcgggcgggcgcgcgcgcgaggcttcccctcgtttggcggcggcggcggcttctttgtttcgtgaagagaagcgagacgcccattctgcccccggccccgcgcggaggggcgggggaggcgccgggaagtcgacggcgccggcggctcctgcaggaggccactgtctgcagctcccgtgaagatgtccactccagacccacccctgggcggaactcctcggccaggtccttccccgggccctggcccttcccctggagccatgctgggccctagcccgggtccctcgccgggctccgcccacagcatgatggggcccagcccagggccgccctcagcaggacaccccatccccacccaggggcctggagggtaccctcaggacaacatgcaccagatgcacaagcccatggagtccatgcatgagaagggcatgtcggacgacccgcgctacaaccagatgaaaggaatggggatgcggtcagggggccatgctgggatggggcccccgcccagccccatggaccagcactcccaaggttacccctcgcccctgggtggctctgagcatgcctctagtccagttccagccagtggcccgtcttcggggccccagatgtcttccgggccaggaggtgccccgctggatggtgctgacccccaggccttggggcagcagaaccggggcccaaccccatttaaccagaaccagctgcaccagctcagagctcagatcatggcctacaagatgctggccagggggcagcccctccccgaccacctgcagatggcggtgcagggcaagcggccgatgcccgggatgcagcagcagatgccaacgctacctccaccctcggtgtccgcaacaggacccggccctggccctggccctggccccggcccgggtcccggcccggcacctccaaattacagcaggcctcatggtatgggagggcccaacatgcctcccccaggaccctcgggcgtgccccccgggatgccaggccagcctcctggagggcctcccaagccctggcctgaaggacccatggcgaatgctgctgcccccacgagcacccctcagaagctgattcccccgcagccaacgggccgcccttcccccgcgccccctgccgtcccacccgccgcctcgcccgtgatgccaccgcagacccagtcccccgggcagccggcccagcccgcgcccatggtgccactgcaccagaagcagagccgcatcacccccatccagaagccgcggggcctcgaccctgtggagatcctgcaggagcgcgagtacaggctgcaggctcgcatcgcacaccgaattcaggaacttgaaaaccttcccgggtccctggccggggatttgcgaaccaaagcgaccattgagctcaaggccctcaggctgctgaacttccagaggcagctgcgccaggaggtggtggtgtgcatgcggagggacacagcgctggagacagccctcaatgctaaggcctacaagcgcagcaagcgccagtccctgcgcgaggcccgcatcactgagaagctggagaagcagcagaagatcgagcaggagcgcaagcgccggcagaagcaccaggaatacctcaatagcattctccagcatgccaaggatttcaaggaatatcacagatccgtcacaggcaaaatccagaagctgaccaaggcagtggccacgtaccatgccaacacggagcgggagcagaagaaagagaacgagcggatcgagaaggagcgcatgcggaggctcatggctgaagatgaggaggggtaccgcaagctcatcgaccagaagaaggacaagcgcctggcctacctcttgcagcagacagacgagtacgtggctaacctcacggagctggtgcggcagcacaaggctgcccaggtcgccaaggagaaaaagaagaaaaagaaaaagaagaaggcagaaaatgcagaaggacagacgcctgccattgggccggatggcgagcctctggacgagaccagccagatgagcgacctcccggtgaaggtgatccacgtggagagtgggaagatcctcacaggcacagatgcccccaaagccgggcagctggaggcctggctcgagatgaacccggggtatgaagtagctccgaggtctgatagtgaagaaagtggctcagaagaagaggaagaggaggaggaggaagagcagccgcaggcagcacagcctcccaccctgcccgtggaggagaagaagaagattccagatccagacagcgatgacgtctctgaggtggacgcgcggcacatcattgagaatgccaagcaagatgtcgatgatgaatatggcgtgtcccaggcccttgcacgtggcctgcagtcctactatgccgtggcccatgctgtcactgagagagtggacaagcagtcagcgcttatggtcaatggtgtcctcaaacagtaccagatcaaaggtttggagtggctggtgtccctgtacaacaacaacctgaacggcatcctggccgacgagatgggcctggggaagaccatccagaccatcgcgctcatcacgtacctcatggagcacaaacgcatcaatgggcccttcctcatcatcgtgcctctctcaacgctgtccaactgggcgtacgagtttgacaagtgggccccctccgtggtgaaggtgtcttacaagggatccccagcagcaagacgggcctttgtcccccagctccggagtgggaagttcaacgtcttgctgacgacgtacgagtacatcatcaaagacaagcacatcctcgccaagatccgttggaagtacatgattgtggacgaaggtcaccgcatgaagaaccaccactgcaagctgacgcaggtgctcaacacgcactatgtggcaccccgccgcctgctgctgacgggcacaccgctgcagaacaagcttcccgagctctgggcgctgctcaacttcctgctgcccaccatcttcaagagctgcagcaccttcgagcagtggtttaacgcaccctttgccatgaccggggaaaaggtggacctgaatgaggaggaaaccattctcatcatccggcgtctccacaaagtgctgcggcccttcttgctccgacgactcaagaaggaagtcgaggcccagttgcccgaaaaggtggagtacgtcatcaagtgcgacatgtctgcgctgcagcgagtgctctaccgccacatgcaggccaagggcgtgctgctgactgatggctccgagaaggacaagaagggcaaaggcggcaccaagaccctgatgaacaccatcatgcagctgcggaagatctgcaaccacccctacatgttccagcacatcgaggagtccttttccgagcacttggggttcactggcggcattgtccaagggctggacctgtaccgagcctcgggtaaatttgagcttcttgatagaattcttcccaaactccgagcaaccaaccacaaagtgctgctgttctgccaaatgacctccctcatgaccatcatggaagattactttgcgtatcgcggctttaaatacctcaggcttgatggaaccacgaaggcggaggaccggggcatgctgctgaaaaccttcaacgagcccggctctgagtacttcatcttcctgctcagcacccgggctggggggctcggcctgaacctccagtcggcagacactgtgatcatttttgacagcgactggaatcctcaccaggacctgcaagcgcaggaccgagcccaccgcatcgggcagcagaacgaggtgcgtgtgctccgcctctgcaccgtcaacagcgtggaggagaagatcctagctgcagccaagtacaagctcaacgtggaccagaaggtgatccaggccggcatgttcgaccagaagtcctccagccatgagcggcgcgccttcctgcaggccatcctggagcacgaggagcaggatgaggaggaagacgaggtgcccgacgacgagaccgtcaaccagatgatcgcccggcacgaggaggagtttgatctgttcatgcgcatggacctggagcgcatggcgcgacggaggcccgcaccgcagctggggatactctagaa

SEQ ID NO: 450937 - DNA, 4938 bp, Homo sapiens
tccctaagtgctgggattacaggcatgagctaccgcgcccggctaatttttgtatttttaatagagacgggtttcaccatggtggtcaggctcgtttctaactcccgacctcaggtgatccggccgcctcggcctcccaaagtgctggattacaggcgtgagccaccaagtccggcctctcatactgcactattttgcttattaatcttgcttcttgtcctccttccccactagaccgagggctccacggcggctgggacacagtagcagatcaataaatatttgctaagctaattaatggcacttgggaagttttgcagagaaggcggccacggtcgggccccgccttgcctccccaaataggcctcgccgccccaggtcagggatcaaagcggttcccaggcgcgcccttggcccgcgggaaaccactgcccggtcttggtccaggcggcccgtcctacggtccagggttcctatttccgagcctcagggacctcctttccccacggaccccacggccaccgggatcccattctccagttgccccatcgtcaccgcggccgccgccaccgccgccgcagtggcgtccgctctgcgcatgctccggggcgtcaagacgcgaggcgtgcagaaggcgaagcgtgcgcaggcgcggggccatcgcggcccgagtggggcggtgcatcggacgcgcgtgcttcctccgggccacgcccacccccgtccgcccagggacgggcgcgcacgcgcgccgggagcggaagggcgggctggcgcgcgcacgaggccgggcaggcggcggaagctggagaggccgccgcggtgctgagggggaggggagccggcgagcgcgcgcgcagcgggggcgcgggtggcgcgcgtgtgtgtgaagggggggcggtggccgaggcgggcgggcgcgcgcgcgaggcttcccctcgtttggcggcggcggcggcttctttgtttcgtgaagagaagcgagacgcccattctgcccccggccccgcgcggaggggcgggggaggcgccgggaagtcgacggcgccggcggctcctgcaggaggccactgtctgcagctcccgtgaagatgtccactccagacccacccctgggcggaactcctcggccaggtccttccccgggccctggcccttcccctggagccatgctgggccctagcccgggtccctcgccgggctccgcccacagcatgatggggcccagcccagggccgccctcagcaggacaccccatccccacccaggggcctggagggtaccctcaggacaacatgcaccagatgcacaagcccatggagtccatgcatgagaagggcatgtcggacgacccgcgctacaaccagatgaaaggaatggggatgcggtcagggggccatgctgggatggggcccccgcccagccccatggaccagcactcccaaggttacccctcgcccctgggtggctctgagcatgcctctagtccagttccagccagtggcccgtcttcggggccccagatgtcttccgggccaggaggtgccccgctggatggtgctgacccccaggccttggggcagcagaaccggggcccaaccccatttaaccagaaccagctgcaccagctcagagctcagatcatggcctacaagatgctggccagggggcagcccctccccgaccacctgcagatggcggtgcagggcaagcggccgatgcccgggatgcagcagcagatgccaacgctacctccaccctcggtgtccgcaacaggacccggccctggccctggccctggccccggcccgggtcccggcccggcacctccaaattacagcaggcctcatggtatgggagggcccaacatgcctcccccaggaccctcgggcgtgccccccgggatgccaggccagcctcctggagggcctcccaagccctggcctgaaggacccatggcgaatgctgctgcccccacgagcacccctcagaagctgattcccccgcagccaacgggccgcccttcccccgcgccccctgccgtcccacccgccgcctcgcccgtgatgccaccgcagacccagtcccccgggcagccggcccagcccgcgcccatggtgccactgcaccagaagcagagccgcatcacccccatccagaagccgcggggcctcgaccctgtggagatcctgcaggagcgcgagtacaggctgcaggctcgcatcgcacaccgaattcaggaacttgaaaaccttcccgggtccctggccggggatttgcgaaccaaagcgaccattgagctcaaggccctcaggctgctgaacttccagaggcagctgcgccaggaggtggtggtgtgcatgcggagggacacagcgctggagacagccctcaatgctaaggcctacaagcgcagcaagcgccagtccctgcgcgaggcccgcatcactgagaagctggagaagcagcagaagatcgagcaggagcgcaagcgccggcagaagcaccaggaatacctcaatagcattctccagcatgccaaggatttcaaggaatatcacagatccgtcacaggcaaaatccagaagctgaccaaggcagtggccacgtaccatgccaacacggagcgggagcagaagaaagagaacgagcggatcgagaaggagcgcatgcggaggctcatggctgaagatgaggaggggtaccgcaagctcatcgaccagaagaaggacaagcgcctggcctacctcttgcagcagacagacgagtacgtggctaacctcacggagctggtgcggcagcacaaggctgcccaggtcgccaaggagaaaaagaagaaaaagaaaaagaagaaggcagaaaatgcagaaggacagacgcctgccattgggccggatggcgagcctctggacgagaccagccagatgagcgacctcccggtgaaggtgatccacgtggagagtgggaagatcctcacaggcacagatgcccccaaagccgggcagctggaggcctggctcgagatgaacccggggtatgaagtagctccgaggtctgatagtgaagaaagtggctcagaagaagaggaagaggaggaggaggaagagcagccgcaggcagcacagcctcccaccctgcccgtggaggagaagaagaagattccagatccagacagcgatgacgtctctgaggtggacgcgcggcacatcattgagaatgccaagcaagatgtcgatgatgaatatggcgtgtcccaggcccttgcacgtggcctgcagtcctactatgccgtggcccatgctgtcactgagagagtggacaagcagtcagcgcttatggtcaatggtgtcctcaaacagtaccagatcaaaggtttggagtggctggtgtccctgtacaacaacaacctgaacggcatcctggccgacgagatgggcctggggaagaccatccagaccatcgcgctcatcacgtacctcatggagcacaaacgcatcaatgggcccttcctcatcatcgtgcctctctcaacgctgtccaactgggcgtacgagtttgacaagtgggccccctccgtggtgaaggtgtcttacaagggatccccagcagcaagacgggcctttgtcccccagctccggagtgggaagttcaacgtcttgctgacgacgtacgagtacatcatcaaagacaagcacatcctcgccaagatccgttggaagtacatgattgtggacgaaggtcaccgcatgaagaaccaccactgcaagctgacgcaggtgctcaacacgcactatgtggcaccccgccgcctgctgctgacgggcacaccgctgcagaacaagcttcccgagctctgggcgctgctcaacttcctgctgcccaccatcttcaagagctgcagcaccttcgagcagtggtttaacgcaccctttgccatgaccggggaaaaggtggacctgaatgaggaggaaaccattctcatcatccggcgtctccacaaagtgctgcggcccttcttgctccgacgactcaagaaggaagtcgaggcccagttgcccgaaaaggtggagtacgtcatcaagtgcgacatgtctgcgctgcagcgagtgctctaccgccacatgcaggccaagggcgtgctgctgactgatggctccgagaaggacaagaagggcaaaggcggcaccaagaccctgatgaacaccatcatgcagctgcggaagatctgcaaccacccctacatgttccagcacatcgaggagtccttttccgagcacttggggttcactggcggcattgtccaagggctggacctgtaccgagcctcgggtaaatttgagcttcttgatagaattcttcccaaactccgagcaaccaaccacaaagtgctgctgttctgccaaatgacctccctcatgaccatcatggaagattactttgcgtatcgcggctttaaatacctcaggcttgatggaaccacgaaggcggaggaccggggcatgctgctgaaaaccttcaacgagcccggctctgagtacttcatcttcctgctcagcacccgggctggggggctcggcctgaacctccagtcggcagacactgtgatcatttttgacagcgactggaatcctcaccaggacctgcaagcgcaggaccgagcccaccgcatcgggcagcagaacgaggtgcgtgtgctccgcctctgcaccgtcaacagcgtggaggagaagatcctagctgcagccaagtacaagctcaacgtggaccagaaggtgatccaggccggcatgttcgaccagaagtcctccagccatgagcggcgcgccttcctgcaggccatcctggagcacgaggagcaggatgagttgtacttggctgcagctaggatcttctcctccacgctgttgacggtgcagaggcggagcacacgcacctcga

SEQ ID NO: 450938 - DNA, 1752 bp, Homo sapiens
gtgacacgtgcctgtagtcccagctacttaggaggctgaggtgggaggatctcttgagccctgggagttcaagactgcagtgagctatgatggtgccactgcactccagcctgggcaacaggtcgagaccctgtctctaaaaataaataagtaaataaaagaaatagatggggagagtgtggaacagaggtgtcaacatcacctccgggtgaagggatttcaggagcacgttcttttctgtacagagaagatagttctttttttttggtcaagaaattcaaccattagttttttaaagacaagcttgggtggggtgcctgctgggggcagtgctggtctttcactgcagcccaggcaccccttgagagtcccagtgtgtgttatgccccgagccagtcaagctgaagggagagcgggtgcgggggccctcctccgtgtcccagcccggcccctgggattgcgtcgcggcctctgcttgtcgacctgggtgctggctgtcctattttactactattgaccctgccatcgaggagggcacgctggaggagatcgaagaggaggtccggcagaagaaatcatcacggaagcgcaagcgagacagcgacgccggctcctccaccccgaccaccagcacccgcagccgcgacaaggacgacgagagcaagaagcagaagaagcgcgggcggccgcctgccgagaaactctcccctaacccacccaacctcaccaagaagatgaagaagattgtggatgccgtgatcaagtacaaggacagcagcagtggacgtcagctcagcgaggtcttcatccagctgccctcgcgaaaggagctgcccgagtactacgagctcatccgcaagcccgtggacttcaagaagataaaggagcgcattcgcaaccacaagtaccgcagcctcaacgacctagagaaggacgtcatgctcctgtgccagaacgcacagaccttcaacctggagggctccctgatctatgaagactccatcgtcttgcagtcggtcttcaccagcgtgcggcagaaaatcgagaaggaggatgacagtgaaggcgaggagagtgaggaggaggaagagggcgaggaggaaggctccgaatccgaatctcggtccgtcaaagtgaagatcaagcttggccggaaggagaaggcacaggaccggctgaagggcggccggcggcggccgagccgagggtcccgagccaagccggtcgtgagtgacgatgacagtgaggaggaacaagaggaggaccgctcaggaagtggcagcgaagaagactgagccccgacattccagtctcgaccccgagcccctcgttccagagctgagatggcataggccttagcagtaacgggtagcagcagatgtagtttcagacttggagtaaaactgtataaacaaaagaatcttccatatttatacagcagagaagctgtaggactgtttgtgactggccctgtcctggcatcagtagcatctgtaacagcattaactgtcttaaagagagagagagagaattccgaattggggaacacacgatacctgtttttcttttccgttgctggcagtactgttgcgccgcagtttggagtcactgtagttaagtgtggatgcatgtgcgtcaccgtccactcctcctactgtattttattggacaggtcagactcgccgggggcccggcgagggtatgtcagtgtcactggatgtcaaacagtaataaattaaaccaacaacaaaa

SEQ ID NO: 450939 - DNA, 2282 bp, Homo sapiens
ggcccctcaggctctcagcttcccatcttctctaagacatgtctgctccatcattctggtgtctctctcttccctccttcctggcacctgacacgtttgttaccccacttgtggggtgttgctgtctgatcaccatcttccttccaagggtaggggaaagggccctggctggttcaagtcacagctctgtcctcagcgccaggcacagtgcccagctcactggcacagcctcagattccctggacacctggctccccggctgcattttttaccattgggataagttattagtaccattgaaaattaatacctggggattctcttaatattgttcatattcatgttcttctcagcagttttaccatgaggaatctgtcttaaacaatgtcagttgtcaatagcgttatttaaaatagcaacaacaataaaaaaaggtggtcagacctggcagcttgtgcctgtaatcccagcacttggagaagccaaagcggggggatcatttcagctcaggagtttgagaccagtctggccaaaatagcaagacctttgtctctattaaaaaaaaaaatgccaggcacagtgacacatgcctgtaatcccaagcactttgggaggccgaggtgggcagatcacctgaggtcaggagctcaagaccagcctggccaacatggcaaaaacccgtttctactaaaaatacaaaaattagccaggcatggtggtgggcacctgtcatcccagctacttgggaggctgagtcaggagaatcactggaacctaggagttggagtttgtagtgagccaagatcgcaccactgcactccagcctgggcgacagaatgagaccctgtctctgaaaaaaagggaaatgacctaaatgcccaagaacaaggggaggctaaattagggcacgttgtgcactgaaacactaaacagacattaaaaaattttgttgtagaaaattacaggaaaagatatccatgacacagccagcagtgtggcacgtgggctacaattccagcgtggccttcagttctgcacacgtgcgtcaaaggccatcgaggagggcacgctggaggagatcgaagaggaggtccggcagaagaaatcatcacggaagcgcaagcgagacagcgacgccggctcctccaccccgaccaccagcacccgcagccgcgacaaggacgacgagagcaagaagcagaagaagcgcgggcggccgcctgccgagaaactctcccctaacccacccaacctcaccaagaagatgaagaagattgtggatgccgtgatcaagtacaaggacagcagcagtggacgtcagctcagcgaggtcttcatccagctgccctcgcgaaaggagctgcccgagtactacgagctcatccgcaagcccgtggacttcaagaagataaaggagcgcattcgcaaccacaagtaccgcagcctcaacgacctagagaaggacgtcatgctcctgtgccagaacgcacagaccttcaacctggagggctccctgatctatgaagactccatcgtcttgcagtcggtcttcaccagcgtgcggcagaaaatcgagaaggaggatgacagtgaaggcgaggagagtgaggaggaggaagagggcgaggaggaaggctccgaatccgaatctcggtccgtcaaagtgaagatcaagcttggccggaaggagaaggcacaggaccggctgaagggcggccggcggcggccgagccgagggtcccgagccaagccggtcgtgagtgacgatgacagtgaggaggaacaagaggaggaccgctcaggaagtggcagcgaagaagactgagccccgacattccagtctcgaccccgagcccctcgttccagagctgagatggcataggccttagcagtaacgggtagcagcagatgtagtttcagacttggagtaaaactgtataaacaaaagaatcttccatatttatacagcagagaagctgtaggactgtttgtgactggccctgtcctggcatcagtagcatctgtaacagcattaactgtcttaaagagagagagagagaattccgaattggggaacacacgatacctgtttttcttttccgttgctggcagtactgttgcgccgcagtttggagtcactgtagttaagtgtggatgcatgtgcgtcaccgtccactcctcctactgtattttattggacaggtcagactcgccgggggcccggcgagggtatgtcagtgtcactggatgtcaaacagtaataaattaaaccaacaacaaaa

SEQ ID NO: 450940 - DNA, 3509 bp, Homo sapiens
tccctaagtgctgggattacaggcatgagctaccgcgcccggctaatttttgtatttttaatagagacgggtttcaccatggtggtcaggctcgtttctaactcccgacctcaggtgatccggccgcctcggcctcccaaagtgctggattacaggcgtgagccaccaagtccggcctctcatactgcactattttgcttattaatcttgcttcttgtcctccttccccactagaccgagggctccacggcggctgggacacagtagcagatcaataaatatttgctaagctaattaatggcacttgggaagttttgcagagaaggcggccacggtcgggccccgccttgcctccccaaataggcctcgccgccccaggtcagggatcaaagcggttcccaggcgcgcccttggcccgcgggaaaccactgcccggtcttggtccaggcggcccgtcctacggtccagggttcctatttccgagcctcagggacctcctttccccacggaccccacggccaccgggatcccattctccagttgccccatcgtcaccgcggccgccgccaccgccgccgcagtggcgtccgctctgcgcatgctccggggcgtcaagacgcgaggcgtgcagaaggcgaagcgtgcgcaggcgcggggccatcgcggcccgagtggggcggtgcatcggacgcgcgtgcttcctccgggccacgcccacccccgtccgcccagggacgggcgcgcacgcgcgccgggagcggaagggcgggctggcgcgcgcacgaggccgggcaggcggcggaagctggagaggccgccgcggtgctgagggggaggggagccggcgagcgcgcgcgcagcgggggcgcgggtggcgcgcgtgtgtgtgaagggggggcggtggccgaggcgggcgggcgcgcgcgcgaggcttcccctcgtttggcggcggcggcggcttctttgtttcgtgaagagaagcgagacgcccattctgcccccggccccgcgcggaggggcgggggaggcgccgggaagtcgacggcgccggcggctcctgcaggaggccactgtctgcagctcccgtgaagatgtccactccagacccacccctgggcggaactcctcggccaggtccttccccgggccctggcccttcccctggagccatgctgggccctagcccgggtccctcgccgggctccgcccacagcatgatggggcccagcccagggccgccctcagcaggacaccccatccccacccaggggcctggagggtaccctcaggacaacatgcaccagatgcacaagcccatggagtccatgcatgagaagggcatgtcggacgacccgcgctacaaccagatgaaaggaatggggatgcggtcagggggccatgctgggatggggcccccgcccagccccatggaccagcactcccaaggttacccctcgcccctgggtggctctgagcatgcctctagtccagttccagccagtggcccgtcttcggggccccagatgtcttccgggccaggaggtgccccgctggatggtgctgacccccaggccttggggcagcagaaccggggcccaaccccatttaaccagaaccagctgcaccagctcagagctcagatcatggcctacaagatgctggccagggggcagcccctccccgaccacctgcagatggcggtgcagggcaagcggccgatgcccgggatgcagcagcagatgccaacgctacctccaccctcggtgtccgcaacaggacccggccctggccctggccctggccccggcccgggtcccggcccggcacctccaaattacagcaggcctcatggtatgggagggcccaacatgcctcccccaggaccctcgggcgtgccccccgggatgccaggccagcctcctggagggcctcccaagccctggcctgaaggacccatggcgaatgctgctgcccccacgagcacccctcagaagctgattcccccgcagccaacgggccgcccttcccccgcgccccctgccgtcccacccgccgcctcgcccgtgatgccaccgcagacccagtcccccgggcagccggcccagcccgcgcccatggtgccactgcaccagaagcagagccgcatcacccccatccagaagccgcggggcctcgaccctgtggagatcctgcaggagcgcgagtacaggctgcaggctcgcatcgcacaccgaattcaggaacttgaaaaccttcccgggtccctggccggggatttgcgaaccaaagcgaccattgagctcaaggccctcaggctgctgaacttccagaggcagctgcgccaggaggtggtggtgtgcatgcggagggacacagcgctggagacagccctcaatgctaaggcctacaagcgcagcaagcgccagtccctgcgcgaggcccgcatcactgagaagctggagaagcagcagaagatcgagcaggagcgcaagcgccggcagaagcaccaggaatacctcaatagcattctccagcatgccaaggatttcaaggaatatcacagatccgtcacaggcaaaatccagaagctgaccaaggcagtggccacgtaccatgccaacacggagcgggagcagaagaaagagaacgagcggatcgagaaggagcgcatgcggaggctcatggctgaagatgaggaggggtaccgcaagctcatcgaccagaagaaggacaagcgcctggcctacctcttgcagcagacagacgagtacgtggctaacctcacggagctggtgcggcagcacaaggctgcccaggtcgccaaggagaaaaagaagaaaaagaaaaagaagaaggcagaaaatgcagaaggacagacgcctgccattgggccggatggcgagcctctggacgagaccagccagatgagcgacctcccggtgaaggtgatccacgtggagagtgggaagatcctcacaggcacagatgcccccaaagccgggcagctggaggcctggctcgagatgaacccggggtatgaagtagctccgaggtctgatagtgaagaaagtggctcagaagaagaggaagaggaggaggaggaagagcagccgcaggcagcacagcctcccaccctgcccgtggaggagaagaagaagattccagatccagacagcgatgacgtctctgaggtggacgcgcggcacatcattgagtaaggggtcccgacacaggttgttctgtgccagcttcctgtgaggtggcgctggtgggagtggctagaatcccagccatccctagctgacattcagcactgtccagccagctgctactgtggaactacagagaccaaatttatttacttcacatttcatgtattttatagggatttaatagagcaattgcattcgcatggttcaccatatgcttacgaggtacagtcaggtgtgcgggagaagccctcctcaccccgttctctgctccccggctccctccctttccactaccct

SEQ ID NO: 450941 - DNA, 1578 bp, Homo sapiens
ggcccctcaggctctcagcttcccatcttctctaagacatgtctgctccatcattctggtgtctctctcttccctccttcctggcacctgacacgtttgttaccccacttgtggggtgttgctgtctgatcaccatcttccttccaagggtaggggaaagggccctggctggttcaagtcacagctctgtcctcagcgccaggcacagtgcccagctcactggcacagcctcagattccctggacacctggctccccggctgcattttttaccattgggataagttattagtaccattgaaaattaatacctggggattctcttaatattgttcatattcatgttcttctcagcagttttaccatgaggaatctgtcttaaacaatgtcagttgtcaatagcgttatttaaaatagcaacaacaataaaaaaaggtggtcagacctggcagcttgtgcctgtaatcccagcacttggagaagccaaagcggggggatcatttcagctcaggagtttgagaccagtctggccaaaatagcaagacctttgtctctattaaaaaaaaaaatgccaggcacagtgacacatgcctgtaatcccaagcactttgggaggccgaggtgggcagatcacctgaggtcaggagctcaagaccagcctggccaacatggcaaaaacccgtttctactaaaaatacaaaaattagccaggcatggtggtgggcacctgtcatcccagctacttgggaggctgagtcaggagaatcactggaacctaggagttggagtttgtagtgagccaagatcgcaccactgcactccagcctgggcgacagaatgagaccctgtctctgaaaaaaagggaaatgacctaaatgcccaagaacaaggggaggctaaattagggcacgttgtgcactgaaacactaaacagacattaaaaaattttgttgtagaaaattacaggaaaagatatccatgacacagccagcagtgtggcacgtgggctacaattccagcgtggccttcagttctgcacacgtgcgtcaaaggtggggagagttctgttggtggtggcgctgagggctgcacaacactgggacgtgccttatgcccctgaactgtgtactaaaacatggctgctttggtaaattttatgttatatatgatttataatatatttttttaaatgcccagctactcaggaggctaagatgggaagatcacttgagcccaggagttaaagtccaaccagggcaatgtagcaagaccacatgtctaagaaaatttaaaaatcggctgggcgcggtggctcacgcctgtaatcccagcactttgagaggccgacatgggtggatcacgaggttaagagattaagaccatcctggccaacatggtaaaaccctgtctctactaaaaataccaaaattagctggacgtggtggtgggcgcctgtagtcccagctactcaggagggtgagggaggagaatcgcttgaaccaggaaggtggaggttgcagtgagctgagattgcaccactgcactccagcctggtgacagagcgagactgcgtctcaac

SEQ ID NO: 450942 - DNA, 633 bp, Homo sapiens
atcctcctgcctcagcctcccaaagtgctgggattacaggcatgagccaccacgcaggcctggtttttgtatttttaatagacacagggtttcgccatgtcgcccaggctagtctcgaactcctgagctcaagccatccacctgtctcagcctcccaaagtgctgggattacaggcatgagccactgctcctggccgcctagttaatttttcttctagtttttgtagaagtgaggtctctccatgttgcccaggttggtctcaaactcctgggcttgagcaatcctcccaccttggcctcccaaagtgttgggattactggcgttaagccaccacacccagccaagagtgttatacttctgaatgactcctaagacgtgtgtgtggtagaggggaggcaagctggaggtccgagaggaccccctggatagatgtccagaagtgatcaccttctgtcctgtgctcgccctgcccgggggcacctgctagacgtcccctgcacacacggactgggtgtgtaaggcacttacaatgctcctttagcggtgaagcatgtgacatcaccatacgtgtttgtcattgtggatgccacagagctgtgcagtgcgcgggcttgtcctcttccctcctacag

SEQ ID NO: 450943 - DNA, 676 bp, Homo sapiens
ctgttgtagggattgaaaagcactcataggctcacatagctcacaataggttagagcacaaaatcccacttcctgtcagggggccaggtgcctgtgcgggctctcctggccacatcaggaggggccgtgggcttggggttgccccccggccccccatcatggctctgggttttcaaggcctgctgcagccacacccctgggcccagttcccacagcaagacccatggactcggggtccccggctgcagttgtccctcttggctctttgtttcctggctggctgtagagaggcccccagaagatggctggggggccctttctggcccagtaaccctctggtatctctgcctggtgcttcctctcattgcccaggtctcccctcttctccccagctgtgagggtctcctcacccacaccccagtgtgctctggtcagagctcatatgacagggccgagggggtcagagctgggttcggatggggggagtcaggcctcaagccaccttgggccctcgtgagcattatgtgtcccctgcaggtggagtacgtcatcaagtgcgacatgtctgcgctgcagcgagtgctctaccgccacatgcaggccaagggcgtgctgctgactgatggctccgagaaggacaagaaggtgggccccagagtcccccaactgcattccc

SEQ ID NO: 450944 - DNA, 847 bp, Homo sapiens
aacttagctagtacgaggctggtgttaatcggccgaggccttcccctggagccatgctgggccctagcccgggtccctcgccgggctccgcccacagcatgatggggcccagcccagggccgccctcagcaggacaccccatccccacccaggggcctggagggtaccctcaggacaacatgcaccagatgcacaagcccatggagtccatgcatgagaagggcatgtcggacgacccgcgctacaaccagatgaaaggaatggggatgcggtcagggggccatgctgggatggggcccccgcccagccccatggaccagcactcccaaggttacccctcgcccctgggtggctctgagcatgcctctagtccagttccagccagtggcccgtcttcggggccccagatgtcttccgggccaggaggtgccccgctggatggtgctgacccccaggccttggggcagcagaaccggggcccaaccccatttaaccagaaccagctgcaccagctcagagctcagatcatggcctacaagatgctggccagggggcagcccctccccgaccacctgcagatggcggtgcagggcaagcggccgatgcccgggatgcagcagcagatgccaacgctacctccaccctcggtgtccgcaacaggacccggccctggccctggccctggccccggcccgggtcccggcccggcacctccaaattacagcaggcctcatggtatgggagggccaaatgcctccccaggacctcgggcgtgccccggatgcaggcagctctggagggctccagcctgctgagaccagggatgttgtgcccgagcctcaagttc

SEQ ID NO: 450945 - DNA, 6393 bp, Homo sapiens
tccctaagtgctgggattacaggcatgagctaccgcgcccggctaatttttgtatttttaatagagacgggtttcaccatggtggtcaggctcgtttctaactcccgacctcaggtgatccggccgcctcggcctcccaaagtgctggattacaggcgtgagccaccaagtccggcctctcatactgcactattttgcttattaatcttgcttcttgtcctccttccccactagaccgagggctccacggcggctgggacacagtagcagatcaataaatatttgctaagctaattaatggcacttgggaagttttgcagagaaggcggccacggtcgggccccgccttgcctccccaaataggcctcgccgccccaggtcagggatcaaagcggttcccaggcgcgcccttggcccgcgggaaaccactgcccggtcttggtccaggcggcccgtcctacggtccagggttcctatttccgagcctcagggacctcctttccccacggaccccacggccaccgggatcccattctccagttgccccatcgtcaccgcggccgccgccaccgccgccgcagtggcgtccgctctgcgcatgctccggggcgtcaagacgcgaggcgtgcagaaggcgaagcgtgcgcaggcgcggggccatcgcggcccgagtggggcggtgcatcggacgcgcgtgcttcctccgggccacgcccacccccgtccgcccagggacgggcgcgcacgcgcgccgggagcggaagggcgggctggcgcgcgcacgaggccgggcaggcggcggaagctggagaggccgccgcggtgctgagggggaggggagccggcgagcgcgcgcgcagcgggggcgcgggtggcgcgcgtgtgtgtgaagggggggcggtggccgaggcgggcgggcgcgcgcgcgaggcttcccctcgtttggcggcggcggcggcttctttgtttcgtgaagagaagcgagacgcccattctgcccccggccccgcgcggaggggcgggggaggcgccgggaagtcgacggcgccggcggctcctgcaggaggccactgtctgcagctcccgtgaagatgtccactccagacccacccctgggcggaactcctcggccaggtccttccccgggccctggcccttcccctggagccatgctgggccctagcccgggtccctcgccgggctccgcccacagcatgatggggcccagcccagggccgccctcagcaggacaccccatccccacccaggggcctggagggtaccctcaggacaacatgcaccagatgcacaagcccatggagtccatgcatgagaagggcatgtcggacgacccgcgctacaaccagatgaaaggaatggggatgcggtcagggggccatgctgggatggggcccccgcccagccccatggaccagcactcccaaggttacccctcgcccctgggtggctctgagcatgcctctagtccagttccagccagtggcccgtcttcggggccccagatgtcttccgggccaggaggtgccccgctggatggtgctgacccccaggccttggggcagcagaaccggggcccaaccccatttaaccagaaccagctgcaccagctcagagctcagatcatggcctacaagatgctggccagggggcagcccctccccgaccacctgcagatggcggtgcagggcaagcggccgatgcccgggatgcagcagcagatgccaacgctacctccaccctcggtgtccgcaacaggacccggccctggccctggccctggccccggcccgggtcccggcccggcacctccaaattacagcaggcctcatggtatgggagggcccaacatgcctcccccaggaccctcgggcgtgccccccgggatgccaggccagcctcctggagggcctcccaagccctggcctgaaggacccatggcgaatgctgctgcccccacgagcacccctcagaagctgattcccccgcagccaacgggccgcccttcccccgcgccccctgccgtcccacccgccgcctcgcccgtgatgccaccgcagacccagtcccccgggcagccggcccagcccgcgcccatggtgccactgcaccagaagcagagccgcatcacccccatccagaagccgcggggcctcgaccctgtggagatcctgcaggagcgcgagtacaggctgcaggctcgcatcgcacaccgaattcaggaacttgaaaaccttcccgggtccctggccggggatttgcgaaccaaagcgaccattgagctcaaggccctcaggctgctgaacttccagaggcagctgcgccaggaggtggtggtgtgcatgcggagggacacagcgctggagacagccctcaatgctaaggcctacaagcgcagcaagcgccagtccctgcgcgaggcccgcatcactgagaagctggagaagcagcagaagatcgagcaggagcgcaagcgccggcagaagcaccaggaatacctcaatagcattctccagcatgccaaggatttcaaggaatatcacagatccgtcacaggcaaaatccagaagctgaccaaggcagtggccacgtaccatgccaacacggagcgggagcagaagaaagagaacgagcggatcgagaaggagcgcatgcggaggctcatggctgaagatgaggaggggtaccgcaagctcatcgaccagaagaaggacaagcgcctggcctacctcttgcagcagacagacgagtacgtggctaacctcacggagctggtgcggcagcacaaggctgcccaggtcgccaaggagaaaaagaagaaaaagaaaaagaagaaggcagaaaatgcagaaggacagacgcctgccattgggccggatggcgagcctctggacgagaccagccagatgagcgacctcccggtgaaggtgatccacgtggagagtgggaagatcctcacaggcacagatgcccccaaagccgggcagctggaggcctggctcgagatgaacccggggtatgaagtagctccgaggtctgatagtgaagaaagtggctcagaagaagaggaagaggaggaggaggaagagcagccgcaggcagcacagcctcccaccctgcccgtggaggagaagaagaagattccagatccagacagcgatgacgtctctgaggtggacgcgcggcacatcattgagaatgccaagcaagatgtcgatgatgaatatggcgtgtcccaggcccttgcacgtggcctgcagtcctactatgccgtggcccatgctgtcactgagagagtggacaagcagtcagcgcttatggtcaatggtgtcctcaaacagtaccagatcaaaggtttggagtggctggtgtccctgtacaacaacaacctgaacggcatcctggccgacgagatgggcctggggaagaccatccagaccatcgcgctcatcacgtacctcatggagcacaaacgcatcaatgggcccttcctcatcatcgtgcctctctcaacgctgtccaactgggcgtacgagtttgacaagtgggccccctccgtggtgaaggtgtcttacaagggatccccagcagcaagacgggcctttgtcccccagctccggagtgggaagttcaacgtcttgctgacgacgtacgagtacatcatcaaagacaagcacatcctcgccaagatccgttggaagtacatgattgtggacgaaggtcaccgcatgaagaaccaccactgcaagctgacgcaggtgctcaacacgcactatgtggcaccccgccgcctgctgctgacgggcacaccgctgcagaacaagcttcccgagctctgggcgctgctcaacttcctgctgcccaccatcttcaagagctgcagcaccttcgagcagtggtttaacgcaccctttgccatgaccggggaaaaggtggacctgaatgaggaggaaaccattctcatcatccggcgtctccacaaagtgctgcggcccttcttgctccgacgactcaagaaggaagtcgaggcccagttgcccgaaaaggtggagtacgtcatcaagtgcgacatgtctgcgctgcagcgagtgctctaccgccacatgcaggccaagggcgtgctgctgactgatggctccgagaaggacaagaagggcaaaggcggcaccaagaccctgatgaacaccatcatgcagctgcggaagatctgcaaccacccctacatgttccagcacatcgaggagtccttttccgagcacttggggttcactggcggcattgtccaagggctggacctgtaccgagcctcgggtaaatttgagcttcttgatagaattcttcccaaactccgagcaaccaaccacaaagtgctgctgttctgccaaatgacctccctcatgaccatcatggaagattactttgcgtatcgcggctttaaatacctcaggcttgatggaaccacgaaggcggaggaccggggcatgctgctgaaaaccttcaacgagcccggctctgagtacttcatcttcctgctcagcacccgggctggggggctcggcctgaacctccagtcggcagacactgtgatcatttttgacagcgactggaatcctcaccaggacctgcaagcgcaggaccgagcccaccgcatcgggcagcagaacgaggtgcgtgtgctccgcctctgcaccgtcaacagcgtggaggagaagatcctagctgcagccaagtacaagctcaacgtggaccagaaggtgatccaggccggcatgttcgaccagaagtcctccagccatgagcggcgcgccttcctgcaggccatcctggagcacgaggagcaggatgaggaggaagacgaggtgcccgacgacgagaccgtcaaccagatgatcgcccggcacgaggaggagtttgatctgttcatgcgcatggacctggaccgcaggcgcgaggaggcccgcaaccccaagcggaagccgcgcctcatggaggaggacgagctcccctcgtggatcatcaaggacgacgcggaggtggagcggctgacctgtgaggaggaggaggagaagatgttcggccgtggctcccgccaccgcaaggaggtggactacagcgactcactgacggagaagcagtggctcaaggccatcgaggagggcacgctggaggagatcgaagaggaggtccggcagaagaaatcatcacggaagcgcaagcgagacagcgacgccggctcctccaccccgaccaccagcacccgcagccgcgacaaggacgacgagagcaagaagcagaagaagcgcgggcggccgcctgccgagaaactctcccctaacccacccaacctcaccaagaagatgaagaagattgtggatgccgtgatcaagtacaaggacagcagcagtggacgtcagctcagcgaggtcttcatccagctgccctcgcgaaaggagctgcccgagtactacgagctcatccgcaagcccgtggacttcaagaagataaaggagcgcattcgcaaccacaagtaccgcagcctcaacgacctagagaaggacgtcatgctcctgtgccagaacgcacagaccttcaacctggagggctccctgatctatgaagactccatcgtcttgcagtcggtcttcaccagcgtgcggcagaaaatcgagaaggaggatgacagtgaaggcgaggagagtgaggaggaggaagagggcgaggaggaaggctccgaatccgaatctcggtccgtcaaagtgaagatcaagcttggccggaaggagaaggcacaggaccggctgaagggcggccggcggcggccgagccgagggtcccgagccaagccggtcgtgagtgacgatgacagtgaggaggaacaagaggaggaccgctcaggaagtggcagcgaagaagactgagccccgacattccagtctcgaccccgagcccctcgttccagagctgagatggcataggccttagcagtaacgggtagcagcagatgtagtttcagacttggagtaaaactgtataaacaaaagaatcttccatatttatacagcagagaagctgtaggactgtttgtgactggccctgtcctggcatcagtagcatctgtaacagcattaactgtcttaaagagagagagagagaattccgaattggggaacacacgatacctgtttttcttttccgttgctggcagtactgttgcgccgcagtttggagtcactgtagttaagtgtggatgcatgtgcgtcaccgtccactcctcctactgtattttattggacaggtcagactcgccgggggcccggcgagggtatgtcagtgtcactggatgtcaaacagtaataaattaaaccaacaacaaaa

SEQ ID NO: 450946 - DNA, 6469 bp, Homo sapiens
tccctaagtgctgggattacaggcatgagctaccgcgcccggctaatttttgtatttttaatagagacgggtttcaccatggtggtcaggctcgtttctaactcccgacctcaggtgatccggccgcctcggcctcccaaagtgctggattacaggcgtgagccaccaagtccggcctctcatactgcactattttgcttattaatcttgcttcttgtcctccttccccactagaccgagggctccacggcggctgggacacagtagcagatcaataaatatttgctaagctaattaatggcacttgggaagttttgcagagaaggcggccacggtcgggccccgccttgcctccccaaataggcctcgccgccccaggtcagggatcaaagcggttcccaggcgcgcccttggcccgcgggaaaccactgcccggtcttggtccaggcggcccgtcctacggtccagggttcctatttccgagcctcagggacctcctttccccacggaccccacggccaccgggatcccattctccagttgccccatcgtcaccgcggccgccgccaccgccgccgcagtggcgtccgctctgcgcatgctccggggcgtcaagacgcgaggcgtgcagaaggcgaagcgtgcgcaggcgcggggccatcgcggcccgagtggggcggtgcatcggacgcgcgtgcttcctccgggccacgcccacccccgtccgcccagggacgggcgcgcacgcgcgccgggagcggaagggcgggctggcgcgcgcacgaggccgggcaggcggcggaagctggagaggccgccgcggtgctgagggggaggggagccggcgagcgcgcgcgcagcgggggcgcgggtggcgcgcgtgtgtgtgaagggggggcggtggccgaggcgggcgggcgcgcgcgcgaggcttcccctcgtttggcggcggcggcggcttctttgtttcgtgaagagaagcgagacgcccattctgcccccggccccgcgcggaggggcgggggaggcgccgggaagtcgacggcgccggcggctcctgcgtctcgcccttttgcccaggctagagtgcagtggtgcggtcatggttcactgcagcctcaacctcctggactcagcaggaggccactgtctgcagctcccgtgaagatgtccactccagacccacccctgggcggaactcctcggccaggtccttccccgggccctggcccttcccctggagccatgctgggccctagcccgggtccctcgccgggctccgcccacagcatgatggggcccagcccagggccgccctcagcaggacaccccatccccacccaggggcctggagggtaccctcaggacaacatgcaccagatgcacaagcccatggagtccatgcatgagaagggcatgtcggacgacccgcgctacaaccagatgaaaggaatggggatgcggtcagggggccatgctgggatggggcccccgcccagccccatggaccagcactcccaaggttacccctcgcccctgggtggctctgagcatgcctctagtccagttccagccagtggcccgtcttcggggccccagatgtcttccgggccaggaggtgccccgctggatggtgctgacccccaggccttggggcagcagaaccggggcccaaccccatttaaccagaaccagctgcaccagctcagagctcagatcatggcctacaagatgctggccagggggcagcccctccccgaccacctgcagatggcggtgcagggcaagcggccgatgcccgggatgcagcagcagatgccaacgctacctccaccctcggtgtccgcaacaggacccggccctggccctggccctggccccggcccgggtcccggcccggcacctccaaattacagcaggcctcatggtatgggagggcccaacatgcctcccccaggaccctcgggcgtgccccccgggatgccaggccagcctcctggagggcctcccaagccctggcctgaaggacccatggcgaatgctgctgcccccacgagcacccctcagaagctgattcccccgcagccaacgggccgcccttcccccgcgccccctgccgtcccacccgccgcctcgcccgtgatgccaccgcagacccagtcccccgggcagccggcccagcccgcgcccatggtgccactgcaccagaagcagagccgcatcacccccatccagaagccgcggggcctcgaccctgtggagatcctgcaggagcgcgagtacaggctgcaggctcgcatcgcacaccgaattcaggaacttgaaaaccttcccgggtccctggccggggatttgcgaaccaaagcgaccattgagctcaaggccctcaggctgctgaacttccagaggcagctgcgccaggaggtggtggtgtgcatgcggagggacacagcgctggagacagccctcaatgctaaggcctacaagcgcagcaagcgccagtccctgcgcgaggcccgcatcactgagaagctggagaagcagcagaagatcgagcaggagcgcaagcgccggcagaagcaccaggaatacctcaatagcattctccagcatgccaaggatttcaaggaatatcacagatccgtcacaggcaaaatccagaagctgaccaaggcagtggccacgtaccatgccaacacggagcgggagcagaagaaagagaacgagcggatcgagaaggagcgcatgcggaggctcatggctgaagatgaggaggggtaccgcaagctcatcgaccagaagaaggacaagcgcctggcctacctcttgcagcagacagacgagtacgtggctaacctcacggagctggtgcggcagcacaaggctgcccaggtcgccaaggagaaaaagaagaaaaagaaaaagaagaaggcagaaaatgcagaaggacagacgcctgccattgggccggatggcgagcctctggacgagaccagccagatgagcgacctcccggtgaaggtgatccacgtggagagtgggaagatcctcacaggcacagatgcccccaaagccgggcagctggaggcctggctcgagatgaacccggggtatgaagtagctccgaggtctgatagtgaagaaagtggctcagaagaagaggaagaggaggaggaggaagagcagccgcaggcagcacagcctcccaccctgcccgtggaggagaagaagaagattccagatccagacagcgatgacgtctctgaggtggacgcgcggcacatcattgagaatgccaagcaagatgtcgatgatgaatatggcgtgtcccaggcccttgcacgtggcctgcagtcctactatgccgtggcccatgctgtcactgagagagtggacaagcagtcagcgcttatggtcaatggtgtcctcaaacagtaccagatcaaaggtttggagtggctggtgtccctgtacaacaacaacctgaacggcatcctggccgacgagatgggcctggggaagaccatccagaccatcgcgctcatcacgtacctcatggagcacaaacgcatcaatgggcccttcctcatcatcgtgcctctctcaacgctgtccaactgggcgtacgagtttgacaagtgggccccctccgtggtgaaggtgtcttacaagggatccccagcagcaagacgggcctttgtcccccagctccggagtgggaagttcaacgtcttgctgacgacgtacgagtacatcatcaaagacaagcacatcctcgccaagatccgttggaagtacatgattgtggacgaaggtcaccgcatgaagaaccaccactgcaagctgacgcaggtgctcaacacgcactatgtggcaccccgccgcctgctgctgacgggcacaccgctgcagaacaagcttcccgagctctgggcgctgctcaacttcctgctgcccaccatcttcaagagctgcagcaccttcgagcagtggtttaacgcaccctttgccatgaccggggaaaaggtggacctgaatgaggaggaaaccattctcatcatccggcgtctccacaaagtgctgcggcccttcttgctccgacgactcaagaaggaagtcgaggcccagttgcccgaaaaggtggagtacgtcatcaagtgcgacatgtctgcgctgcagcgagtgctctaccgccacatgcaggccaagggcgtgctgctgactgatggctccgagaaggacaagaagggcaaaggcggcaccaagaccctgatgaacaccatcatgcagctgcggaagatctgcaaccacccctacatgttccagcacatcgaggagtccttttccgagcacttggggttcactggcggcattgtccaagggctggacctgtaccgagcctcgggtaaatttgagcttcttgatagaattcttcccaaactccgagcaaccaaccacaaagtgctgctgttctgccaaatgacctccctcatgaccatcatggaagattactttgcgtatcgcggctttaaatacctcaggcttgatggaaccacgaaggcggaggaccggggcatgctgctgaaaaccttcaacgagcccggctctgagtacttcatcttcctgctcagcacccgggctggggggctcggcctgaacctccagtcggcagacactgtgatcatttttgacagcgactggaatcctcaccaggacctgcaagcgcaggaccgagcccaccgcatcgggcagcagaacgaggtgcgtgtgctccgcctctgcaccgtcaacagcgtggaggagaagatcctagctgcagccaagtacaagctcaacgtggaccagaaggtgatccaggccggcatgttcgaccagaagtcctccagccatgagcggcgcgccttcctgcaggccatcctggagcacgaggagcaggatgaggaggaagacgaggtgcccgacgacgagaccgtcaaccagatgatcgcccggcacgaggaggagtttgatctgttcatgcgcatggacctggaccgcaggcgcgaggaggcccgcaaccccaagcggaagccgcgcctcatggaggaggacgagctcccctcgtggatcatcaaggacgacgcggaggtggagcggctgacctgtgaggaggaggaggagaagatgttcggccgtggctcccgccaccgcaaggaggtggactacagcgactcactgacggagaagcagtggctcaaggccatcgaggagggcacgctggaggagatcgaagaggaggtccggcagaagaaatcatcacggaagcgcaagcgagacagcgacgccggctcctccaccccgaccaccagcacccgcagccgcgacaaggacgacgagagcaagaagcagaagaagcgcgggcggccgcctgccgagaaactctcccctaacccacccaacctcaccaagaagatgaagaagattgtggatgccgtgatcaagtacaaggacagcagcagtggacgtcagctcagcgaggtcttcatccagctgccctcgcgaaaggagctgcccgagtactacgagctcatccgcaagcccgtggacttcaagaagataaaggagcgcattcgcaaccacaagtaccgcagcctcaacgacctagagaaggacgtcatgctcctgtgccagaacgcacagaccttcaacctggagggctccctgatctatgaagactccatcgtcttgcagtcggtcttcaccagcgtgcggcagaaaatcgagaaggaggatgacagtgaaggcgaggagagtgaggaggaggaagagggcgaggaggaaggctccgaatccgaatctcggtccgtcaaagtgaagatcaagcttggccggaaggagaaggcacaggaccggctgaagggcggccggcggcggccgagccgagggtcccgagccaagccggtcgtgagtgacgatgacagtgaggaggaacaagaggaggaccgctcaggaagtggcagcgaagaagactgagccccgacattccagtctcgaccccgagcccctcgttccagagctgagatggcataggccttagcagtaacgggtagcagcagatgtagtttcagacttggagtaaaactgtataaacaaaagaatcttccatatttatacagcagagaagctgtaggactgtttgtgactggccctgtcctggcatcagtagcatctgtaacagcattaactgtcttaaagagagagagagagaattccgaattggggaacacacgatacctgtttttcttttccgttgctggcagtactgttgcgccgcagtttggagtcactgtagttaagtgtggatgcatgtgcgtcaccgtccactcctcctactgtattttattggacaggtcagactcgccgggggcccggcgagggtatgtcagtgtcactggatgtcaaacagtaataaattaaaccaacaacaaaa

SEQ ID NO: 450947 - DNA, 6489 bp, Homo sapiens
tccctaagtgctgggattacaggcatgagctaccgcgcccggctaatttttgtatttttaatagagacgggtttcaccatggtggtcaggctcgtttctaactcccgacctcaggtgatccggccgcctcggcctcccaaagtgctggattacaggcgtgagccaccaagtccggcctctcatactgcactattttgcttattaatcttgcttcttgtcctccttccccactagaccgagggctccacggcggctgggacacagtagcagatcaataaatatttgctaagctaattaatggcacttgggaagttttgcagagaaggcggccacggtcgggccccgccttgcctccccaaataggcctcgccgccccaggtcagggatcaaagcggttcccaggcgcgcccttggcccgcgggaaaccactgcccggtcttggtccaggcggcccgtcctacggtccagggttcctatttccgagcctcagggacctcctttccccacggaccccacggccaccgggatcccattctccagttgccccatcgtcaccgcggccgccgccaccgccgccgcagtggcgtccgctctgcgcatgctccggggcgtcaagacgcgaggcgtgcagaaggcgaagcgtgcgcaggcgcggggccatcgcggcccgagtggggcggtgcatcggacgcgcgtgcttcctccgggccacgcccacccccgtccgcccagggacgggcgcgcacgcgcgccgggagcggaagggcgggctggcgcgcgcacgaggccgggcaggcggcggaagctggagaggccgccgcggtgctgagggggaggggagccggcgagcgcgcgcgcagcgggggcgcgggtggcgcgcgtgtgtgtgaagggggggcggtggccgaggcgggcgggcgcgcgcgcgaggcttcccctcgtttggcggcggcggcggcttctttgtttcgtgaagagaagcgagacgcccattctgcccccggccccgcgcggaggggcgggggaggcgccgggaagtcgacggcgccggcggctcctgcaggaggccactgtctgcagctcccgtgaagatgtccactccagacccacccctgggcggaactcctcggccaggtccttccccgggccctggcccttcccctggagccatgctgggccctagcccgggtccctcgccgggctccgcccacagcatgatggggcccagcccagggccgccctcagcaggacaccccatccccacccaggggcctggagggtaccctcaggacaacatgcaccagatgcacaagcccatggagtccatgcatgagaagggcatgtcggacgacccgcgctacaaccagatgaaaggaatggggatgcggtcagggggccatgctgggatggggcccccgcccagccccatggaccagcactcccaaggttacccctcgcccctgggtggctctgagcatgcctctagtccagttccagccagtggcccgtcttcggggccccagatgtcttccgggccaggaggtgccccgctggatggtgctgacccccaggccttggggcagcagaaccggggcccaaccccatttaaccagaaccagctgcaccagctcagagctcagatcatggcctacaagatgctggccagggggcagcccctccccgaccacctgcagatggcggtgcagggcaagcggccgatgcccgggatgcagcagcagatgccaacgctacctccaccctcggtgtccgcaacaggacccggccctggccctggccctggccccggcccgggtcccggcccggcacctccaaattacagcaggcctcatggtatgggagggcccaacatgcctcccccaggaccctcgggcgtgccccccgggatgccaggccagcctcctggagggcctcccaagccctggcctgaaggacccatggcgaatgctgctgcccccacgagcacccctcagaagctgattcccccgcagccaacgggccgcccttcccccgcgccccctgccgtcccacccgccgcctcgcccgtgatgccaccgcagacccagtcccccgggcagccggcccagcccgcgcccatggtgccactgcaccagaagcagagccgcatcacccccatccagaagccgcggggcctcgaccctgtggagatcctgcaggagcgcgagtacaggctgcaggctcgcatcgcacaccgaattcaggaacttgaaaaccttcccgggtccctggccggggatttgcgaaccaaagcgaccattgagctcaaggccctcaggctgctgaacttccagaggcagctgcgccaggaggtggtggtgtgcatgcggagggacacagcgctggagacagccctcaatgctaaggcctacaagcgcagcaagcgccagtccctgcgcgaggcccgcatcactgagaagctggagaagcagcagaagatcgagcaggagcgcaagcgccggcagaagcaccaggaatacctcaatagcattctccagcatgccaaggatttcaaggaatatcacagatccgtcacaggcaaaatccagaagctgaccaaggcagtggccacgtaccatgccaacacggagcgggagcagaagaaagagaacgagcggatcgagaaggagcgcatgcggaggctcatggctgaagatgaggaggggtaccgcaagctcatcgaccagaagaaggacaagcgcctggcctacctcttgcagcagacagacgagtacgtggctaacctcacggagctggtgcggcagcacaaggctgcccaggtcgccaaggagaaaaagaagaaaaagaaaaagaagaaggcagaaaatgcagaaggacagacgcctgccattgggccggatggcgagcctctggacgagaccagccagatgagcgacctcccggtgaaggtgatccacgtggagagtgggaagatcctcacaggcacagatgcccccaaagccgggcagctggaggcctggctcgagatgaacccggggtatgaagtagctccgaggtctgatagtgaagaaagtggctcagaagaagaggaagaggaggaggaggaagagcagccgcaggcagcacagcctcccaccctgcccgtggaggagaagaagaagattccagatccagacagcgatgacgtctctgaggtggacgcgcggcacatcattgagaatgccaagcaagatgtcgatgatgaatatggcgtgtcccaggcccttgcacgtggcctgcagtcctactatgccgtggcccatgctgtcactgagagagtggacaagcagtcagcgcttatggtcaatggtgtcctcaaacagtaccagatcaaaggtttggagtggctggtgtccctgtacaacaacaacctgaacggcatcctggccgacgagatgggcctggggaagaccatccagaccatcgcgctcatcacgtacctcatggagcacaaacgcatcaatgggcccttcctcatcatcgtgcctctctcaacgctgtccaactgggcgtacgagtttgacaagtgggccccctccgtggtgaaggtgtcttacaagggatccccagcagcaagacgggcctttgtcccccagctccggagtgggaagttcaacgtcttgctgacgacgtacgagtacatcatcaaagacaagcacatcctcgccaagatccgttggaagtacatgattgtggacgaaggtcaccgcatgaagaaccaccactgcaagctgacgcaggtgctcaacacgcactatgtggcaccccgccgcctgctgctgacgggcacaccgctgcagaacaagcttcccgagctctgggcgctgctcaacttcctgctgcccaccatcttcaagagctgcagcaccttcgagcagtggtttaacgcaccctttgccatgaccggggaaaaggtggacctgaatgaggaggaaaccattctcatcatccggcgtctccacaaagtgctgcggcccttcttgctccgacgactcaagaaggaagtcgaggcccagttgcccgaaaaggtggagtacgtcatcaagtgcgacatgtctgcgctgcagcgagtgctctaccgccacatgcaggccaagggcgtgctgctgactgatggctccgagaaggacaagaagggcaaaggcggcaccaagaccctgatgaacaccatcatgcagctgcggaagatctgcaaccacccctacatgttccagcacatcgaggagtccttttccgagcacttggggttcactggcggcattgtccaagggctggacctgtaccgagcctcgggtaaatttgagcttcttgatagaattcttcccaaactccgagcaaccaaccacaaagtgctgctgttctgccaaatgacctccctcatgaccatcatggaagattactttgcgtatcgcggctttaaatacctcaggcttgatggaaccacgaaggcggaggaccggggcatgctgctgaaaaccttcaacgagcccggctctgagtacttcatcttcctgctcagcacccgggctggggggctcggcctgaacctccagtcggcagacactgtgatcatttttgacagcgactggaatcctcaccaggacctgcaagcgcaggaccgagcccaccgcatcgggcagcagaacgaggtgcgtgtgctccgcctctgcaccgtcaacagcgtggaggagaagatcctagctgcagccaagtacaagctcaacgtggaccagaaggtgatccaggccggcatgttcgaccagaagtcctccagccatgagcggcgcgccttcctgcaggccatcctggagcacgaggagcaggatgaggaggaagacgaggtgcccgacgacgagaccgtcaaccagatgatcgcccggcacgaggaggagtttgatctgttcatgcgcatggacctggaccgcaggcgcgaggaggcccgcaaccccaagcggaagccgcgcctcatggaggaggacgagctcccctcgtggatcatcaaggacgacgcggaggtggagcggctgacctgtgaggaggaggaggagaagatgttcggccgtggctcccgccaccgcaaggaggtggactacagcgactcactgacggagaagcagtggctcaagaaaattacaggaaaagatatccatgacacagccagcagtgtggcacgtgggctacaattccagcgtggccttcagttctgcacacgtgcgtcaaaggccatcgaggagggcacgctggaggagatcgaagaggaggtccggcagaagaaatcatcacggaagcgcaagcgagacagcgacgccggctcctccaccccgaccaccagcacccgcagccgcgacaaggacgacgagagcaagaagcagaagaagcgcgggcggccgcctgccgagaaactctcccctaacccacccaacctcaccaagaagatgaagaagattgtggatgccgtgatcaagtacaaggacagcagcagtggacgtcagctcagcgaggtcttcatccagctgccctcgcgaaaggagctgcccgagtactacgagctcatccgcaagcccgtggacttcaagaagataaaggagcgcattcgcaaccacaagtaccgcagcctcaacgacctagagaaggacgtcatgctcctgtgccagaacgcacagaccttcaacctggagggctccctgatctatgaagactccatcgtcttgcagtcggtcttcaccagcgtgcggcagaaaatcgagaaggaggatgacagtgaaggcgaggagagtgaggaggaggaagagggcgaggaggaaggctccgaatccgaatctcggtccgtcaaagtgaagatcaagcttggccggaaggagaaggcacaggaccggctgaagggcggccggcggcggccgagccgagggtcccgagccaagccggtcgtgagtgacgatgacagtgaggaggaacaagaggaggaccgctcaggaagtggcagcgaagaagactgagccccgacattccagtctcgaccccgagcccctcgttccagagctgagatggcataggccttagcagtaacgggtagcagcagatgtagtttcagacttggagtaaaactgtataaacaaaagaatcttccatatttatacagcagagaagctgtaggactgtttgtgactggccctgtcctggcatcagtagcatctgtaacagcattaactgtcttaaagagagagagagagaattccgaattggggaacacacgatacctgtttttcttttccgttgctggcagtactgttgcgccgcagtttggagtcactgtagttaagtgtggatgcatgtgcgtcaccgtccactcctcctactgtattttattggacaggtcagactcgccgggggcccggcgagggtatgtcagtgtcactggatgtcaaacagtaataaattaaaccaacaacaaaa

SEQ ID NO: 450948 - DNA, 6027 bp, Homo sapiens
tccctaagtgctgggattacaggcatgagctaccgcgcccggctaatttttgtatttttaatagagacgggtttcaccatggtggtcaggctcgtttctaactcccgacctcaggtgatccggccgcctcggcctcccaaagtgctggattacaggcgtgagccaccaagtccggcctctcatactgcactattttgcttattaatcttgcttcttgtcctccttccccactagaccgagggctccacggcggctgggacacagtagcagatcaataaatatttgctaagctaattaatggcacttgggaagttttgcagagaaggcggccacggtcgggccccgccttgcctccccaaataggcctcgccgccccaggtcagggatcaaagcggttcccaggcgcgcccttggcccgcgggaaaccactgcccggtcttggtccaggcggcccgtcctacggtccagggttcctatttccgagcctcagggacctcctttccccacggaccccacggccaccgggatcccattctccagttgccccatcgtcaccgcggccgccgccaccgccgccgcagtggcgtccgctctgcgcatgctccggggcgtcaagacgcgaggcgtgcagaaggcgaagcgtgcgcaggcgcggggccatcgcggcccgagtggggcggtgcatcggacgcgcgtgcttcctccgggccacgcccacccccgtccgcccagggacgggcgcgcacgcgcgccgggagcggaagggcgggctggcgcgcgcacgaggccgggcaggcggcggaagctggagaggccgccgcggtgctgagggggaggggagccggcgagcgcgcgcgcagcgggggcgcgggtggcgcgcgtgtgtgtgaagggggggcggtggccgaggcgggcgggcgcgcgcgcgaggcttcccctcgtttggcggcggcggcggcttctttgtttcgtgaagagaagcgagacgcccattctgcccccggccccgcgcggaggggcgggggaggcgccgggaagtcgacggcgccggcggctcctgcaggaggccactgtctgcagctcccgtgaagatgtccactccagacccacccctgggcggaactcctcggccaggtccttccccgggccctggcccttcccctggagccatgctgggccctagcccgggtccctcgccgggctccgcccacagcatgatggggcccagcccagggccgccctcagcaggacaccccatccccacccaggggcctggagggtaccctcaggacaacatgcaccagatgcacaagcccatggagtccatgcatgagaagggcatgtcggacgacccgcgctacaaccagatgaaaggaatggggatgcggtcagggggccatgctgggatggggcccccgcccagccccatggaccagcactcccaaggttacccctcgcccctgggtggctctgagcatgcctctagtccagttccagccagtggcccgtcttcggggccccagatgtcttccgggccaggaggtgccccgctggatggtgctgacccccaggccttggggcagcagaaccggggcccaaccccatttaaccagaaccagctgcaccagctcagagctcagatcatggcctacaagatgctggccagggggcagcccctccccgaccacctgcagatggcggtgcagggcaagcggccgatgcccgggatgcagcagcagatgccaacgctacctccaccctcggtgtccgcaacaggacccggccctggccctggccctggccccggcccgggtcccggcccggcacctccaaattacagcaggcctcatggtatgggagggcccaacatgcctcccccaggaccctcgggcgtgccccccgggatgccaggccagcctcctggagggcctcccaagccctggcctgaaggacccatggcgaatgctgctgcccccacgagcacccctcagaagctgattcccccgcagccaacgggccgcccttcccccgcgccccctgccgtcccacccgccgcctcgcccgtgatgccaccgcagacccagtcccccgggcagccggcccagcccgcgcccatggtgccactgcaccagaagcagagccgcatcacccccatccagaagccgcggggcctcgaccctgtggagatcctgcaggagcgcgagtacaggctgcaggctcgcatcgcacaccgaattcaggaacttgaaaaccttcccgggtccctggccggggatttgcgaaccaaagcgaccattgagctcaaggccctcaggctgctgaacttccagaggcagctgcgccaggaggtggtggtgtgcatgcggagggacacagcgctggagacagccctcaatgctaaggcctacaagcgcagcaagcgccagtccctgcgcgaggcccgcatcactgagaagctggagaagcagcagaagatcgagcaggagcgcaagcgccggcagaagcaccaggaatacctcaatagcattctccagcatgccaaggatttcaaggaatatcacagatccgtcacaggcaaaatccagaagctgaccaaggcagtggccacgtaccatgccaacacggagcgggagcagaagaaagagaacgagcggatcgagaaggagcgcatgcggaggctcatggctgaagatgaggaggggtaccgcaagctcatcgaccagaagaaggacaagcgcctggcctacctcttgcagcagacagacgagtacgtggctaacctcacggagctggtgcggcagcacaaggctgcccaggtcgccaaggagaaaaagaagaaaaagaaaaagaagaaggcagaaaatgcagaaggacagacgcctgccattgggccggatggcgagcctctggacgagaccagccagatgagcgacctcccggtgaaggtgatccacgtggagagtgggaagatcctcacaggcacagatgcccccaaagccgggcagctggaggcctggctcgagatgaacccggggtatgaagtagctccgaggtctgatagtgaagaaagtggctcagaagaagaggaagaggaggaggaggaagagcagccgcaggcagcacagcctcccaccctgcccgtggaggagaagaagaagattccagatccagacagcgatgacgtctctgaggtggacgcgcggcacatcattgagaatgccaagcaagatgtcgatgatgaatatggcgtgtcccaggcccttgcacgtggcctgcagtcctactatgccgtggcccatgctgtcactgagagagtggacaagcagtcagcgcttatggtcaatggtgtcctcaaacagtaccagatcaaaggtttggagtggctggtgtccctgtacaacaacaacctgaacggcatcctggccgacgagatgggcctggggaagaccatccagaccatcgcgctcatcacgtacctcatggagcacaaacgcatcaatgggcccttcctcatcatcgtgcctctctcaacgctgtccaactgggcgtacgagtttgacaagtgggccccctccgtggtgaaggtgtcttacaagggatccccagcagcaagacgggcctttgtcccccagctccggagtgggaagttcaacgtcttgctgacgacgtacgagtacatcatcaaagacaagcacatcctcgccaagatccgttggaagtacatgattgtggacgaaggtcaccgcatgaagaaccaccactgcaagctgacgcaggtgctcaacacgcactatgtggcaccccgccgcctgctgctgacgggcacaccgctgcagaacaagcttcccgagctctgggcgctgctcaacttcctgctgcccaccatcttcaagagctgcagcaccttcgagcagtggtttaacgcaccctttgccatgaccggggaaaaggtggacctgaatgaggaggaaaccattctcatcatccggcgtctccacaaagtgctgcggcccttcttgctccgacgactcaagaaggaagtcgaggcccagttgcccgaaaaggtggagtacgtcatcaagtgcgacatgtctgcgctgcagcgagtgctctaccgccacatgcaggccaagggcgtgctgctgactgatggctccgagaaggacaagaagggcaaaggcggcaccaagaccctgatgaacaccatcatgcagctgcggaagatctgcaaccacccctacatgttccagcacatcgaggagtccttttccgagcacttggggttcactggcggcattgtccaagggctggacctgtaccgagcctcgggtaaatttgagcttcttgatagaattcttcccaaactccgagcaaccaaccacaaagtgctgctgttctgccaaatgacctccctcatgaccatcatggaagattactttgcgtatcgcggctttaaatacctcaggcttgatggaaccacgaaggcggaggaccggggcatgctgctgaaaaccttcaacgagcccggctctgagtacttcatcttcctgctcagcacccgggctggggggctcggcctgaacctccagtcggcagacactgtgatcatttttgacagcgactggaatcctcaccaggacctgcaagcgcaggaccgagcccaccgcatcgggcagcagaacgaggtggagcggctgacctgtgaggaggaggaggagaagatgttcggccgtggctcccgccaccgcaaggaggtggactacagcgactcactgacggagaagcagtggctcaaggccatcgaggagggcacgctggaggagatcgaagaggaggtccggcagaagaaatcatcacggaagcgcaagcgagacagcgacgccggctcctccaccccgaccaccagcacccgcagccgcgacaaggacgacgagagcaagaagcagaagaagcgcgggcggccgcctgccgagaaactctcccctaacccacccaacctcaccaagaagatgaagaagattgtggatgccgtgatcaagtacaaggacagcagcagtggacgtcagctcagcgaggtcttcatccagctgccctcgcgaaaggagctgcccgagtactacgagctcatccgcaagcccgtggacttcaagaagataaaggagcgcattcgcaaccacaagtaccgcagcctcaacgacctagagaaggacgtcatgctcctgtgccagaacgcacagaccttcaacctggagggctccctgatctatgaagactccatcgtcttgcagtcggtcttcaccagcgtgcggcagaaaatcgagaaggaggatgacagtgaaggcgaggagagtgaggaggaggaagagggcgaggaggaaggctccgaatccgaatctcggtccgtcaaagtgaagatcaagcttggccggaaggagaaggcacaggaccggctgaagggcggccggcggcggccgagccgagggtcccgagccaagccggtcgtgagtgacgatgacagtgaggaggaacaagaggaggaccgctcaggaagtggcagcgaagaagactgagccccgacattccagtctcgaccccgagcccctcgttccagagctgagatggcataggccttagcagtaacgggtagcagcagatgtagtttcagacttggagtaaaactgtataaacaaaagaatcttccatatttatacagcagagaagctgtaggactgtttgtgactggccctgtcctggcatcagtagcatctgtaacagcattaactgtcttaaagagagagagagagaattccgaattggggaacacacgatacctgtttttcttttccgttgctggcagtactgttgcgccgcagtttggagtcactgtagttaagtgtggatgcatgtgcgtcaccgtccactcctcctactgtattttattggacaggtcagactcgccgggggcccggcgagggtatgtcagtgtcactggatgtcaaacagtaataaattaaaccaacaacaaaa

SEQ ID NO: 450949 - DNA, 5375 bp, Homo sapiens
tccctaagtgctgggattacaggcatgagctaccgcgcccggctaatttttgtatttttaatagagacgggtttcaccatggtggtcaggctcgtttctaactcccgacctcaggtgatccggccgcctcggcctcccaaagtgctggattacaggcgtgagccaccaagtccggcctctcatactgcactattttgcttattaatcttgcttcttgtcctccttccccactagaccgagggctccacggcggctgggacacagtagcagatcaataaatatttgctaagctaattaatggcacttgggaagttttgcagagaaggcggccacggtcgggccccgccttgcctccccaaataggcctcgccgccccaggtcagggatcaaagcggttcccaggcgcgcccttggcccgcgggaaaccactgcccggtcttggtccaggcggcccgtcctacggtccagggttcctatttccgagcctcagggacctcctttccccacggaccccacggccaccgggatcccattctccagttgccccatcgtcaccgcggccgccgccaccgccgccgcagtggcgtccgctctgcgcatgctccggggcgtcaagacgcgaggcgtgcagaaggcgaagcgtgcgcaggcgcggggccatcgcggcccgagtggggcggtgcatcggacgcgcgtgcttcctccgggccacgcccacccccgtccgcccagggacgggcgcgcacgcgcgccgggagcggaagggcgggctggcgcgcgcacgaggccgggcaggcggcggaagctggagaggccgccgcggtgctgagggggaggggagccggcgagcgcgcgcgcagcgggggcgcgggtggcgcgcgtgtgtgtgaagggggggcggtggccgaggcgggcgggcgcgcgcgcgaggcttcccctcgtttggcggcggcggcggcttctttgtttcgtgaagagaagcgagacgcccattctgcccccggccccgcgcggaggggcgggggaggcgccgggaagtcgacggcgccggcggctcctgcaggaggccactgtctgcagctcccgtgaagatgtccactccagacccacccctgggcggaactcctcggccaggtccttccccgggccctggcccttcccctggagccatgctgggccctagcccgggtccctcgccgggctccgcccacagcatgatggggcccagcccagggccgccctcagcaggacaccccatccccacccaggggcctggagggtaccctcaggacaacatgcaccagatgcacaagcccatggagtccatgcatgagaagggcatgtcggacgacccgcgctacaaccagatgaaaggaatggggatgcggtcagggggccatgctgggatggggcccccgcccagccccatggaccagcactcccaaggttacccctcgcccctgggtggctctgagcatgcctctagtccagttccagccagtggcccgtcttcggggccccagatgtcttccgggccaggaggtgccccgctggatggtgctgacccccaggccttggggcagcagaaccggggcccaaccccatttaaccagaaccaaagaaagagaacgagcggatcgagaaggagcgcatgcggaggctcatggctgaagatgaggaggggtaccgcaagctcatcgaccagaagaaggacaagcgcctggcctacctcttgcagcagacagacgagtacgtggctaacctcacggagctggtgcggcagcacaaggctgcccaggtcgccaaggagaaaaagaagaaaaagaaaaagaagaaggcagaaaatgcagaaggacagacgcctgccattgggccggatggcgagcctctggacgagaccagccagatgagcgacctcccggtgaaggtgatccacgtggagagtgggaagatcctcacaggcacagatgcccccaaagccgggcagctggaggcctggctcgagatgaacccggggtatgaagtagctccgaggtctgatagtgaagaaagtggctcagaagaagaggaagaggaggaggaggaagagcagccgcaggcagcacagcctcccaccctgcccgtggaggagaagaagaagattccagatccagacagcgatgacgtctctgaggtggacgcgcggcacatcattgagaatgccaagcaagatgtcgatgatgaatatggcgtgtcccaggcccttgcacgtggcctgcagtcctactatgccgtggcccatgctgtcactgagagagtggacaagcagtcagcgcttatggtcaatggtgtcctcaaacagtaccagatcaaaggtttggagtggctggtgtccctgtacaacaacaacctgaacggcatcctggccgacgagatgggcctggggaagaccatccagaccatcgcgctcatcacgtacctcatggagcacaaacgcatcaatgggcccttcctcatcatcgtgcctctctcaacgctgtccaactgggcgtacgagtttgacaagtgggccccctccgtggtgaaggtgtcttacaagggatccccagcagcaagacgggcctttgtcccccagctccggagtgggaagttcaacgtcttgctgacgacgtacgagtacatcatcaaagacaagcacatcctcgccaagatccgttggaagtacatgattgtggacgaaggtcaccgcatgaagaaccaccactgcaagctgacgcaggtgctcaacacgcactatgtggcaccccgccgcctgctgctgacgggcacaccgctgcagaacaagcttcccgagctctgggcgctgctcaacttcctgctgcccaccatcttcaagagctgcagcaccttcgagcagtggtttaacgcaccctttgccatgaccggggaaaaggtggacctgaatgaggaggaaaccattctcatcatccggcgtctccacaaagtgctgcggcccttcttgctccgacgactcaagaaggaagtcgaggcccagttgcccgaaaaggtggagtacgtcatcaagtgcgacatgtctgcgctgcagcgagtgctctaccgccacatgcaggccaagggcgtgctgctgactgatggctccgagaaggacaagaagggcaaaggcggcaccaagaccctgatgaacaccatcatgcagctgcggaagatctgcaaccacccctacatgttccagcacatcgaggagtccttttccgagcacttggggttcactggcggcattgtccaagggctggacctgtaccgagcctcgggtaaatttgagcttcttgatagaattcttcccaaactccgagcaaccaaccacaaagtgctgctgttctgccaaatgacctccctcatgaccatcatggaagattactttgcgtatcgcggctttaaatacctcaggcttgatggaaccacgaaggcggaggaccggggcatgctgctgaaaaccttcaacgagcccggctctgagtacttcatcttcctgctcagcacccgggctggggggctcggcctgaacctccagtcggcagacactgtgatcatttttgacagcgactggaatcctcaccaggacctgcaagcgcaggaccgagcccaccgcatcgggcagcagaacgaggtgcgtgtgctccgcctctgcaccgtcaacagcgtggaggagaagatcctagctgcagccaagtacaagctcaacgtggaccagaaggtgatccaggccggcatgttcgaccagaagtcctccagccatgagcggcgcgccttcctgcaggccatcctggagcacgaggagcaggatgaggaggaagacgaggtgcccgacgacgagaccgtcaaccagatgatcgcccggcacgaggaggagtttgatctgttcatgcgcatggacctggaccgcaggcgcgaggaggcccgcaaccccaagcggaagccgcgcctcatggaggaggacgagctcccctcgtggatcatcaaggacgacgcggaggtggagcggctgacctgtgaggaggaggaggagaagatgttcggccgtggctcccgccaccgcaaggaggtggactacagcgactcactgacggagaagcagtggctcaaggccatcgaggagggcacgctggaggagatcgaagaggaggtccggcagaagaaatcatcacggaagcgcaagcgagacagcgacgccggctcctccaccccgaccaccagcacccgcagccgcgacaaggacgacgagagcaagaagcagaagaagcgcgggcggccgcctgccgagaaactctcccctaacccacccaacctcaccaagaagatgaagaagattgtggatgccgtgatcaagtacaaggacagcagcagtggacgtcagctcagcgaggtcttcatccagctgccctcgcgaaaggagctgcccgagtactacgagctcatccgcaagcccgtggacttcaagaagataaaggagcgcattcgcaaccacaagtaccgcagcctcaacgacctagagaaggacgtcatgctcctgtgccagaacgcacagaccttcaacctggagggctccctgatctatgaagactccatcgtcttgcagtcggtcttcaccagcgtgcggcagaaaatcgagaaggaggatgacagtgaaggcgaggagagtgaggaggaggaagagggcgaggaggaaggctccgaatccgaatctcggtccgtcaaagtgaagatcaagcttggccggaaggagaaggcacaggaccggctgaagggcggccggcggcggccgagccgagggtcccgagccaagccggtcgtgagtgacgatgacagtgaggaggaacaagaggaggaccgctcaggaagtggcagcgaagaagactgagccccgacattccagtctcgaccccgagcccctcgttccagagctgagatggcataggccttagcagtaacgggtagcagcagatgtagtttcagacttggagtaaaactgtataaacaaaagaatcttccatatttatacagcagagaagctgtaggactgtttgtgactggccctgtcctggcatcagtagcatctgtaacagcattaactgtcttaaagagagagagagagaattccgaattggggaacacacgatacctgtttttcttttccgttgctggcagtactgttgcgccgcagtttggagtcactgtagttaagtgtggatgcatgtgcgtcaccgtccactcctcctactgtattttattggacaggtcagactcgccgggggcccggcgagggtatgtcagtgtcactggatgtcaaacagtaataaattaaaccaacaacaaaa

SEQ ID NO: 450950 - DNA, 3771 bp, Homo sapiens
gcggccgcctactactactactactgctcgaattcaagcttctaacgatgtacggggacatggctgaagatgaggaggggtaccgcaagctcatcgaccagaagaaggacaagcgcctggcctacctcttgcagcagacagacgagtacgtggctaacctcacggagctggtgcggcagcacaaggctgcccaggtcgccaaggagaaaaagaagaaaaagaaaaagaagaaggcagaaaatgcagaaggacagacgcctgccattgggccggatggcgagcctctggacgagaccagccagatgagcgacctcccggtgaaggtgatccacgtggagagtgggaagatcctcacaggcacagatgcccccaaagccgggcagctggaggcctggctcgagatgaacccggggtatgaagtagctccgaggtctgatagtgaagaaagtggctcagaagaagaggaagaggaggaggaggaagagcagccgcaggcagcacagcctcccaccctgcccgtggaggagaagaagaagattccagatccagacagcgatgacgtctctgaggtggacgcgcggcacatcattgagaatgccaagcaagatgtcgatgatgaatatggcgtgtcccaggcccttgcacgtggcctgcagtcctactatgccgtggcccatgctgtcactgagagagtggacaagcagtcagcgcttatggtcaatggtgtcctcaaacagtaccagatcaaaggtttggagtggctggtgtccctgtacaacaacaacctgaacggcatcctggccgacgagatgggcctggggaagaccatccagaccatcgcgctcatcacgtacctcatggagcacaaacgcatcaatgggcccttcctcatcatcgtgcctctctcaacgctgtccaactgggcgtacgagtttgacaagtgggccccctccgtggtgaaggtgtcttacaagggatccccagcagcaagacgggcctttgtcccccagctccggagtgggaagttcaacgtcttgctgacgacgtacgagtacatcatcaaagacaagcacatcctcgccaagatccgttggaagtacatgattgtggacgaaggtcaccgcatgaagaaccaccactgcaagctgacgcaggtgctcaacacgcactatgtggcaccccgccgcctgctgctgacgggcacaccgctgcagaacaagcttcccgagctctgggcgctgctcaacttcctgctgcccaccatcttcaagagctgcagcaccttcgagcagtggtttaacgcaccctttgccatgaccggggaaaaggtggacctgaatgaggaggaaaccattctcatcatccggcgtctccacaaagtgctgcggcccttcttgctccgacgactcaagaaggaagtcgaggcccagttgcccgaaaaggtggagtacgtcatcaagtgcgacatgtctgcgctgcagcgagtgctctaccgccacatgcaggccaagggcgtgctgctgactgatggctccgagaaggacaagaagggcaaaggcggcaccaagaccctgatgaacaccatcatgcagctgcggaagatctgcaaccacccctacatgttccagcacatcgaggagtccttttccgagcacttggggttcactggcggcattgtccaagggctggacctgtaccgagcctcgggtaaatttgagcttcttgatagaattcttcccaaactccgagcaaccaaccacaaagtgctgctgttctgccaaatgacctccctcatgaccatcatggaagattactttgcgtatcgcggctttaaatacctcaggcttgatggaaccacgaaggcggaggaccggggcatgctgctgaaaaccttcaacgagcccggctctgagtacttcatcttcctgctcagcacccgggctggggggctcggcctgaacctccagtcggcagacactgtgatcatttttgacagcgactggaatcctcaccaggacctgcaagcgcaggaccgagcccaccgcatcgggcagcagaacgaggtgcgtgtgctccgcctctgcaccgtcaacagcgtggaggagaagatcctagctgcagccaagtacaagctcaacgtggaccagaaggtgatccaggccggcatgttcgaccagaagtcctccagccatgagcggcgcgccttcctgcaggccatcctggagcacgaggagcaggatgaggaggaagacgaggtgcccgacgacgagaccgtcaaccagatgatcgcccggcacgaggaggagtttgatctgttcatgcgcatggacctggaccgcaggcgcgaggaggcccgcaaccccaagcggaagccgcgcctcatggaggaggacgagctcccctcgtggatcatcaaggacgacgcggaggtggagcggctgacctgtgaggaggaggaggagaagatgttcggccgtggctcccgccaccgcaaggaggtggactacagcgactcactgacggagaagcagtggctcaaggccatcgaggagggcacgctggaggagatcgaagaggaggtccggcagaagaaatcatcacggaagcgcaagcgagacagcgacgccggctcctccaccccgaccaccagcacccgcagccgcgacaaggacgacgagagcaagaagcagaagaagcgcgggcggccgcctgccgagaaactctcccctaacccacccaacctcaccaagaagatgaagaagattgtggatgccgtgatcaagtacaaggacagcagcagtggacgtcagctcagcgaggtcttcatccagctgccctcgcgaaaggagctgcccgagtactacgagctcatccgcaagcccgtggacttcaagaagataaaggagcgcattcgcaaccacaagtaccgcagcctcaacgacctagagaaggacgtcatgctcctgtgccagaacgcacagaccttcaacctggagggctccctgatctatgaagactccatcgtcttgcagtcggtcttcaccagcgtgcggcagaaaatcgagaaggaggatgacagtgaaggcgaggagagtgaggaggaggaagagggcgaggaggaaggctccgaatccgaatctcggtccgtcaaagtgaagatcaagcttggccggaaggagaaggcacaggaccggctgaagggcggccggcggcggccgagccgagggtcccgagccaagccggtcgtgagtgacgatgacagtgaggaggaacaagaggaggaccgctcaggaagtggcagcgaagaagactgagccccgacattccagtctcgaccccgagcccctcgttccagagctgagatggcataggccttagcagtaacgggtagcagcagatgtagtttcagacttggagtaaaactgtataaacaaaagaatcttccatatttatacagcagagaagctgtaggactgtttgtgactggccctgtcctggcatcagtagcatctgtaacagcattaactgtcttaaagagagagagagagaattccgaattggggaacacacgatacctgtttttcttttccgttgctggcagtactgttgcgccgcagtttggagtcactgtagttaagtgtggatgcatgtgcgtcaccgtccactcctcctactgtattttattggacaggtcagactcgccgggggcccggcgagggtatgtcagtgtcactggatgtcaaacagtaataaattaaaccaacaacaaaa

SEQ ID NO: 450951 - DNA, 3565 bp, Homo sapiens
gattcgccggtgttatagaggatccccatggcatgtcgtgaggataccattgaccataagcgctgactgcttgtccactctctcagtgacagcatgggccacggcatagtaggactgcaggccacgtgcatgagtgggaagatcctcacaggcacagatgcccccaaagccgggcagctggaggcctggctcgagatgaacccggggtatgaagtagctccgaggtctgatagtgaagaaagtggctcagaagaagaggaagaggaggaggaggaagagcagccgcaggcagcacagcctcccaccctgcccgtggaggagaagaagaagattccagatccagacagcgatgacgtctctgaggtggacgcgcggcacatcattgagaatgccaagcaagatgtcgatgatgaatatggcgtgtcccaggcccttgcacgtggcctgcagtcctactatgccgtggcccatgctgtcactgagagagtggacaagcagtcagcgcttatggtcaatggtgtcctcaaacagtaccagatcaaaggtttggagtggctggtgtccctgtacaacaacaacctgaacggcatcctggccgacgagatgggcctggggaagaccatccagaccatcgcgctcatcacgtacctcatggagcacaaacgcatcaatgggcccttcctcatcatcgtgcctctctcaacgctgtccaactgggcgtacgagtttgacaagtgggccccctccgtggtgaaggtgtcttacaagggatccccagcagcaagacgggcctttgtcccccagctccggagtgggaagttcaacgtcttgctgacgacgtacgagtacatcatcaaagacaagcacatcctcgccaagatccgttggaagtacatgattgtggacgaaggtcaccgcatgaagaaccaccactgcaagctgacgcaggtgctcaacacgcactatgtggcaccccgccgcctgctgctgacgggcacaccgctgcagaacaagcttcccgagctctgggcgctgctcaacttcctgctgcccaccatcttcaagagctgcagcaccttcgagcagtggtttaacgcaccctttgccatgaccggggaaaaggtggacctgaatgaggaggaaaccattctcatcatccggcgtctccacaaagtgctgcggcccttcttgctccgacgactcaagaaggaagtcgaggcccagttgcccgaaaaggtggagtacgtcatcaagtgcgacatgtctgcgctgcagcgagtgctctaccgccacatgcaggccaagggcgtgctgctgactgatggctccgagaaggacaagaagggcaaaggcggcaccaagaccctgatgaacaccatcatgcagctgcggaagatctgcaaccacccctacatgttccagcacatcgaggagtccttttccgagcacttggggttcactggcggcattgtccaagggctggacctgtaccgagcctcgggtaaatttgagcttcttgatagaattcttcccaaactccgagcaaccaaccacaaagtgctgctgttctgccaaatgacctccctcatgaccatcatggaagattactttgcgtatcgcggctttaaatacctcaggcttgatggaaccacgaaggcggaggaccggggcatgctgctgaaaaccttcaacgagcccggctctgagtacttcatcttcctgctcagcacccgggctggggggctcggcctgaacctccagtcggcagacactgtgatcatttttgacagcgactggaatcctcaccaggacctgcaagcgcaggaccgagcccaccgcatcgggcagcagaacgaggtgcgtgtgctccgcctctgcaccgtcaacagcgtggaggagaagatcctagctgcagccaagtacaagctcaacgtggaccagaaggtgatccaggccggcatgttcgaccagaagtcctccagccatgagcggcgcgccttcctgcaggccatcctggagcacgaggagcaggatgaggaggaagacgaggtgcccgacgacgagaccgtcaaccagatgatcgcccggcacgaggaggagtttgatctgttcatgcgcatggacctggaccgcaggcgcgaggaggcccgcaaccccaagcggaagccgcgcctcatggaggaggacgagctcccctcgtggatcatcaaggacgacgcggaggtggagcggctgacctgtgaggaggaggaggagaagatgttcggccgtggctcccgccaccgcaaggaggtggactacagcgactcactgacggagaagcagtggctcaaggccatcgaggagggcacgctggaggagatcgaagaggaggtccggcagaagaaatcatcacggaagcgcaagcgagacagcgacgccggctcctccaccccgaccaccagcacccgcagccgcgacaaggacgacgagagcaagaagcagaagaagcgcgggcggccgcctgccgagaaactctcccctaacccacccaacctcaccaagaagatgaagaagattgtggatgccgtgatcaagtacaaggacagcagcagtggacgtcagctcagcgaggtcttcatccagctgccctcgcgaaaggagctgcccgagtactacgagctcatccgcaagcccgtggacttcaagaagataaaggagcgcattcgcaaccacaagtaccgcagcctcaacgacctagagaaggacgtcatgctcctgtgccagaacgcacagaccttcaacctggagggctccctgatctatgaagactccatcgtcttgcagtcggtcttcaccagcgtgcggcagaaaatcgagaaggaggatgacagtgaaggcgaggagagtgaggaggaggaagagggcgaggaggaaggctccgaatccgaatctcggtccgtcaaagtgaagatcaagcttggccggaaggagaaggcacaggaccggctgaagggcggccggcggcggccgagccgagggtcccgagccaagccggtcgtgagtgacgatgacagtgaggaggaacaagaggaggaccgctcaggaagtggcagcgaagaagactgagccccgacattccagtctcgaccccgagcccctcgttccagagctgagatggcataggccttagcagtaacgggtagcagcagatgtagtttcagacttggagtaaaactgtataaacaaaagaatcttccatatttatacagcagagaagctgtaggactgtttgtgactggccctgtcctggcatcagtagcatctgtaacagcattaactgtcttaaagagagagagagagaattccgaattggggaacacacgatacctgtttttcttttccgttgctggcagtactgttgcgccgcagtttggagtcactgtagttaagtgtggatgcatgtgcgtcaccgtccactcctcctactgtattttattggacaggtcagactcgccgggggcccggcgagggtatgtcagtgtcactggatgtcaaacagtaataaattaaaccaacaacaaaa

SEQ ID NO: 450952 - DNA, 2949 bp, Homo sapiens
ttagatcttaggactacaggcgcatgcacatgcagctattattgtgtagagaggagatctagacatgttgcccaggctggtctcgaacgctgtccaactgggcgtacgagtttgacaagtgggccccctccgtggtgaaggtgtcttacaagggatccccagcagcaagacgggcctttgtcccccagctccggagtgggaagttcaacgtcttgctgacgacgtacgagtacatcatcaaagacaagcacatcctcgccaagatccgttggaagtacatgattgtggacgaaggtcaccgcatgaagaaccaccactgcaagctgacgcaggtgctcaacacgcactatgtggcaccccgccgcctgctgctgacgggcacaccgctgcagaacaagcttcccgagctctgggcgctgctcaacttcctgctgcccaccatcttcaagagctgcagcaccttcgagcagtggtttaacgcaccctttgccatgaccggggaaaaggtggacctgaatgaggaggaaaccattctcatcatccggcgtctccacaaagtgctgcggcccttcttgctccgacgactcaagaaggaagtcgaggcccagttgcccgaaaaggtggagtacgtcatcaagtgcgacatgtctgcgctgcagcgagtgctctaccgccacatgcaggccaagggcgtgctgctgactgatggctccgagaaggacaagaagggcaaaggcggcaccaagaccctgatgaacaccatcatgcagctgcggaagatctgcaaccacccctacatgttccagcacatcgaggagtccttttccgagcacttggggttcactggcggcattgtccaagggctggacctgtaccgagcctcgggtaaatttgagcttcttgatagaattcttcccaaactccgagcaaccaaccacaaagtgctgctgttctgccaaatgacctccctcatgaccatcatggaagattactttgcgtatcgcggctttaaatacctcaggcttgatggaaccacgaaggcggaggaccggggcatgctgctgaaaaccttcaacgagcccggctctgagtacttcatcttcctgctcagcacccgggctggggggctcggcctgaacctccagtcggcagacactgtgatcatttttgacagcgactggaatcctcaccaggacctgcaagcgcaggaccgagcccaccgcatcgggcagcagaacgaggtgcgtgtgctccgcctctgcaccgtcaacagcgtggaggagaagatcctagctgcagccaagtacaagctcaacgtggaccagaaggtgatccaggccggcatgttcgaccagaagtcctccagccatgagcggcgcgccttcctgcaggccatcctggagcacgaggagcaggatgaggaggaagacgaggtgcccgacgacgagaccgtcaaccagatgatcgcccggcacgaggaggagtttgatctgttcatgcgcatggacctggaccgcaggcgcgaggaggcccgcaaccccaagcggaagccgcgcctcatggaggaggacgagctcccctcgtggatcatcaaggacgacgcggaggtggagcggctgacctgtgaggaggaggaggagaagatgttcggccgtggctcccgccaccgcaaggaggtggactacagcgactcactgacggagaagcagtggctcaaggccatcgaggagggcacgctggaggagatcgaagaggaggtccggcagaagaaatcatcacggaagcgcaagcgagacagcgacgccggctcctccaccccgaccaccagcacccgcagccgcgacaaggacgacgagagcaagaagcagaagaagcgcgggcggccgcctgccgagaaactctcccctaacccacccaacctcaccaagaagatgaagaagattgtggatgccgtgatcaagtacaaggacagcagcagtggacgtcagctcagcgaggtcttcatccagctgccctcgcgaaaggagctgcccgagtactacgagctcatccgcaagcccgtggacttcaagaagataaaggagcgcattcgcaaccacaagtaccgcagcctcaacgacctagagaaggacgtcatgctcctgtgccagaacgcacagaccttcaacctggagggctccctgatctatgaagactccatcgtcttgcagtcggtcttcaccagcgtgcggcagaaaatcgagaaggaggatgacagtgaaggcgaggagagtgaggaggaggaagagggcgaggaggaaggctccgaatccgaatctcggtccgtcaaagtgaagatcaagcttggccggaaggagaaggcacaggaccggctgaagggcggccggcggcggccgagccgagggtcccgagccaagccggtcgtgagtgacgatgacagtgaggaggaacaagaggaggaccgctcaggaagtggcagcgaagaagactgagccccgacattccagtctcgaccccgagcccctcgttccagagctgagatggcataggccttagcagtaacgggtagcagcagatgtagtttcagacttggagtaaaactgtataaacaaaagaatcttccatatttatacagcagagaagctgtaggactgtttgtgactggccctgtcctggcatcagtagcatctgtaacagcattaactgtcttaaagagagagagagagaattccgaattggggaacacacgatacctgtttttcttttccgttgctggcagtactgttgcgccgcagtttggagtcactgtagttaagtgtggatgcatgtgcgtcaccgtccactcctcctactgtattttattggacaggtcagactcgccgggggcccggcgagggtatgtcagtgtcactggatgtcaaacagtaataaattaaaccaacaacaaaa

SEQ ID NO: 450953 - DNA, 5785 bp, Homo sapiens
tccctaagtgctgggattacaggcatgagctaccgcgcccggctaatttttgtatttttaatagagacgggtttcaccatggtggtcaggctcgtttctaactcccgacctcaggtgatccggccgcctcggcctcccaaagtgctggattacaggcgtgagccaccaagtccggcctctcatactgcactattttgcttattaatcttgcttcttgtcctccttccccactagaccgagggctccacggcggctgggacacagtagcagatcaataaatatttgctaagctaattaatggcacttgggaagttttgcagagaaggcggccacggtcgggccccgccttgcctccccaaataggcctcgccgccccaggtcagggatcaaagcggttcccaggcgcgcccttggcccgcgggaaaccactgcccggtcttggtccaggcggcccgtcctacggtccagggttcctatttccgagcctcagggacctcctttccccacggaccccacggccaccgggatcccattctccagttgccccatcgtcaccgcggccgccgccaccgccgccgcagtggcgtccgctctgcgcatgctccggggcgtcaagacgcgaggcgtgcagaaggcgaagcgtgcgcaggcgcggggccatcgcggcccgagtggggcggtgcatcggacgcgcgtgcttcctccgggccacgcccacccccgtccgcccagggacgggcgcgcacgcgcgccgggagcggaagggcgggctggcgcgcgcacgaggccgggcaggcggcggaagctggagaggccgccgcggtgctgagggggaggggagccggcgagcgcgcgcgcagcgggggcgcgggtggcgcgcgtgtgtgtgaagggggggcggtggccgaggcgggcgggcgcgcgcgcgaggcttcccctcgtttggcggcggcggcggcttctttgtttcgtgaagagaagcgagacgcccattctgcccccggccccgcgcggaggggcgggggaggcgccgggaagtcgacggcgccggcggctcctgcaggaggccactgtctgcagctcccgtgaagatgtccactccagacccacccctgggcggaactcctcggccaggtccttccccgggccctggcccttcccctggagccatgctgggccctagcccgggtccctcgccgggctccgcccacagcatgatggggcccagcccagggccgccctcagcaggacaccccatccccacccaggggcctggagggtaccctcaggacaacatgcaccagatgcacaagcccatggagtccatgcatgagaagggcatgtcggacgacccgcgctacaaccagatgaaaggaatggggatgcggtcagggggccatgctgggatggggcccccgcccagccccatggaccagcactcccaaggttacccctcgcccctgggtggctctgagcatgcctctagtccagttccagccagtggcccgtcttcggggccccagatgtcttccgggccaggaggtgccccgctggatggtgctgacccccaggccttggggcagcagaaccggggcccaaccccatttaaccagaaccagctgcaccagctcagagctcagatcatggcctacaagatgctggccagggggcagcccctccccgaccacctgcagatggcggtgcagggcaagcggccgatgcccgggatgcagcagcagatgccaacgctacctccaccctcggtgtccgcaacaggacccggccctggccctggccctggccccggcccgggtcccggcccggcacctccaaattacagcaggcctcatggtatgggagggcccaacatgcctcccccaggaccctcgggcgtgccccccgggatgccaggccagcctcctggagggcctcccaagccctggcctgaaggacccatggcgaatgctgctgcccccacgagcacccctcagaagctgattcccccgcagccaacgggccgcccttcccccgcgccccctgccgtcccacccgccgcctcgcccgtgatgccaccgcagacccagtcccccgggcagccggcccagcccgcgcccatggtgccactgcaccagaagcagagccgcatcacccccatccagaagccgcggggcctcgaccctgtggagatcctgcaggagcgcgagtacaggctgcaggctcgcatcgcacaccgaattcaggaacttgaaaaccttcccgggtccctggccggggatttgcgaaccaaagcgaccattgagctcaaggccctcaggctgctgaacttccagaggcagctgcgccaggaggtggtggtgtgcatgcggagggacacagcgctggagacagccctcaatgctaaggcctacaagcgcagcaagcgccagtccctgcgcgaggcccgcatcactgagaagctggagaagcagcagaagatcgagcaggagcgcaagcgccggcagaagcaccaggaatacctcaatagcattctccagcatgccaaggatttcaaggaatatcacagatccgtcacaggcaaaatccagaagctgaccaaggcagtggccacgtaccatgccaacacggagcgggagcagaagaaagagaacgagcggatcgagaaggagcgcatgcggaggctcatggctgaagatgaggaggggtaccgcaagctcatcgaccagaagaaggacaagcgcctggcctacctcttgcagcagacagacgagtacgtggctaacctcacggagctggtgcggcagcacaaggctgcccaggtcgccaaggagaaaaagaagaaaaagaaaaagaagaaggcagaaaatgcagaaggacagacgcctgccattgggccggatggcgagcctctggacgagaccagccagatgagcgacctcccggtgaaggtgatccacgtggagagtgggaagatcctcacaggcacagatgcccccaaagccgggcagctggaggcctggctcgagatgaacccggggtatgaagtagctccgaggtctgatagtgaagaaagtggctcagaagaagaggaagaggaggaggaggaagagcagccgcaggcagcacagcctcccaccctgcccgtggaggagaagaagaagattccagatccagacagcgatgacgtctctgaggtggacgcgcggcacatcattgagaatgccaagcaagatgtcgatgatgaatatggcgtgtcccaggcccttgcacgtggcctgcagtcctactatgccgtggcccatgctgtcactgagagagtggacaagcagtcagcgcttatggtcaatggtgtcctcaaacagtaccagatcaaaggtttggagtggctggtgtccctgtacaacaacaacctgaacggcatcctggccgacgagatgggcctggggaagaccatccagaccatcgcgctcatcacgtacctcatggagcacaaacgcatcaatgggcccttcctcatcatcgtgcctctctcaacgctgtccaactgggcgtacgagtttgacaagtgggccccctccgtggtgaaggtgtcttacaagggatccccagcagcaagacgggcctttgtcccccagctccggagtgggaagttcaacgtcttgctgacgacgtacgagtacatcatcaaagacaagcacatcctcgccaagatccgttggaagtacatgattgtggacgaaggtcaccgcatgaagaaccaccactgcaagctgacgcaggtgctcaacacgcactatgtggcaccccgccgcctgctgctgacgggcacaccgctgcagaacaagcttcccgagctctgggcgctgctcaacttcctgctgcccaccatcttcaagagctgcagcaccttcgagcagtggtttaacgcaccctttgccatgaccggggaaaaggtggacctgaatgaggaggaaaccattctcatcatccggcgtctccacaaagtgctgcggcccttcttgctccgacgactcaagaaggaagtcgaggcccagttgcccgaaaaggtggagtacgtcatcaagtgcgacatgtctgcgctgcagcgagtgctctaccgccacatgcaggccaagggcgtgctgctgactgatggctccgagaaggacaagaagggcaaaggcggcaccaagaccctgatgaacaccatcatgcagctgcggaagatctgcaaccacccctacatgttccagcacatcgaggagtccttttccgagcacttggggttcactggcggcattgtccaagggctggacctgtaccgagcctcgggtaaatttgagcttcttgatagaattcttcccaaactccgagcaaccaaccacaaagtgctgctgttctgccaaatgacctccctcatgaccatcatggaagattactttgcgtatcgcggctttaaatacctcaggcttgatggaaccacgaaggcggaggaccggggcatgctgctgaaaaccttcaacgagcccggctctgagtacttcatcttcctgctcagcacccgggctggggggctcggcctgaacctccagtcggcagacactgtgatcatttttgacagcgactggaatcctcaccaggacctgcaagcgcaggaccgagcccaccgcatcgggcagcagaacgaggtgcgtgtgctccgcctctgcaccgtcaacagcgtggaggagaagatcctagctgcagccaagtacaagctcaacgtggaccagaaggtgatccaggccggcatgttcgaccagaagtcctccagccatgagcggcgcgccttcctgcaggccatcctggagcacgaggagcaggatgaggaggaagacgaggtgcccgacgacgagaccgtcaaccagatgatcgcccggcacgaggaggagtttgatctgttcatgcgcatggacctggaccgcaggcgcgaggaggcccgcaaccccaagcggaagccgcgcctcatggaggaggacgagctcccctcgtggatcatcaaggacgacgcggaggtggagcggctgacctgtgaggaggaggaggagaagatgttcggccgtggctcccgccaccgcaaggaggtggactacagcgactcactgacggagaagcagtggctcaagaaaattacaggaaaagatatccatgacacagccagcagtgtggcacgtgggctacaattccagcgtggccttcagttctgcacacgtgcgtcaaaggtggggagagttctgttggtggtggcgctgagggctgcacaacactgggacgtgccttatgcccctgaactgtgtactaaaacatggctgctttggtaaattttatgttatatatgatttataatatatttttttaaatgcccagctactcaggaggctaagatgggaagatcacttgagcccaggagttaaagtccaaccagggcaatgtagcaagaccacatgtctaagaaaatttaaaaatcggctgggcgcggtggctcacgcctgtaatcccagcactttgagaggccgacatgggtggatcacgaggttaagagattaagaccatcctggccaacatggtaaaaccctgtctctactaaaaataccaaaattagctggacgtggtggtgggcgcctgtagtcccagctactcaggagggtgagggaggagaatcgcttgaaccaggaaggtggaggttgcagtgagctgagattgcaccactgcactccagcctggtgacagagcgagactgcgtctcaac

SEQ ID NO: 450954 - DNA, 2255 bp, Homo sapiens
  misc_feature (71)..(71): n is a, c, g, or t
gccctacatgttccagcacatcgaggagtggttgcagatcttccgcagctgcatgatggtgttcatcaggntcttggtgcggaagatctgcaaccacccctacatgttccagcacatcgaggagtccttttccgagcacttggggttcactggcggcattgtccaagggctggacctgtaccgagcctcgggtaaatttgagcttcttgatagaattcttcccaaactccgagcaaccaaccacaaagtgctgctgttctgccaaatgacctccctcatgaccatcatggaagattactttgcgtatcgcggctttaaatacctcaggcttgatggaaccacgaaggcggaggaccggggcatgctgctgaaaaccttcaacgagcccggctctgagtacttcatcttcctgctcagcacccgggctggggggctcggcctgaacctccagtcggcagacactgtgatcatttttgacagcgactggaatcctcaccaggacctgcaagcgcaggaccgagcccaccgcatcgggcagcagaacgaggtgcgtgtgctccgcctctgcaccgtcaacagcgtggaggagaagatcctagctgcagccaagtacaagctcaacgtggaccagaaggtgatccaggccggcatgttcgaccagaagtcctccagccatgagcggcgcgccttcctgcaggccatcctggagcacgaggagcaggatgaggaggaagacgaggtgcccgacgacgagaccgtcaaccagatgatcgcccggcacgaggaggagtttgatctgttcatgcgcatggacctggaccgcaggcgcgaggaggcccgcaaccccaagcggaagccgcgcctcatggaggaggacgagctcccctcgtggatcatcaaggacgacgcggaggtggagcggctgacctgtgaggaggaggaggagaagatgttcggccgtggctcccgccaccgcaaggaggtggactacagcgactcactgacggagaagcagtggctcaaggccatcgaggagggcacgctggaggagatcgaagaggaggtccggcagaagaaatcatcacggaagcgcaagcgagacagcgacgccggctcctccaccccgaccaccagcacccgcagccgcgacaaggacgacgagagcaagaagcagaagaagcgcgggcggccgcctgccgagaaactctcccctaacccacccaacctcaccaagaagatgaagaagattgtggatgccgtgatcaagtacaaggacagcagcagtggacgtcagctcagcgaggtcttcatccagctgccctcgcgaaaggagctgcccgagtactacgagctcatccgcaagcccgtggacttcaagaagataaaggagcgcattcgcaaccacaagtaccgcagcctcaacgacctagagaaggacgtcatgctcctgtgccagaacgcacagaccttcaacctggagggctccctgatctatgaagactccatcgtcttgcagtcggtcttcaccagcgtgcggcagaaaatcgagaaggaggatgacagtgaaggcgaggagagtgaggaggaggaagagggcgaggaggaaggctccgaatccgaatctcggtccgtcaaagtgaagatcaagcttggccggaaggagaaggcacaggaccggctgaagggcggccggcggcggccgagccgagggtcccgagccaagccggtcgtgagtgacgatgacagtgaggaggaacaagaggaggaccgctcaggaagtggcagcgaagaagactgagccccgacattccagtctcgaccccgagcccctcgttccagagctgagatggcataggccttagcagtaacgggtagcagcagatgtagtttcagacttggagtaaaactgtataaacaaaagaatcttccatatttatacagcagagaagctgtaggactgtttgtgactggccctgtcctggcatcagtagcatctgtaacagcattaactgtcttaaagagagagagagagaattccgaattggggaacacacgatacctgtttttcttttccgttgctggcagtactgttgcgccgcagtttggagtcactgtagttaagtgtggatgcatgtgcgtcaccgtccactcctcctactgtattttattggacaggtcagactcgccgggggcccggcgagggtatgtcagtgtcactggatgtcaaacagtaataaattaaaccaacaacaaaa

SEQ ID NO: 450955 - DNA, 5153 bp, Homo sapiens
  misc_feature (5106)..(5106): n is a, c, g, or t
  misc_feature (5135)..(5135): n is a, c, g, or t
  misc_feature (5150)..(5150): n is a, c, g, or t
tccctaagtgctgggattacaggcatgagctaccgcgcccggctaatttttgtatttttaatagagacgggtttcaccatggtggtcaggctcgtttctaactcccgacctcaggtgatccggccgcctcggcctcccaaagtgctggattacaggcgtgagccaccaagtccggcctctcatactgcactattttgcttattaatcttgcttcttgtcctccttccccactagaccgagggctccacggcggctgggacacagtagcagatcaataaatatttgctaagctaattaatggcacttgggaagttttgcagagaaggcggccacggtcgggccccgccttgcctccccaaataggcctcgccgccccaggtcagggatcaaagcggttcccaggcgcgcccttggcccgcgggaaaccactgcccggtcttggtccaggcggcccgtcctacggtccagggttcctatttccgagcctcagggacctcctttccccacggaccccacggccaccgggatcccattctccagttgccccatcgtcaccgcggccgccgccaccgccgccgcagtggcgtccgctctgcgcatgctccggggcgtcaagacgcgaggcgtgcagaaggcgaagcgtgcgcaggcgcggggccatcgcggcccgagtggggcggtgcatcggacgcgcgtgcttcctccgggccacgcccacccccgtccgcccagggacgggcgcgcacgcgcgccgggagcggaagggcgggctggcgcgcgcacgaggccgggcaggcggcggaagctggagaggccgccgcggtgctgagggggaggggagccggcgagcgcgcgcgcagcgggggcgcgggtggcgcgcgtgtgtgtgaagggggggcggtggccgaggcgggcgggcgcgcgcgcgaggcttcccctcgtttggcggcggcggcggcttctttgtttcgtgaagagaagcgagacgcccattctgcccccggccccgcgcggaggggcgggggaggcgccgggaagtcgacggcgccggcggctcctgcaggaggccactgtctgcagctcccgtgaagatgtccactccagacccacccctgggcggaactcctcggccaggtccttccccgggccctggcccttcccctggagccatgctgggccctagcccgggtccctcgccgggctccgcccacagcatgatggggcccagcccagggccgccctcagcaggacaccccatccccacccaggggcctggagggtaccctcaggacaacatgcaccagatgcacaagcccatggagtccatgcatgagaagggcatgtcggacgacccgcgctacaaccagatgaaaggaatggggatgcggtcagggggccatgctgggatggggcccccgcccagccccatggaccagcactcccaaggttacccctcgcccctgggtggctctgagcatgcctctagtccagttccagccagtggcccgtcttcggggccccagatgtcttccgggccaggaggtgccccgctggatggtgctgacccccaggccttggggcagcagaaccggggcccaaccccatttaaccagaaccagctgcaccagctcagagctcagatcatggcctacaagatgctggccagggggcagcccctccccgaccacctgcagatggcggtgcagggcaagcggccgatgcccgggatgcagcagcagatgccaacgctacctccaccctcggtgtccgcaacaggacccggccctggccctggccctggccccggcccgggtcccggcccggcacctccaaattacagcaggcctcatggtatgggagggcccaacatgcctcccccaggaccctcgggcgtgccccccgggatgccaggccagcctcctggagggcctcccaagccctggcctgaaggacccatggcgaatgctgctgcccccacgagcacccctcagaagctgattcccccgcagccaacgggccgcccttcccccgcgccccctgccgtcccacccgccgcctcgcccgtgatgccaccgcagacccagtcccccgggcagccggcccagcccgcgcccatggtgccactgcaccagaagcagagccgcatcacccccatccagaagccgcggggcctcgaccctgtggagatcctgcaggagcgcgagtacaggctgcaggctcgcatcgcacaccgaattcaggaacttgaaaaccttcccgggtccctggccggggatttgcgaaccaaagcgaccattgagctcaaggccctcaggctgctgaacttccagaggcagctgcgccaggaggtggtggtgtgcatgcggagggacacagcgctggagacagccctcaatgctaaggcctacaagcgcagcaagcgccagtccctgcgcgaggcccgcatcactgagaagctggagaagcagcagaagatcgagcaggagcgcaagcgccggcagaagcaccaggaatacctcaatagcattctccagcatgccaaggatttcaaggaatatcacagatccgtcacaggcaaaatccagaagctgaccaaggcagtggccacgtaccatgccaacacggagcgggagcagaagaaagagaacgagcggatcgagaaggagcgcatgcggaggctcatggctgaagatgaggaggggtaccgcaagctcatcgaccagaagaaggacaagcgcctggcctacctcttgcagcagacagacgagtacgtggctaacctcacggagctggtgcggcagcacaaggctgcccaggtcgccaaggagaaaaagaagaaaaagaaaaagaagaaggcagaaaatgcagaaggacagacgcctgccattgggccggatggcgagcctctggacgagaccagccagatgagcgacctcccggtgaaggtgatccacgtggagagtgggaagatcctcacaggcacagatgcccccaaagccgggcagctggaggcctggctcgagatgaacccggggtatgaagtagctccgaggtctgatagtgaagaaagtggctcagaagaagaggaagaggaggaggaggaagagcagccgcaggcagcacagcctcccaccctgcccgtggaggagaagaagaagattccagatccagacagcgatgacgtctctgaggtggacgcgcggcacatcattgagaatgccaagcaagatgtcgatgatgaatatggcgtgtcccaggcccttgcacgtggcctgcagtcctactatgccgtggcccatgctgtcactgagagagtggacaagcagtcagcgcttatggtcaatggtgtcctcaaacagtaccagatcaaaggtttggagtggctggtgtccctgtacaacaacaacctgaacggcatcctggccgacgagatgggcctggggaagaccatccagaccatcgcgctcatcacgtacctcatggagcacaaacgcatcaatgggcccttcctcatcatcgtgcctctctcaacgctgtccaactgggcgtacgagtttgacaagtgggccccctccgtggtgaaggtgtcttacaagggatccccagcagcaagacgggcctttgtcccccagctccggagtgggaagttcaacgtcttgctgacgacgtacgagtacatcatcaaagacaagcacatcctcgccaagatccgttggaagtacatgattgtggacgaaggtcaccgcatgaagaaccaccactgcaagctgacgcaggtgctcaacacgcactatgtggcaccccgccgcctgctgctgacgggcacaccgctgcagaacaagcttcccgagctctgggcgctgctcaacttcctgctgcccaccatcttcaagagctgcagcaccttcgagcagtggtttaacgcaccctttgccatgaccggggaaaaggtggacctgaatgaggaggaaaccattctcatcatccggcgtctccacaaagtgctgcggcccttcttgctccgacgactcaagaaggaagtcgaggcccagttgcccgaaaaggtggagtacgtcatcaagtgcgacatgtctgcgctgcagcgagtgctctaccgccacatgcaggccaagggcgtgctgctgactgatggctccgagaaggacaagaagggcaaaggcggcaccaagaccctgatgaacaccatcatgcagctgcggaagatctgcaaccacccctacatgttccagcacatcgaggagtccttttccgagcacttggggttcactggcggcattgtccaagggctggacctgtaccgagcctcgggtaaatttgagcttcttgatagaattcttcccaaactccgagcaaccaaccacaaagtgctgctgttctgccaaatgacctccctcatgaccatcatggaagattactttgcgtatcgcggctttaaatacctcaggcttgatggaaccacgaaggcggaggaccggggcatgctgctgaaaaccttcaacgagcccggctctgagtacttcatcttcctgctcagcacccgggctggggggctcggcctgaacctccagtcggcagacactgtgatcatttttgacagcgactggaatcctcaccaggacctgcaagcgcaggaccgagcccaccgcatcgggcagcagaacgaggtgcgtgtgctccgcctctgcaccgtcaacagcgtggaggagaagatcctagctgcagccaagtacaagctcaacgtggaccagaaggtgatccaggccggcatgttcgaccagaagtcctccagccatgagcggcgcgccttcctgcaggccatcctggagcacgaggagcaggatgagagcagacactgcagcacgggcagcggcagtgccagcttcgcccacactgcccctccgccagcgggcgtcaaccccgacttggaggagccacctctaaaggaggaagacgaggtgcccgacgacgagaccgtcaaccagatgatcgcccggcacgaggaggagtttgatctgttcatgcgcatgactggacgcagccgagagccgcacccacgaacccctctgaaagacactccctgtctcngaaccgagtgacgtacttagagagagaanttcgctgtccccccngat

SEQ ID NO: 450956 - DNA, 4914 bp, Homo sapiens
tccctaagtgctgggattacaggcatgagctaccgcgcccggctaatttttgtatttttaatagagacgggtttcaccatggtggtcaggctcgtttctaactcccgacctcaggtgatccggccgcctcggcctcccaaagtgctggattacaggcgtgagccaccaagtccggcctctcatactgcactattttgcttattaatcttgcttcttgtcctccttccccactagaccgagggctccacggcggctgggacacagtagcagatcaataaatatttgctaagctaattaatggcacttgggaagttttgcagagaaggcggccacggtcgggccccgccttgcctccccaaataggcctcgccgccccaggtcagggatcaaagcggttcccaggcgcgcccttggcccgcgggaaaccactgcccggtcttggtccaggcggcccgtcctacggtccagggttcctatttccgagcctcagggacctcctttccccacggaccccacggccaccgggatcccattctccagttgccccatcgtcaccgcggccgccgccaccgccgccgcagtggcgtccgctctgcgcatgctccggggcgtcaagacgcgaggcgtgcagaaggcgaagcgtgcgcaggcgcggggccatcgcggcccgagtggggcggtgcatcggacgcgcgtgcttcctccgggccacgcccacccccgtccgcccagggacgggcgcgcacgcgcgccgggagcggaagggcgggctggcgcgcgcacgaggccgggcaggcggcggaagctggagaggccgccgcggtgctgagggggaggggagccggcgagcgcgcgcgcagcgggggcgcgggtggcgcgcgtgtgtgtgaagggggggcggtggccgaggcgggcgggcgcgcgcgcgaggcttcccctcgtttggcggcggcggcggcttctttgtttcgtgaagagaagcgagacgcccattctgcccccggccccgcgcggaggggcgggggaggcgccgggaagtcgacggcgccggcggctcctgcaggaggccactgtctgcagctcccgtgaagatgtccactccagacccacccctgggcggaactcctcggccaggtccttccccgggccctggcccttcccctggagccatgctgggccctagcccgggtccctcgccgggctccgcccacagcatgatggggcccagcccagggccgccctcagcaggacaccccatccccacccaggggcctggagggtaccctcaggacaacatgcaccagatgcacaagcccatggagtccatgcatgagaagggcatgtcggacgacccgcgctacaaccagatgaaaggaatggggatgcggtcagggggccatgctgggatggggcccccgcccagccccatggaccagcactcccaaggttacccctcgcccctgggtggctctgagcatgcctctagtccagttccagccagtggcccgtcttcggggccccagatgtcttccgggccaggaggtgccccgctggatggtgctgacccccaggccttggggcagcagaaccggggcccaaccccatttaaccagaaccagctgcaccagctcagagctcagatcatggcctacaagatgctggccagggggcagcccctccccgaccacctgcagatggcggtgcagggcaagcggccgatgcccgggatgcagcagcagatgccaacgctacctccaccctcggtgtccgcaacaggacccggccctggccctggccctggccccggcccgggtcccggcccggcacctccaaattacagcaggcctcatggtatgggagggcccaacatgcctcccccaggaccctcgggcgtgccccccgggatgccaggccagcctcctggagggcctcccaagccctggcctgaaggacccatggcgaatgctgctgcccccacgagcacccctcagaagctgattcccccgcagccaacgggccgcccttcccccgcgccccctgccgtcccacccgccgcctcgcccgtgatgccaccgcagacccagtcccccgggcagccggcccagcccgcgcccatggtgccactgcaccagaagcagagccgcatcacccccatccagaagccgcggggcctcgaccctgtggagatcctgcaggagcgcgagtacaggctgcaggctcgcatcgcacaccgaattcaggaacttgaaaaccttcccgggtccctggccggggatttgcgaaccaaagcgaccattgagctcaaggccctcaggctgctgaacttccagaggcagctgcgccaggaggtggtggtgtgcatgcggagggacacagcgctggagacagccctcaatgctaaggcctacaagcgcagcaagcgccagtccctgcgcgaggcccgcatcactgagaagctggagaagcagcagaagatcgagcaggagcgcaagcgccggcagaagcaccaggaatacctcaatagcattctccagcatgccaaggatttcaaggaatatcacagatccgtcacaggcaaaatccagaagctgaccaaggcagtggccacgtaccatgccaacacggagcgggagcagaagaaagagaacgagcggatcgagaaggagcgcatgcggaggctcatggctgaagatgaggaggggtaccgcaagctcatcgaccagaagaaggacaagcgcctggcctacctcttgcagcagacagacgagtacgtggctaacctcacggagctggtgcggcagcacaaggctgcccaggtcgccaaggagaaaaagaagaaaaagaaaaagaagaaggcagaaaatgcagaaggacagacgcctgccattgggccggatggcgagcctctggacgagaccagccagatgagcgacctcccggtgaaggtgatccacgtggagagtgggaagatcctcacaggcacagatgcccccaaagccgggcagctggaggcctggctcgagatgaacccggggtatgaagtagctccgaggtctgatagtgaagaaagtggctcagaagaagaggaagaggaggaggaggaagagcagccgcaggcagcacagcctcccaccctgcccgtggaggagaagaagaagattccagatccagacagcgatgacgtctctgaggtggacgcgcggcacatcattgagaatgccaagcaagatgtcgatgatgaatatggcgtgtcccaggcccttgcacgtggcctgcagtcctactatgccgtggcccatgctgtcactgagagagtggacaagcagtcagcgcttatggtcaatggtgtcctcaaacagtaccagatcaaaggtttggagtggctggtgtccctgtacaacaacaacctgaacggcatcctggccgacgagatgggcctggggaagaccatccagaccatcgcgctcatcacgtacctcatggagcacaaacgcatcaatgggcccttcctcatcatcgtgcctctctcaacgctgtccaactgggcgtacgagtttgacaagtgggccccctccgtggtgaaggtgtcttacaagggatccccagcagcaagacgggcctttgtcccccagctccggagtgggaagttcaacgtcttgctgacgacgtacgagtacatcatcaaagacaagcacatcctcgccaagatccgttggaagtacatgattgtggacgaaggtcaccgcatgaagaaccaccactgcaagctgacgcaggtgctcaacacgcactatgtggcaccccgccgcctgctgctgacgggcacaccgctgcagaacaagcttcccgagctctgggcgctgctcaacttcctgctgcccaccatcttcaagagctgcagcaccttcgagcagtggtttaacgcaccctttgccatgaccggggaaaaggtggacctgaatgaggaggaaaccattctcatcatccggcgtctccacaaagtgctgcggcccttcttgctccgacgactcaagaaggaagtcgaggcccagttgcccgaaaaggtggagtacgtcatcaagtgcgacatgtctgcgctgcagcgagtgctctaccgccacatgcaggccaagggcgtgctgctgactgatggctccgagaaggacaagaagggcaaaggcggcaccaagaccctgatgaacaccatcatgcagctgcggaagatctgcaaccacccctacatgttccagcacatcgaggagtccttttccgagcacttggggttcactggcggcattgtccaagggctggacctgtaccgagcctcgggtaaatttgagcttcttgatagaattcttcccaaactccgagcaaccaaccacaaagtgctgctgttctgccaaatgacctccctcatgaccatcatggaagattactttgcgtatcgcggctttaaatacctcaggcttgatggaaccacgaaggcggaggaccggggcatgctgctgaaaaccttcaacgagcccggctctgagtacttcatcttcctgctcagcacccgggctggggggctcggcctgaacctccagtcggcagacactgtgatcatttttgacagcgactggaatcctcaccaggtaaaagcgggccgggccccaggtcgaggagaaggaagggggtgcctgcaaaacctcgaggagacggccctggcttgagggtcctccagcctcctccacattgtcttggaccccaggagccgggaggagctgcacccatatctccataggtcatcagggagaaaagaggcggggtcctcctgtttcccaaaatacaaacagcctttccctctgattgggaaagcagtgtataagccatccgtcggtttggtttttcttaaatcttggaatggcaccc

SEQ ID NO: 450957 - DNA, 1401 bp, Homo sapiens
gaccctacatttggagcagcatgagccagtaagggtgagccctcccaaaactcatgtcatcacacacttaaagacacaattatgccttcccaacagtcccccaaagtcttaactcattccagtattaactcaaaagtccaagtccaaagtcccatctgagacaagcagtggccatcgaggagggcacgctggaggagatcgaagaggaggtccggcagaagaaatcatcacggaagcgcaagcgagacagcgacgccggctcctccaccccgaccaccagcacccgcagccgcgacaaggacgacgagagcaagaagcagaagaagcgcgggcggccgcctgccgagaaactctcccctaacccacccaacctcaccaagaagatgaagaagattgtggatgccgtgatcaagtacaaggacagcagcagtggacgtcagctcagcgaggtcttcatccagctgccctcgcgaaaggagctgcccgagtactacgagctcatccgcaagcccgtggacttcaagaagataaaggagcgcattcgcaaccacaagtaccgcagcctcaacgacctagagaaggacgtcatgctcctgtgccagaacgcacagaccttcaacctggagggctccctgatctatgaagactccatcgtcttgcagtcggtcttcaccagcgtgcggcagaaaatcgagaaggaggatgacagtgaaggcgaggagagtgaggaggaggaagagggcgaggaggaaggctccgaatccgaatctcggtccgtcaaagtgaagatcaagcttggccggaaggagaaggcacaggaccggctgaagggcggccggcggcggccgagccgagggtcccgagccaagccggtcgtgagtgacgatgacagtgaggaggaacaagaggaggaccgctcaggaagtggcagcgaagaagactgagccccgacattccagtctcgaccccgagcccctcgttccagagctgagatggcataggccttagcagtaacgggtagcagcagatgtagtttcagacttggagtaaaactgtataaacaaaagaatcttccatatttatacagcagagaagctgtaggactgtttgtgactggccctgtcctggcatcagtagcatctgtaacagcattaactgtcttaaagagagagagagagaattccgaattggggaacacacgatacctgtttttcttttccgttgctggcagtactgttgcgccgcagtttggagtcactgtagttaagtgtggatgcatgtgcgtcaccgtccactcctcctactgtattttattggacaggtcagactcgccgggggcccggcgagggtatgtcagtgtcactggatgtcaaacagtaataaattaaaccaacaacaaaa

SEQ ID NO: 450958 - DNA, 254 bp, Homo sapiens
gcccttggtgggttttgaggaaatgattcctgaatgaggagtcgattgccgtgtgaagggctggtggcacggcacccgcgtgagctacgcgtgccctcagtgcgcttctggattgactggccatgggtgctcacagacatgcacattgtgccaccacattgcagtaacccccatgcttttgtaggctgaagatgaggaggggtaccgcaagctcatcgaccagaagaaggacaagcgcctggcctacctcttgc

SEQ ID NO: 450959 - DNA, 2106 bp, Homo sapiens
  misc_feature (1338)..(1338): n is a, c, g, or t
catatttgtgtaaaattttactgctttcatttgtttttctttaaatagaccatctttaatatatatgcattctttttttttttaaaaaaaagaagcattttaaaaaaggaaacatttcccttattatcttgtcacttgccaaaaatagaaggtaacttaaaaataaatgcaatcaaaccaaaacgatgccattacattctagctagagttgtatcataatatctcacaaaagagattgtgaagcagagcagatgtgttaaaacggagatgttctacttggtgtgtcaaggatttaaagacttggaaaagaaagaattatctcactatgtaagttaatatcatttgacaacctcacctatcaaattacctataaaccaccctatgtcatcttatgggccactgctggtaagagtcccagacattgggaaacaacgtggtcagaaactttcaacatgaagctttcaatatgatcaagctggatggttgcgggtgggagaggtatgaagcagtcatcaaacaagacatgctttttggctgaaattcagtggtatttttgttaccaggattcttagttttcagaatgaggtaccaaatgtatttttgcaatgttttaattcccttccttaggtaattcttagtgacttatttgggcaacattagtgttgctatatagaataagtttcattttagatgacgtggtctttctgtgtctgttgtgctcttcgaatgacccattaagcacattctaggtttcagcaattgatttgtgtgattttctgaccaaatggctcaggtaattggaaattgagtagactctgattttctctctttgaggaatattcactcttccctataaaacaatcgggtctttctcttccattattctttcaaggaattggttgtcaatcttctcttcattcttgccagcctgtagattttgaaaccaaaagagcctatagcttgaaggtagaggcagccaacgtgcacatcgacccgaagtttatcagcaatggccctttcaaggacactgtgaccgtcaagatcgcagtagaagatgctgatgagccccctatgttcttggccccaagttacatccacgaagtccaagaaaatgcagctgctggcaccgtggttgggagagtgcatgccaaagaccctgatgctgccaacagcccgataaggtacagacggatttattttaagagcttggatggggaattttagagtcaagaggttctgggaaagccctgtaggaaccacgtttttcaatttcaaaaagggttcaagtttatcaggttcaatagaatgtaaacaagattaagatttagaagacatgancttcccttcacctctgttcctgactttttggataggattgttcaagctacatgactttgctctggagcagattcccccaggcatactaggtgacggagccctgagctgggcctgtctgcctcaggggactgtggggaaatataaataattattgtgaaataattatagtaattgcaatttattaaataccttcccattctctggttactctatgaggaggttaggtatgtgatctaatcaatcccctcaacttaatcgatgtataaattgctagtccttaaaatgagaggaaattggaggcaatgcaagacaaagtgacttgcctggaatgatacagccaccgagcaggaggcaaggaaagccagctctgtctaactgctgctgagtactttgtaaaagtagtaaagtgtccaaataaatttcaggtgattttattattatgaatacctttttttgtgacaaaaaatgtgatccagaactgtggctgggcaccgtggctcacatctgtaatctcatcactttgggaaggctaaggcgggtggatcacctaaggtaaggagttcgaacccagcctttacaatgtaatgaaaccctgcctctactaaaaatacaaaatttagctgggcatggtggcatgcacctgtaattccagctcctcaggaggctgaggcaggacaatcgcttgaacccgagaggcagaggttgcagtaagccgagatcaagccactgcattctagcctgggtggcagagtgagaccctgtctcagg

SEQ ID NO: 450960 - DNA, 233 bp, Homo sapiens
gtcgctctagaggatctccttggaacgagagacgccctatttctatgtcatttttaatgtatctatttgtacaattttaaagttcttattttagtatacatataaatatcagtattctgacatgtaagaaaatgttacggcatcacacttatattttatgaacattgtactgttgctttaatatgagcttcaatataagaagcaatctttgaaataaaaaaagattttttttt

SEQ ID NO: 450961 - DNA, 299 bp, Homo sapiens
gtcgctctagaggatctccttggaacgagagacgccctatttctatgtcatttttaatgtatctatttgtacaattttaaagttcttattttagtatacatataaatatcagtattctgacatgtaagaaaatgttacggcatcacacttatattttatgaacattgtactgttgctttaatatgagcttcaatataagaagcaatctttgaaataaaaaaagattttttttttctttttatatttattttttattttgttattttgtgttttgtgtttttgttgttgtgtcttatgtg

SEQ ID NO: 450962 - DNA, 3691 bp, Homo sapiens
tccgcggccgccgccagctgaggggagcgtcgcgggccgaggagcagatgccgcgggggccgctcgcagccgccgctgacttgtgaatgggaccgggactggggccgggactgacaccgcagcgcttgccctgcgccagggactggcggctcggaggttgcgtccaccctcaagggccccagaaatcactgtgttttcagctcagcggccctgtgacattccttcgtgttgtcatttgttgagtgaccaatcagatgggtggagtgtgttacagaaattggcagcaagtatccaatgggtgaagaagaagctaactggggacgtgggcagccctgacgtgatgagctcaaccagcagagacattccatcccaagagaggtctgcgtgacgcgtccgggaggccaccctcagcaagaccaccgtacagttggtggaaggggtgacagctgcattctcctgtgcctaccacgtaaccaaaaatgaaggagaactactgtttacaagccgccctggtgtgcctgggcatgctgtgccacagccatgcctttgccccagagcggcgggggcacctgcggccctccttccatgggcaccatgagaagggcaaggaggggcaggtgctacagcgctccaagcgtggctgggtctggaaccagttcttcgtgatagaggagtacaccgggcctgaccccgtgcttgtgggcaggcttcattcagatattgactctggtgatgggaacattaaatacattctctcaggggaaggagctggaaccatttttgtgattgatgacaaatcagggaacattcatgccaccaagacgttggatcgagaagagagagcccagtacacgttgatggctcaggcggtggacagggacaccaatcggccactggagccaccgtcggaattcattgtcaaggtccaggacattaatgacaaccctccggagttcctgcacgagacctatcatgccaacgtgcctgagaggtccaatgtgggaacgtcagtaatccaggtgacagcttcagatgcagatgaccccacttatggaaatagcgccaagttagtgtacagtatcctcgaaggacaaccctatttttcggtggaagcacagacaggtatcatcagaacagccctacccaacatggacagggaggccaaggaggagtaccacgtggtgatccaggccaaggacatgggtggacatatgggcggactctcagggacaaccaaagtgacgatcacactgaccgatgtcaatgacaacccaccaaagtttccgcagagcgtataccagatgtctgtgtcagaagcagccgtccctggggaggaagtaggaagagtgaaagctaaagatccagacattggagaaaatggcttagtcacatacaatattgttgatggagatggtatggaatcgtttgaaatcacaacggactatgaaacacaggagggggtgataaagctgaaaaagcctgtagattttgaaaccaaaagagcctatagcttgaaggtagaggcagccaacgtgcacatcgacccgaagtttatcagcaatggccctttcaaggacactgtgaccgtcaagatcgcagtagaagatgctgatgagccccctatgttcttggccccaagttacatccacgaagtccaagaaaatgcagctgctggcaccgtggttgggagagtgcatgccaaagaccctgatgctgccaacagcccgataaggtattccatcgatcgtcacactgacctcgacagatttttcactattaatccagaggatggttttattaaaactacaaaacctctggatagagaggaaacagcctggctcaacatcactgtctttgcagcagaaatccacaatcggcatcaggaagccaaagtcccagtggccattagggtccttgatgtcaacgataatgctcccaagtttgctgccccttatgaaggtttcatctgtgagagtgatcagaccaagccactttccaaccagccaattgttacaattagtgcagatgacaaggatgacacggccaatggaccaagatttatcttcagcctaccccctgaaatcattcacaatccaaatttcacagtcagagacaaccgagataacacagcaggcgtgtacgcccggcgtggagggttcagtcggcagaagcaggacttgtaccttctgcccatagtgatcagcgatggcggcatcccgcccatgagtagcaccaacaccctcaccatcaaagtctgcgggtgcgacgtgaacggggcactgctctcctgcaacgcagaggcctacattctgaacgccggcctgagcacaggcgccctgatcgccatcctcgcctgcatcgtcattctcctggtcattgtagtattgtttgtgaccctgagaaggcaaaagaaagaaccactcattgtctttgaggaagaagatgtccgtgagaacatcattacttatgatgatgaagggggtggggaagaagacacagaagcctttgatattgccaccctccagaatcctgatggtatcaatggatttatcccccgcaaagacatcaaacctgagtatcagtacatgcctagacctgggctccggccagcgcccaacagcgtggatgtcgatgacttcatcaacacgagaatacaggaggcagacaatgaccccacggctcctccttatgactccattcaaatctacggttatgaaggcaggggctcagtggccgggtccctgagctccctagagtcggccaccacagattcagacttggactatgattatctacagaactggggacctcgttttaagaaactagcagatttgtatggttccaaagacacttttgatgacgattcttaacaataacgatacaaatttggccttaagaactgtgtctggcgttctcaagaatctagaagatgtgtaaacaggtatttttttaaatcaaggaaaggctcatttaaaacaggcaaagttttacagagaggatacatttaataaaactgcgaggacatcaaagtggtaaatactgtgaaataccttttctcacaaaaaggcaaatattgaagttgtttatcaacttcgctagaaaaaaaaaacacttggcatacaaaatatttaagtgaaggagaagtctaacgctgaactgacaatgaagggaaattgtttatgtgttatgaacatccaagtctttcttcttttttaagttgtcaaagaagcttccacaaaattagaaaggacaacagttctgagctgtaatttcgccttaaactctggacactctatatgtagtgcatttttaaacttgaaatatataatattcagccagcttaaacccatacaatgtatgtacaatacaatgtacaattatgtctcttgagcatcaatcttgttactgctgattcttgtaaatctttttgcttctactttcatcttaaactaatacgtgccagatataactgtcttgtttcagtgagagacgccctatttctatgtcatttttaatgtatctatttgtacaattttaaagttcttattttagtatacatataaatatcagtattctgacatgtaagaaaatgttacggcatcacacttatattttatgaacattgtactgttgctttaatatgagcttcaatataagaagcaatctttgaaataaaaaaagattttttttt

SEQ ID NO: 450963 - DNA, 3803 bp, Homo sapiens
tccgcggccgccgccagctgaggggagcgtcgcgggccgaggagcagatgccgcgggggccgctcgcagccgccgctgacttgtgaatgggaccgggactggggccgggactgacaccgcagcgcttgccctgcgccagggactggcggctcggaggttgcgtccaccctcaagggccccagaaatcactgtgttttcagctcagcggccctgtgacattccttcgtgttgtcatttgttgagtgaccaatcagatgggtggagtgtgttacagaaattggcagcaagtatccaatgggtgaagaagaagctaactggggacgtgggcagccctgacgtgatgagctcaaccagcagagacattccatcccaagagaggtctgcgtgacgcgtccgggaggccaccctcagcaagaccaccgtacagttggtggaaggggtgacagctgcattctcctgtgcctaccacgtaaccaaaaatgaaggagaactactgtttacaagccgccctggtgtgcctgggcatgctgtgccacagccatgcctttgccccagagcggcgggggcacctgcggccctccttccatgggcaccatgagaagggcaaggaggggcaggtgctacagcgctccaagcgtggctgggtctggaaccagttcttcgtgatagaggagtacaccgggcctgaccccgtgcttgtgggcaggcttcattcagatattgactctggtgatgggaacattaaatacattctctcaggggaaggagctggaaccatttttgtgattgatgacaaatcagggaacattcatgccaccaagacgttggatcgagaagagagagcccagtacacgttgatggctcaggcggtggacagggacaccaatcggccactggagccaccgtcggaattcattgtcaaggtccaggacattaatgacaaccctccggagttcctgcacgagacctatcatgccaacgtgcctgagaggtccaatgtgggaacgtcagtaatccaggtgacagcttcagatgcagatgaccccacttatggaaatagcgccaagttagtgtacagtatcctcgaaggacaaccctatttttcggtggaagcacagacaggtatcatcagaacagccctacccaacatggacagggaggccaaggaggagtaccacgtggtgatccaggccaaggacatgggtggacatatgggcggactctcagggacaaccaaagtgacgatcacactgaccgatgtcaatgacaacccaccaaagtttccgcagagcgtataccagatgtctgtgtcagaagcagccgtccctggggaggaagtaggaagagtgaaagctaaagatccagacattggagaaaatggcttagtcacatacaatattgttgatggagatggtatggaatcgtttgaaatcacaacggactatgaaacacaggagggggtgataaagctgaaaaagcctgtagattttgaaaccaaaagagcctatagcttgaaggtagaggcagccaacgtgcacatcgacccgaagtttatcagcaatggccctttcaaggacactgtgaccgtcaagatcgcagtagaagatgctgatgagccccctatgttcttggccccaagttacatccacgaagtccaagaaaatgcagctgctggcaccgtggttgggagagtgcatgccaaagaccctgatgctgccaacagcccgataaggtattccatcgatcgtcacactgacctcgacagatttttcactattaatccagaggatggttttattaaaactacaaaacctctggatagagaggaaacagcctggctcaacatcactgtctttgcagcagaaatccacaatcggcatcaggaagccaaagtcccagtggccattagggtccttgatgtcaacgataatgctcccaagtttgctgccccttatgaaggtttcatctgtgagagtgatcagaccaagccactttccaaccagccaattgttacaattagtgcagatgacaaggatgacacggccaatggaccaagatttatcttcagcctaccccctgaaatcattcacaatccaaatttcacagtcagagacaaccgagataacacagcaggcgtgtacgcccggcgtggagggttcagtcggcagaagcaggacttgtaccttctgcccatagtgatcagcgatggcggcatcccgcccatgagtagcaccaacaccctcaccatcaaagtctgcgggtgcgacgtgaacggggcactgctctcctgcaacgcagaggcctacattctgaacgccggcctgagcacaggcgccctgatcgccatcctcgcctgcatcgtcattctcctggtcattgtagtattgtttgtgaccctgagaaggcaaaagaaagaaccactcattgtctttgaggaagaagatgtccgtgagaacatcattacttatgatgatgaagggggtggggaagaagacacagaagcctttgatattgccaccctccagaatcctgatggtatcaatggatttatcccccgcaaagacatcaaacctgagtatcagtacatgcctagacctgggctccggccagcgcccaacagcgtggatgtcgatgacttcatcaacacgagaatacaggaggcagacaatgaccccacggctcctccttatgactccattcaaatctacggttatgaaggcaggggctcagtggccgggtccctgagctccctagagtcggccaccacagattcagacttggactatgattatctacagaactggggacctcgttttaagaaactagcagatttgtatggttccaaagacacttttgatgacgattcttaacaataacgatacaaatttggccttaagaactgtgtctggcgttctcaagaatctagaagatgtgtaaacaggtatttttttaaatcaaggaaaggctcatttaaaacaggcaaagttttacagagaggatacatttaataaaactgcgaggacatcaaagtggtaaatactgtgaaataccttttctcacaaaaaggcaaatattgaagttgtttatcaacttcgctagaaaaaaaaaacacttggcatacaaaatatttaagtgaaggagaagtctaacgctgaactgacaatgaagggaaattgtttatgtgttatgaacatccaagtctttcttcttttttaagttgtcaaagaagcttccacaaaattagaaaggacaacagttctgagctgtaatttcgccttaaactctggacactctatatgtagtgcatttttaaacttgaaatatataatattcagccagcttaaacccatacaatgtatgtacaatacaatgtacaattatgtctcttgagcatcaatcttgttactgctgattcttgtaaatctttttgcttctactttcatcttaaactaatacgtgccagatataactgtcttgtttcagtgagagacgccctatttctatgtcatttttaatgtatctatttgtacaattttaaagttcttattttagtatacatataaatatcagtattctgacatgtaagaaaatgttacggcatcacacttatattttatgaacattgtactgttgctttaatatgagcttcaatataagaagcaatctttgaaataaaaaaagattttttttttttttttttttttttttttttttttttttttttttttaaaagggccccagtaagggggggggggggggttataaaaaaaaggggaaaattattttttctacaggggggaaga

SEQ ID NO: 450964 - DNA, 3140 bp, Homo sapiens
catatttgtgtaaaattttactgctttcatttgtttttctttaaatagaccatctttaatatatatgcattctttttttttttaaaaaaaagaagcattttaaaaaaggaaacatttcccttattatcttgtcacttgccaaaaatagaaggtaacttaaaaataaatgcaatcaaaccaaaacgatgccattacattctagctagagttgtatcataatatctcacaaaagagattgtgaagcagagcagatgtgttaaaacggagatgttctacttggtgtgtcaaggatttaaagacttggaaaagaaagaattatctcactatgtaagttaatatcatttgacaacctcacctatcaaattacctataaaccaccctatgtcatcttatgggccactgctggtaagagtcccagacattgggaaacaacgtggtcagaaactttcaacatgaagctttcaatatgatcaagctggatggttgcgggtgggagaggtatgaagcagtcatcaaacaagacatgctttttggctgaaattcagtggtatttttgttaccaggattcttagttttcagaatgaggtaccaaatgtatttttgcaatgttttaattcccttccttaggtaattcttagtgacttatttgggcaacattagtgttgctatatagaataagtttcattttagatgacgtggtctttctgtgtctgttgtgctcttcgaatgacccattaagcacattctaggtttcagcaattgatttgtgtgattttctgaccaaatggctcaggtaattggaaattgagtagactctgattttctctctttgaggaatattcactcttccctataaaacaatcgggtctttctcttccattattctttcaaggaattggttgtcaatcttctcttcattcttgccagcctgtagattttgaaaccaaaagagcctatagcttgaaggtagaggcagccaacgtgcacatcgacccgaagtttatcagcaatggccctttcaaggacactgtgaccgtcaagatcgcagtagaagatgctgatgagccccctatgttcttggccccaagttacatccacgaagtccaagaaaatgcagctgctggcaccgtggttgggagagtgcatgccaaagaccctgatgctgccaacagcccgataaggtattccatcgatcgtcacactgacctcgacagatttttcactattaatccagaggatggttttattaaaactacaaaacctctggatagagaggaaacagcctggctcaacatcactgtctttgcagcagaaatccacaatcggcatcaggaagccaaagtcccagtggccattagggtccttgatgtcaacgataatgctcccaagtttgctgccccttatgaaggtttcatctgtgagagtgatcagaccaagccactttccaaccagccaattgttacaattagtgcagatgacaaggatgacacggccaatggaccaagatttatcttcagcctaccccctgaaatcattcacaatccaaatttcacagtcagagacaaccgagataacacagcaggcgtgtacgcccggcgtggagggttcagtcggcagaagcaggacttgtaccttctgcccatagtgatcagcgatggcggcatcccgcccatgagtagcaccaacaccctcaccatcaaagtctgcgggtgcgacgtgaacggggcactgctctcctgcaacgcagaggcctacattctgaacgccggcctgagcacaggcgccctgatcgccatcctcgcctgcatcgtcattctcctggtcattgtagtattgtttgtgaccctgagaaggcaaaagaaagaaccactcattgtctttgaggaagaagatgtccgtgagaacatcattacttatgatgatgaagggggtggggaagaagacacagaagcctttgatattgccaccctccagaatcctgatggtatcaatggatttatcccccgcaaagacatcaaacctgagtatcagtacatgcctagacctgggctccggccagcgcccaacagcgtggatgtcgatgacttcatcaacacgagaatacaggaggcagacaatgaccccacggctcctccttatgactccattcaaatctacggttatgaaggcaggggctcagtggccgggtccctgagctccctagagtcggccaccacagattcagacttggactatgattatctacagaactggggacctcgttttaagaaactagcagatttgtatggttccaaagacacttttgatgacgattcttaacaataacgatacaaatttggccttaagaactgtgtctggcgttctcaagaatctagaagatgtgtaaacaggtatttttttaaatcaaggaaaggctcatttaaaacaggcaaagttttacagagaggatacatttaataaaactgcgaggacatcaaagtggtaaatactgtgaaataccttttctcacaaaaaggcaaatattgaagttgtttatcaacttcgctagaaaaaaaaaacacttggcatacaaaatatttaagtgaaggagaagtctaacgctgaactgacaatgaagggaaattgtttatgtgttatgaacatccaagtctttcttcttttttaagttgtcaaagaagcttccacaaaattagaaaggacaacagttctgagctgtaatttcgccttaaactctggacactctatatgtagtgcatttttaaacttgaaatatataatattcagccagcttaaacccatacaatgtatgtacaatacaatgtacaattatgtctcttgagcatcaatcttgttactgctgattcttgtaaatctttttgcttctactttcatcttaaactaatacgtgccagatataactgtcttgtttcagtgagagacgccctatttctatgtcatttttaatgtatctatttgtacaattttaaagttcttattttagtatacatataaatatcagtattctgacatgtaagaaaatgttacggcatcacacttatattttatgaacattgtactgttgctttaatatgagcttcaatataagaagcaatctttgaaataaaaaaagattttttttt

SEQ ID NO: 450965 - DNA, 3868 bp, Homo sapiens
acaggcccgcgacgctcccctcagctggcggcggccgaggagcagatgccgcgggggccgctcgcagccgccgctgacttgtgaatgggaccgggactggggccgggactgacaccgcagcgcttgccctgcgccagggactggcggctcggaggttgcgtccaccctcaagggccccagaaatcactgtgttttcagctcagcggccctgtgacattccttcgtgttgtcatttgttgagtgaccaatcagatgggtggagtgtgttacagaaattggcagcaagtatccaatgggtgaagaagaagctaactggggacgtgggcagccctgacgtgatgagctcaaccagcagagacattccatcccaagagaggtctgcgtgacgcgtccgggaggccaccctcagcaagaccaccgtacagttggtggaaggggtgacagctgcattctcctgtgcctaccacgtaaccaaaaatgaaggagaactactgtttacaagccgccctggtgtgcctgggcatgctgtgccacagccatgcctttgccccagagcggcgggggcacctgcggccctccttccatgggcaccatgagaagggcaaggaggggcaggtgctacagcgctccaagcgtggctgggtctggaaccagttcttcgtgatagaggagtacaccgggcctgaccccgtgcttgtgggcaggcttcattcagatattgactctggtgatgggaacattaaatacattctctcaggggaaggagctggaaccatttttgtgattgatgacaaatcagggaacattcatgccaccaagacgttggatcgagaagagagagcccagtacacgttgatggctcaggcggtggacagggacaccaatcggccactggagccaccgtcggaattcattgtcaaggtccaggacattaatgacaaccctccggagttcctgcacgagacctatcatgccaacgtgcctgagaggtccaatgtgggaacgtcagtaatccaggtgacagcttcagatgcagatgaccccacttatggaaatagcgccaagttagtgtacagtatcctcgaaggacaaccctatttttcggtggaagcacagacaggtatcatcagaacagccctacccaacatggacagggaggccaaggaggagtaccacgtggtgatccaggccaaggacatgggtggacatatgggcggactctcagggacaaccaaagtgacgatcacactgaccgatgtcaatgacaacccaccaaagtttccgcagagcgtataccagatgtctgtgtcagaagcagccgtccctggggaggaagtaggaagagtgaaagctaaagatccagacattggagaaaatggcttagtcacatacaatattgttgatggagatggtatggaatcgtttgaaatcacaacggactatgaaacacaggagggggtgataaagctgaaaaagcctgtagattttgaaaccaaaagagcctatagcttgaaggtagaggcagccaacgtgcacatcgacccgaagtttatcagcaatggccctttcaaggacactgtgaccgtcaagatcgcagtagaagatgctgatgagccccctatgttcttggccccaagttacatccacgaagtccaagaaaatgcagctgctggcaccgtggttgggagagtgcatgccaaagaccctgatgctgccaacagcccgataaggtattccatcgatcgtcacactgacctcgacagatttttcactattaatccagaggatggttttattaaaactacaaaacctctggatagagaggaaacagcctggctcaacatcactgtctttgcagcagaaatccacaatcggcatcaggaagccaaagtcccagtggccattagggtccttgatgtcaacgataatgctcccaagtttgctgccccttatgaaggtttcatctgtgagagtgatcagaccaagccactttccaaccagccaattgttacaattagtgcagatgacaaggatgacacggccaatggaccaagatttatcttcagcctaccccctgaaatcattcacaatccaaatttcacagtcagagacaaccgagataacacagcaggcgtgtacgcccggcgtggagggttcagtcggcagaagcaggacttgtaccttctgcccatagtgatcagcgatggcggcatcccgcccatgagtagcaccaacaccctcaccatcaaagtctgcgggtgcgacgtgaacggggcactgctctcctgcaacgcagaggcctacattctgaacgccggcctgagcacaggcgccctgatcgccatcctcgcctgcatcgtcattctcctgggttgcccaagcttaatggaacccccctctcccagggaagacatgagattgctttatctgggcttccagctgatgctattttcctatgttaaagtaaacagaagattttgtcttctgggggtctttataaaacttcctttcctctatgtggtggctacagagagtccaaccacacttacgtcattgtagtattgtttgtgaccctgagaaggcaaaagaaagaaccactcattgtctttgaggaagaagatgtccgtgagaacatcattacttatgatgatgaagggggtggggaagaagacacagaagcctttgatattgccaccctccagaatcctgatggtatcaatggatttatcccccgcaaagacatcaaacctgagtatcagtacatgcctagacctgggctccggccagcgcccaacagcgtggatgtcgatgacttcatcaacacgagaatacaggaggcagacaatgaccccacggctcctccttatgactccattcaaatctacggttatgaaggcaggggctcagtggccgggtccctgagctccctagagtcggccaccacagattcagacttggactatgattatctacagaactggggacctcgttttaagaaactagcagatttgtatggttccaaagacacttttgatgacgattcttaacaataacgatacaaatttggccttaagaactgtgtctggcgttctcaagaatctagaagatgtgtaaacaggtatttttttaaatcaaggaaaggctcatttaaaacaggcaaagttttacagagaggatacatttaataaaactgcgaggacatcaaagtggtaaatactgtgaaataccttttctcacaaaaaggcaaatattgaagttgtttatcaacttcgctagaaaaaaaaaacacttggcatacaaaatatttaagtgaaggagaagtctaacgctgaactgacaatgaagggaaattgtttatgtgttatgaacatccaagtctttcttcttttttaagttgtcaaagaagcttccacaaaattagaaaggacaacagttctgagctgtaatttcgccttaaactctggacactctatatgtagtgcatttttaaacttgaaatatataatattcagccagcttaaacccatacaatgtatgtacaatacaatgtacaattatgtctcttgagcatcaatcttgttactgctgattcttgtaaatctttttgcttctactttcatcttaaactaatacgtgccagatataactgtcttgtttcagtgagagacgccctatttctatgtcatttttaatgtatctatttgtacaattttaaagttcttattttagtatacatataaatatcagtattctgacatgtaagaaaatgttacggcatcacacttatattttatgaacattgtactgttgctttaatatgagcttcaatataagaagcaatctttgaaataaaaaaagattttttttt

SEQ ID NO: 450966 - DNA, 3824 bp, Homo sapiens
tccgcggccgccgccagctgaggggagcgtcgcgggccgaggagcagatgccgcgggggccgctcgcagccgccgctgacttgtgaatgggaccgggactggggccgggactgacaccgcagcgcttgccctgcgccagggactggcggctcggaggttgcgtccaccctcaagggccccagaaatcactgtgttttcagctcagcggccctgtgacattccttcgtgttgtcatttgttgagtgaccaatcagatgggtggagtgtgttacagaaattggcagcaagtatccaatgggtgaagaagaagctaactggggacgtgggcagccctgacgtgatgagctcaaccagcagagacattccatcccaagagaggtctgcgtgacgcgtccgggaggccaccctcagcaagaccaccgtacagttggtggaaggggtgacagctgcattctcctgtgcctaccacgtaaccaaaaatgaaggagaactactgtttacaagccgccctggtgtgcctgggcatgctgtgccacagccatgcctttgccccagagcggcgggggcacctgcggccctccttccatgggcaccatgagaagggcaaggaggggcaggtgctacagcgctccaagcgtggctgggtctggaaccagttcttcgtgatagaggagtacaccgggcctgaccccgtgcttgtgggcaggcttcattcagatattgactctggtgatgggaacattaaatacattctctcaggggaaggagctggaaccatttttgtgattgatgacaaatcagggaacattcatgccaccaagacgttggatcgagaagagagagcccagtacacgttgatggctcaggcggtggacagggacaccaatcggccactggagccaccgtcggaattcattgtcaaggtccaggacattaatgacaaccctccggagttcctgcacgagacctatcatgccaacgtgcctgagaggtccaatgtgggaacgtcagtaatccaggtgacagcttcagatgcagatgaccccacttatggaaatagcgccaagttagtgtacagtatcctcgaaggacaaccctatttttcggtggaagcacagacaggtatcatcagaacagccctacccaacatggacagggaggccaaggaggagtaccacgtggtgatccaggccaaggacatgggtggacatatgggcggactctcagggacaaccaaagtgacgatcacactgaccgatgtcaatgacaacccaccaaagtttccgcagagcgtataccagatgtctgtgtcagaagcagccgtccctggggaggaagtaggaagagtgaaagctaaagatccagacattggagaaaatggcttagtcacatacaatattgttgatggagatggtatggaatcgtttgaaatcacaacggactatgaaacacaggagggggtgataaagctgaaaaagcctgtagattttgaaaccaaaagagcctatagcttgaaggtagaggcagccaacgtgcacatcgacccgaagtttatcagcaatggccctttcaaggacactgtgaccgtcaagatcgcagtagaagatgctgatgagccccctatgttcttggccccaagttacatccacgaagtccaagaaaatgcagctgctggcaccgtggttgggagagtgcatgccaaagaccctgatgctgccaacagcccgataaggtattccatcgatcgtcacactgacctcgacagatttttcactattaatccagaggatggttttattaaaactacaaaacctctggatagagaggaaacagcctggctcaacatcactgtctttgcagcagaaatccacaatcggcatcaggaagccaaagtcccagtggccattagggtccttgatgtcaacgataatgctcccaagtttgctgccccttatgaaggtttcatctgtgagagtgatcagaccaagccactttccaaccagccaattgttacaattagtgcagatgacaaggatgacacggccaatggaccaagatttatcttcagcctaccccctgaaatcattcacaatccaaatttcacagtcagagacaaccgagataacacagcaggcgtgtacgcccggcgtggagggttcagtcggcagaagcaggacttgtaccttctgcccatagtgatcagcgatggcggcatcccgcccatgagtagcaccaacaccctcaccatcaaagtctgcgggtgcgacgtgaacggggcactgctctcctgcaacgcagaggcctacattctgaacgccggcctgagcacaggcgccctgatcgccatcctcgcctgcatcgtcattctcctggtcattgtagtattgtttgtgaccctgagaaggcaaaagaaagaaccactcattgtctttgaggaagaagatgtccgtgagaacatcattacttatgatgatgaagggggtggggaagaagacacagaagcctttgatattgccaccctccagaatcctgatggtatcaatggatttatcccccgcaaagacatcaaacctgagtatcagtacatgcctagacctgggctccggccagcgcccaacagcgtggatgtcgatgacttcatcaacacgagaatacaggaggcagacaatgaccccacggctcctccttatgactccattcaaatctacggttatgaaggcaggggctcagtggccgggtccctgagctccctagagtcggccaccacagattcagacttggactatgattatctacagaactggggacctcgttttaagaaactagcagatttgtatggttccaaagacacttttgatgacgattcttaacaataacgatacaaatttggccttaagaactgtgtctggcgttctcaagaatctagaagatgtgtaaacaggtatttttttaaatcaaggaaaggctcatttaaaacaggcaaagttttacagagaggatacatttaataaaactgcgaggacatcaaagtggtaaatactgtgaaataccttttctcacaaaaaggcaaatattgaagttgtttatcaacttcgctagaaaaaaaaaacacttggcatacaaaatatttaagtgaaggagaagtctaacgctgaactgacaatgaagggaaattgtttatgtgttatgaacatccaagtctttcttcttttttaagttgtcaaagaagcttccacaaaattagaaaggacaacagttctgagctgtaatttcgccttaaactctggacactctatatgtagtgcatttttaaacttgaaatatataatattcagccagcttaaacccatacaatgtatgtacaatacaatgtacaattatgtctcttgagcatcaatcttgttactgctgattcttgtaaatctttttgcttctactttcatcttaaactaatacgtgccagatataactgtcttgtttcagtgagagacgccctatttctatgtcatttttaatgtatctatttgtacaattttaaagttcttattttagtatacatataaatatcagtattctgacatgtaagaaaatgttacggcatcacacttatattttatgaacattgtactgttgctttaatatgagcttcaatataagaagcaatctttgaaataaaaaaagatttttttttttttttttttttttttttttttttttttttttttttttttttttttttttttttttttaaaagggccccagtaagggggggggggggggttataaaaaaaaggggaaaattattttttctacaggggggaaga

SEQ ID NO: 450967 - DNA, 318 bp, Homo sapiens
cttcattcagatattgactctggtgatgggaacattaaatacattctctcaggggaaggagctggaaccatttttgtgattgatgacaaatcagggaacattcatgccaccaagacgttggatcgagaagagagagcccagtacacgttgatggctcaggcggtggacagggacaccaatcggccactggagccaccgtcggaattcattgtcaaggtccaggacattaatgacaaccctccggagttcctgcacgagacctatcatgccaacgtgcctgagaggtccaatgtgggtgcgtacggtgtgggaggcctg

SEQ ID NO: 450968 - DNA, 749 bp, Homo sapiens
atgcctgacatatagtaagtgctcaataaatatttgttgcctgcctaagatactcattcaaaagtcatagaactagtctgtccctttgatgttgtttcaatctataggaggagctagaaaccctacagagcatcaataagaagttggaactgaaagtgaaagaacagaaggactattgggagacagagctgcttcaactgaaagaacaaaaccagaagatgtcctcagaaaatgagaagatgggaatcagagtggatcagcttcaggtaggtaatgccatatgtttgtcaaaggatattttcttagccttaccactgctccaatttggtggcctagaaagatgtatttcattgcagtgagtgcctaatggcatacttttcaaagtatcacactaaagtttcaggttatgtattttccattcttggaccaggtaagcctccaccctacccatgcccctgcttttaaaaaaaaaaaaatcatgattcacagccgggcgcagtggctcatgtctgtaatcccagcactttgggaggccaaggcaggtggatcacctgaggtcaggagttcgagatcagcctggccaatatggcaaaaccccgtctctactaaaaatacaaaaattagctgggcgtgctaatttacaggcgcacgtgtaattccagctactcgggaggctgaggcagaagaatcacttgagccccggaggcaaaggttgcagtgaatagagattgcaccactgcactccagcc

SEQ ID NO: 450969 - DNA, 724 bp, Homo sapiens
  misc_feature (31)..(31): n is a, c, g, or t
  misc_feature (579)..(579): n is a, c, g, or t
  misc_feature (596)..(596): n is a, c, g, or t
  misc_feature (601)..(601): n is a, c, g, or t
  misc_feature (606)..(606): n is a, c, g, or t
cgcgaaccataggcagtacgaggcgggtgtngtgtatttgttctcagtcctaaccctggggccagagattggtccgaggttgagaattccttcctcctcatccttggtgttgctttctccaaatgattgttttagactagccaaaaatgccgtggcaaagagctcagaaatccaatttggataccaaaggtttctcatgttaatttctcagcccccaaagaagcatcttactcctgaaccttagacaggaagtattgtttcagtcacagaaagcttttctgggtacctctggttagcactttctactctctgatatttcctatgtacatagcttttattgttgtaaatcctttcttaatggttaaataggattgttagcaactatgggtttgcagttttctgagtaggtgagttttgaatatgggtaaatcagaataatgagacaacttgttaatctctttaatactaaaaataaattactcttctatttcagggacttaggtaatttaaaataaaccttcaatttatggtaaacaaaaaaaaaaaaacaaaaaaaaaaaacaaccccgggggcctttnttggcgggggggggaanaaggnggttngaaggggccccgcggggcaaaagggtggtcccggccccagtttttttggcaaagggggaaaactcggcgggcccccaaagaggggcggcgaaaaatcgggaagaccggggaacccgtg

SEQ ID NO: 450970 - DNA, 562 bp, Homo sapiens
  misc_feature (417)..(417): n is a, c, g, or t
  misc_feature (434)..(434): n is a, c, g, or t
  misc_feature (439)..(439): n is a, c, g, or t
  misc_feature (444)..(444): n is a, c, g, or t
aattcaagcttctaacgatgtacggggatttctcatgttaatttctcagcccccaaagaagcatcttactcctgaaccttagacaggaagtattgtttcagtcacagaaagcttttctgggtacctctggttagcactttctactctctgatatttcctatgtacatagcttttattgttgtaaatcctttcttaatggttaaataggattgttagcaactatgggtttgcagttttctgagtaggtgagttttgaatatgggtaaatcagaataatgagacaacttgttaatctctttaatactaaaaataaattactcttctatttcagggacttaggtaatttaaaataaaccttcaatttatggtaaacaaaaaaaaaaaaacaaaaaaaaaaaacaaccccgggggcctttnttggcgggggggggaanaaggnggttngaaggggccccgcggggcaaaagggtggtcccggccccagtttttttggcaaagggggaaaactcggcgggcccccaaagaggggcggcgaaaaatcgggaagaccggggaacccgtg

SEQ ID NO: 450971 - DNA, 826 bp, Homo sapiens
agaccccaatggagggttcttagatttccagcaagaaagaattcgaggtgaatccatagagtgagagcaagtttataaggacccctaccatggaggagaccatcaaagatccccccacatcagctgtcttgctggatcactgtcatttctctcaggtcatctttaacagtgtggagaagttctacatccctggaggggacgtcacatgtcattataccttcacccagcatttcatccctcgtcgaaaggattggattggcatctttagagtggggtggaagacaacccgtgagtattacaccttcatgtgggttactttgcccattgacctaaacaacaaatcagctaaacagcaggaagtccaattcaaagcttactacctgcccaaggatgatgagtattaccagttctgctatgtggatgaggatggtgtggtccggggagcaagtattcctttccaattccgtccagaaaatgaggaagacatcctggttgttaccactcagggcagaggtggaacgcacgatagagcaagaacaagcaaggagctacgcacacacagaaaacccaggagctgacaggacagactggaatcaggcctccagacggccgcacactccagaacatgccaggctgcagctccacacagcaagcccgcgacgcgagcacagaaaccccctaccagagccatcaactaagacacttgcgccactgaaacagcgacaaaggacaccgcaggactaacggggacgacagaacctgctgccacgtggcacgcaccacagacacagcggcatgtcctcggaaaacccgcgaaccctgggca

SEQ ID NO: 450972 - DNA, 506 bp, Homo sapiens
ccaaaccaaaagagggaatagacaaagcacttggaaatttaaaatatgataaagtaaaaattgtatttaaaaggtagtaagattacaagcgtgagccactgtgctgggcccgaggccctgacttcttgctgtaactttccatgcattttttttaaaaggagcagtgtggattttcgcaccctttgtgaactaagttcaatgcgctctatccaaatttgcctaattgaactataagaaagtaataattccattttctatcccctcagggactgaacaaatggaaataactcccaggcagtatcaggtggtcactacagagacttccacaaaaacttttgaatgatgtgaaacacgatgtcatgaataagggttgagccaactatagctctgtgttcctactgggctttccctaatgtggttgggagttatgccctagactaactgtattgtcctagtcacagctccttgctttgatttcatccttgataaaatgaagatgaaactta

SEQ ID NO: 450973 - DNA, 426 bp, Homo sapiens
  misc_feature (20)..(20): n is a, c, g, or t
cttaggctaggtacgaggcngggtgttgtgaaactactgcatgaagaaacaacaggaattaatggatgaaaactttgacctgtcaaaaagactgagtgagaacgaaattatatgtaatgctctgcagagacagaaagagagattggaaggagaaaatgatcttttgaagagggagaacagcagattgctcagttacatgggtctggattttaattctttgccgtatcaagtacctacttcagatgaaggaggcgcaagacaaaatccaggacttgcctatggaaacccatattctggtatccaagaaagttcttcccccagcccgctctccatcaagaaatgccctatctgcaaagcagatgatatttgtgatcacaccttggagcgatctacggtgccatcgtccaccgagcgatctacagtgca

SEQ ID NO: 450974 - DNA, 665 bp, Homo sapiens
caggcgggtcgggctctcccttgggtgcttagccccgcccccgtcccactctgccctgttgctgtcgcgccgctgctggttgctgtccctggacccctaccatggaggagaccatcaaagatccccccacatcagctgtcttgctggatcactgtcatttctctcaggtcatctttaacagtgtggagaagttctacatccctggaggggacgtcacatgtcattataccttcacccagcatttcatccctcgtcgaaaggattggattggcatctttagagtaagtggttaattcagtaccaagtgatcaggaactagaggtgattcttagttacctaactgtgtgactctctgtgtattataagcattttgtataatatgtgttggcagtttttaaattctagccaagctccacagcacttctctcttcacacattaatgtgtgctgtgggactcaaattttcatttcagtgtcaagctaaaataagatggcaaatcatataatcctcaaattttgttatgcttttttttttgcttttttcttttcttttttttttttgaaatagagtcttgctctgtcacctaggctggagtgcaatggcacgatttgtctcactgctacctccacctcccgggttcaagcagttctcctgcctcagcatcc

SEQ ID NO: 450975 - DNA, 2430 bp, Homo sapiens
caggcgggtcgggctctcccttgggtgcttagccccgcccccgtcccactctgccctgttgctgtcgcgccgctgctggttgctgtccctggacccctaccatggaggagaccatcaaagatccccccacatcagctgtcttgctggatcactgtcatttctctcaggtcatctttaacagtgtggagaagttctacatccctggaggggacgtcacatgtcattataccttcacccagcatttcatccctcgtcgaaaggattggattggcatctttagagtggggtggaagacaacccgtgagtattacaccttcatgtgggttactttgcccattgacctaaacaacaaatcagctaaacagcaggaagtccaattcaaagcttactacctgcccaaggatgatgagtattaccagttctgctatgtggatgaggatggtgtggtccggggagcaagtattcctttccaattccgtccagaaaatgaggaagacatcctggttgttaccactcagggagaggtggaagagattgagcagcacaacaaggagctttgcaaagaaaaccaggagctgaaggacagctgtatcagcctccagaagcagaactcagacatgcaggctgagctccaaaagaagcaggaggagctagaaaccctacagagcatcaataagaagttggaactgaaagtgaaagaacagaaggactattgggagacagagctgcttcaactgaaagaacaaaaccagaagatgtcctcagaaaatgagaagatgggaatcagagtggatcagcttcaggcccagctgtcaactcaagagaaagaaatggagaagcttgttcagggagatcaagataagacagagcagttagagcagctgaaaaaggaaaatgaccacctctttctcagtttaactgaacagaggaaggaccagaagaagctcgagcagacagtggagcaaatgaagcagaatgaaactactgcaatgaagaaacaacaggaattaatggatgaaaactttgacctgtcaaaaagactgagtgagaacgaaattatatgtaatgctctgcagagacagaaagagagattggaaggagaaaatgatcttttgaagagggagaacagcagattgctcagttacatgggtctggattttaattctttgccgtatcaagtacctacttcagatgaaggaggcgcaagacaaaatccaggacttgcctatggaaacccatattctggtatccaagaaagttcttcccccagcccgctctccatcaagaaatgccctatctgcaaagcagatgatatttgtgatcacaccttggagcaacagcagatgcagcccctttgtttcaattgtccaatttgtgacaagatcttcccagctacagagaagcagatctttgaagaccacgtgttctgccactctctctgagtatcccaacctcttggatgtatacagagattttatagaatagaacctatagcttctaccatgagttatatgagtcaagatcctgcctaacctgaaattattagggatttactcagccctgctgccgctaacagtggagttatgtcactgatctgaaggtcactgttaagggcttctgctgccatccttgtgggttgctacctttaagtcgcataactctagctgtatcatcctctcacctgtcattcttctgagggtctcagtacaagggccctgggatggagccaacctgggtattcacaacaggcctgacttgatactaagtgattagttttccaagttgtcccactgccattcaaagtcagcccttgagtgtatttgttctcagtcctaaccctggggccagagattggtccgaggttgagaattccttcctcctcatccttggtgttgctttctccaaatgattgttttagactagccaaaaatgccgtggcaaagagctcagaaatccaatttggataccaaaggtttctcatgttaatttctcagcccccaaagaagcatcttactcctgaaccttagacaggaagtattgtttcagtcacagaaagcttttctgggtacctctggttagcactttctactctctgatatttcctatgtacatagcttttattgttgtaaatcctttcttaatggttaaataggattgttagcaactatgggtttgcagttttctgagtaggtgagttttgaatatgggtaaatcagaataatgagacaacttgttaatctctttaatactaaaaataaattactcttctatttcagggacttaggtaatttaaaataaaccttcaatttatggtcttctgttttgaagctcatgggaaaattgtgatcaaaagggctatgggaagggcagaccccgccaatgatttctcttcacctgtcttaagattaaataaaaaagagtgtcctggca

SEQ ID NO: 450976 - DNA, 3611 bp, Homo sapiens
ctaacggctagtacgagccggggtaaatcggccgaggcctggacccctaccatggaggagaccatcaaagatccccccacatcagctgtcttgctggatcactgtcatttctctcaggtcatctttaacagtgtggagaagttctacatccctggaggggacgtcacatgtcattataccttcacccagcatttcatccctcgtcgaaaggattggattggcatctttagagtggggtggaagacaacccgtgagtattacaccttcatgtgggttactttgcccattgacctaaacaacaaatcagctaaacagcaggaagtccaattcaaagcttactacctgcccaaggatgatgagtattaccagttctgctatgtggatgaggatggtgtggtccggggagcaagtattcctttccaattccgtccagaaaatgaggaagacatcctggttgttaccactcagggagaggtggaagagattgagcagcacaacaaggagctttgcaaagaaaaccaggagctgaaggacagctgtatcagcctccagaagcagaactcagacatgcaggctgagctccaaaagaagcaggaggagctagaaaccctacagagcatcaataagaagttggaactgaaagtgaaagaacagaaggactattgggagacagagctgcttcaactgaaagaacaaaaccagaagatgtcctcagaaaatgagaagatgggaatcagagtggatcagcttcaggcccagctgtcaactcaagagaaagaaatggagaagcttgttcagggagatcaagataagacagagcagttagagcagctgaaaaaggaaaatgaccacctctttctcagtttaactgaacagaggaaggaccagaagaagctcgagcagacagtggagcaaatgaagcagaatgaaactactgcaatgaagaaacaacaggaattaatggatgaaaactttgacctgtcaaaaagactgagtgagaacgaaattatatgtaatgctctgcagagacagaaagagagattggaaggagaaaatgatcttttgaagagggagaacagcagattgctcagttacatgggtctggattttaattctttgccgtatcaagtacctacttcagatgaaggaggcgcaagacaaaatccaggacttgcctatggaaacccatattctggtatccaagaaagttcttcccccagcccgctctccatcaagaaatgccctatctgcaaagcagatgatatttgtgatcacaccttggagcaacagcagatgcagcccctttgtttcaattgtccaatttgtgacaagatcttcccagctacagagaagcagatctttgaagaccacgtgttctgccactctctctgagtatcccaacctcttggatgtatacagagattttatagaatagaacctatagcttctaccatgagttatatgagtcaagatcctgcctaacctgaaattattagggatttactcagccctgctgccgctaacagtggagttatgtcactgatctgaaggtcactgttaagggcttctgctgccatccttgtgggttgctacctttaagtcgcataactctagctgtatcatcctctcacctgtcattcttctgagggtctcagtacaagggccctgggatggagccaacctgggtattcacaacaggcctgacttgatactaagtgattagttttccaagttgtcccactgccattcaaagtcagcccttgagtgtatttgttctcagtcctaaccctggggccagagattggtccgaggttgagaattccttcctcctcatccttggtgttgctttctccaaatgattgttttagactagccaaaaatgccgtggcaaagagctcagaaatccaatttggataccaaaggtttctcatgttaatttctcagcccccaaagaagcatcttactcctgaaccttagacaggaagtattgtttcagtcacagaaagcttttctgggtacctctggttagcactttctactctctgatatttcctatgtacatagcttttattgttgtaaatcctttcttaatggttaaataggattgttagcaactatgggtttgcagttttctgagtaggtgagttttgaatatgggtaaatcagaataatgagacaacttgttaatctctttaatactaaaaataaattactcttctatttcagggacttaggtaatttaaaataaaccttcaatttatggtcttctgttttgaagctcatgggaaaattgtgatcaaaagggctatgggaagggcagaccccgccaatgatttctcttcacctgtcttaagattaaataaaaaagagtgtcctggcagttatcttgaggtggggaaggaggtgatgaaacattagtttgtgaaatccaaggccctggcttgctttctttctttttttttttttttttttttgaaacagtctctctctgtcacccaggctggcgtgcaatggcgcagttgactcactacagcctctgcctcccaggttcaagcgattctcatgccttagcctcccaagtagctgggattacaggtgtgtgccgcaatgcccagctaatttttgtgtttttagtagagacagggtttcactatgttggccaggctggtctcgaactcctggcctcacgtgatctgtccacttcagccgtccaaagtgctgggattacaagcgtgagccactgtgctgggcccgaggccctgacttcttgctgtaactttccatgcattttttttaaaaggagcagtgtggattttcgcaccctttgtgaactaagttcaatgcgctctatccaaatttgcctaattgaactataagaaagtaataattccattttctatcccctcagggactgaacaaatggaaataactcccaggcagtatcaggtggtcactacagagacttccacaaaaacttttgaatgatgtgaaacacgatgtcatgaataagggttgagccaactatagctctgtgttcctactgggctttccctaatgtggttgggagttatgccctagactaactgtattgtcctagtcacagctccttgctttgatttcatccttgataaaatgaagatgaaacttacactacttctccaagccttttgctgtcttaagaataagacctgagattaacactaaccctagaatagaaatgtaatagggagatggtaataaaggagtttttctggcacataccctccctacagaatttctgttgctccccagatccagtgaagaattgcagtttcatttattttgtaccagtcagctcttaattaagtacatgaatggagaggagcagtggtgcacataatccaaatcagtgaataccattttctggtgaattacccacccctttgcccctgctaccccgagggttaccatgattgtcaacagcagcaggagcccttccacagggcttggtaaaaaaaccagttgaggtgttaatgaccctttttgctgggtgtaaaacaaagcatctttaaccactgttcattaaacccagctgctcttaccaaggctttgaaggagaaatctggggttcc

SEQ ID NO: 450977 - DNA, 3649 bp, Homo sapiens
agaccccaatggagggttcttagatttccagcaagaaagaattcgaggtgaatccatagagtgagagcaagtttataaggacccctaccatggaggagaccatcaaagatccccccacatcagctgtcttgctggatcactgtcatttctctcaggtcatctttaacagtgtggagaagttctacatccctggaggggacgtcacatgtcattataccttcacccagcatttcatccctcgtcgaaaggattggattggcatctttagagtggggtggaagacaacccgtgagtattacaccttcatgtgggttactttgcccattgacctaaacaacaaatcagctaaacagcaggaagtccaattcaaagcttactacctgcccaaggatgatgagtattaccagttctgctatgtggatgaggatggtgtggtccggggagcaagtattcctttccaattccgtccagaaaatgaggaagacatcctggttgttaccactcagggagaggtggaagagattgagcagcacaacaaggagctttgcaaagaaaaccaggagctgaaggacagctgtatcagcctccagaagcagaactcagacatgcaggctgagctccaaaagaagcaggaggagctagaaaccctacagagcatcaataagaagttggaactgaaagtgaaagaacagaaggactattgggagacagagctgcttcaactgaaagaacaaaaccagaagatgtcctcagaaaatgagaagatgggaatcagagtggatcagcttcaggcccagctgtcaactcaagagaaagaaatggagaagcttgttcagggagatcaagataagacagagcagttagagcagctgaaaaaggaaaatgaccacctctttctcagtttaactgaacagaggaaggaccagaagaagctcgagcagacagtggagcaaatgaagcagaatgaaactactgcaatgaagaaacaacaggaattaatggatgaaaactttgacctgtcaaaaagactgagtgagaacgaaattatatgtaatgctctgcagagacagaaagagagattggaaggagaaaatgatcttttgaagagggagaacagcagattgctcagttacatgggtctggattttaattctttgccgtatcaagtacctacttcagatgaaggaggcgcaagacaaaatccaggacttgcctatggaaacccatattctggtatccaagaaagttcttcccccagcccgctctccatcaagaaatgccctatctgcaaagcagatgatatttgtgatcacaccttggagcaacagcagatgcagcccctttgtttcaattgtccaatttgtgacaagatcttcccagctacagagaagcagatctttgaagaccacgtgttctgccactctctctgagtatcccaacctcttggatgtatacagagattttatagaatagaacctatagcttctaccatgagttatatgagtcaagatcctgcctaacctgaaattattagggatttactcagccctgctgccgctaacagtggagttatgtcactgatctgaaggtcactgttaagggcttctgctgccatccttgtgggttgctacctttaagtcgcataactctagctgtatcatcctctcacctgtcattcttctgagggtctcagtacaagggccctgggatggagccaacctgggtattcacaacaggcctgacttgatactaagtgattagttttccaagttgtcccactgccattcaaagtcagcccttgagtgtatttgttctcagtcctaaccctggggccagagattggtccgaggttgagaattccttcctcctcatccttggtgttgctttctccaaatgattgttttagactagccaaaaatgccgtggcaaagagctcagaaatccaatttggataccaaaggtttctcatgttaatttctcagcccccaaagaagcatcttactcctgaaccttagacaggaagtattgtttcagtcacagaaagcttttctgggtacctctggttagcactttctactctctgatatttcctatgtacatagcttttattgttgtaaatcctttcttaatggttaaataggattgttagcaactatgggtttgcagttttctgagtaggtgagttttgaatatgggtaaatcagaataatgagacaacttgttaatctctttaatactaaaaataaattactcttctatttcagggacttaggtaatttaaaataaaccttcaatttatggtcttctgttttgaagctcatgggaaaattgtgatcaaaagggctatgggaagggcagaccccgccaatgatttctcttcacctgtcttaagattaaataaaaaagagtgtcctggcagttatcttgaggtggggaaggaggtgatgaaacattagtttgtgaaatccaaggccctggcttgctttctttctttttttttttttttttttttgaaacagtctctctctgtcacccaggctggcgtgcaatggcgcagttgactcactacagcctctgcctcccaggttcaagcgattctcatgccttagcctcccaagtagctgggattacaggtgtgtgccgcaatgcccagctaatttttgtgtttttagtagagacagggtttcactatgttggccaggctggtctcgaactcctggcctcacgtgatctgtccacttcagccgtccaaagtgctgggattacaagcgtgagccactgtgctgggcccgaggccctgacttcttgctgtaactttccatgcattttttttaaaaggagcagtgtggattttcgcaccctttgtgaactaagttcaatgcgctctatccaaatttgcctaattgaactataagaaagtaataattccattttctatcccctcagggactgaacaaatggaaataactcccaggcagtatcaggtggtcactacagagacttccacaaaaacttttgaatgatgtgaaacacgatgtcatgaataagggttgagccaactatagctctgtgttcctactgggctttccctaatgtggttgggagttatgccctagactaactgtattgtcctagtcacagctccttgctttgatttcatccttgataaaatgaagatgaaacttacactacttctccaagccttttgctgtcttaagaataagacctgagattaacactaaccctagaatagaaatgtaatagggagatggtaataaaggagtttttctggcacataccctccctacagaatttctgttgctccccagatccagtgaagaattgcagtttcatttattttgtaccagtcagctcttaattaagtacatgaatggagaggagcagtggtgcacataatccaaatcagtgaataccattttctggtgaattacccacccctttgcccctgctaccccgagggttaccatgattgtcaacagcagcaggagcccttccacagggcttggtaaaaaaaccagttgaggtgttaatgaccctttttgctgggtgtaaaacaaagcatctttaaccactgttcattaaacccagctgctcttaccaaggctttgaaggagaaatctggggttcc

SEQ ID NO: 450978 - DNA, 3596 bp, Homo sapiens
caggcgggtcgggctctcccttgggtgcttagccccgcccccgtcccactctgccctgttgctgtcgcgccgctgctggttgctgtccctggacccctaccatggaggagaccatcaaagatccccccacatcagctgtcttgctggatcactgtcatttctctcaggtcatctttaacagtgtggagaagttctacatccctggaggggacgtcacatgtcattataccttcacccagcatttcatccctcgtcgaaaggattggattggcatctttagagtggggtggaagacaacccgtgagtattacaccttcatgtgggttactttgcccattgacctaaacaacaaatcagctaaacagcaggaagtccaattcaaagcttactacctgcccaaggatgatgagtattaccagttctgctatgtggatgaggatggtgtggtccggggagcaagtattcctttccaattccgtccagaaaatgaggaagacatcctggttgttaccactcagggagaggtggaagagattgagcagcacaacaaggagctttgcaaagaaaaccaggagctgaaggacagctgtatcagcctccagaagcagaactcagacatgcaggctgagctccaaaagaagcaggaggagctagaaaccctacagagcatcaataagaagttggaactgaaagtgaaagaacagaaggactattgggagacagagctgcttcaactgaaagaacaaaaccagaagatgtcctcagaaaatgagaagatgggaatcagagtggatcagcttcaggcccagctgtcaactcaagagaaagaaatggagaagcttgttcagggagatcaagataagacagagcagttagagcagctgaaaaaggaaaatgaccacctctttctcagtttaactgaacagaggaaggaccagaagaagctcgagcagacagtggagcaaatgaagcagaatgaaactactgcaatgaagaaacaacaggaattaatggatgaaaactttgacctgtcaaaaagactgagtgagaacgaaattatatgtaatgctctgcagagacagaaagagagattggaaggagaaaatgatcttttgaagagggagaacagcagattgctcagttacatgggtctggattttaattctttgccgtatcaagtacctacttcagatgaaggaggcgcaagacctctccatcaagaaatgccctatctgcaaagcagatgatatttgtgatcacaccttggagcaacagcagatgcagcccctttgtttcaattgtccaatttgtgacaagatcttcccagctacagagaagcagatctttgaagaccacgtgttctgccactctctctgagtatcccaacctcttggatgtatacagagattttatagaatagaacctatagcttctaccatgagttatatgagtcaagatcctgcctaacctgaaattattagggatttactcagccctgctgccgctaacagtggagttatgtcactgatctgaaggtcactgttaagggcttctgctgccatccttgtgggttgctacctttaagtcgcataactctagctgtatcatcctctcacctgtcattcttctgagggtctcagtacaagggccctgggatggagccaacctgggtattcacaacaggcctgacttgatactaagtgattagttttccaagttgtcccactgccattcaaagtcagcccttgagtgtatttgttctcagtcctaaccctggggccagagattggtccgaggttgagaattccttcctcctcatccttggtgttgctttctccaaatgattgttttagactagccaaaaatgccgtggcaaagagctcagaaatccaatttggataccaaaggtttctcatgttaatttctcagcccccaaagaagcatcttactcctgaaccttagacaggaagtattgtttcagtcacagaaagcttttctgggtacctctggttagcactttctactctctgatatttcctatgtacatagcttttattgttgtaaatcctttcttaatggttaaataggattgttagcaactatgggtttgcagttttctgagtaggtgagttttgaatatgggtaaatcagaataatgagacaacttgttaatctctttaatactaaaaataaattactcttctatttcagggacttaggtaatttaaaataaaccttcaatttatggtcttctgttttgaagctcatgggaaaattgtgatcaaaagggctatgggaagggcagaccccgccaatgatttctcttcacctgtcttaagattaaataaaaaagagtgtcctggcagttatcttgaggtggggaaggaggtgatgaaacattagtttgtgaaatccaaggccctggcttgctttctttctttttttttttttttttttttgaaacagtctctctctgtcacccaggctggcgtgcaatggcgcagttgactcactacagcctctgcctcccaggttcaagcgattctcatgccttagcctcccaagtagctgggattacaggtgtgtgccgcaatgcccagctaatttttgtgtttttagtagagacagggtttcactatgttggccaggctggtctcgaactcctggcctcacgtgatctgtccacttcagccgtccaaagtgctgggattacaagcgtgagccactgtgctgggcccgaggccctgacttcttgctgtaactttccatgcattttttttaaaaggagcagtgtggattttcgcaccctttgtgaactaagttcaatgcgctctatccaaatttgcctaattgaactataagaaagtaataattccattttctatcccctcagggactgaacaaatggaaataactcccaggcagtatcaggtggtcactacagagacttccacaaaaacttttgaatgatgtgaaacacgatgtcatgaataagggttgagccaactatagctctgtgttcctactgggctttccctaatgtggttgggagttatgccctagactaactgtattgtcctagtcacagctccttgctttgatttcatccttgataaaatgaagatgaaacttacactacttctccaagccttttgctgtcttaagaataagacctgagattaacactaaccctagaatagaaatgtaatagggagatggtaataaaggagtttttctggcacataccctccctacagaatttctgttgctccccagatccagtgaagaattgcagtttcatttattttgtaccagtcagctcttaattaagtacatgaatggagaggagcagtggtgcacataatccaaatcagtgaataccattttctggtgaattacccacccctttgcccctgctaccccgagggttaccatgattgtcaacagcagcaggagcccttccacagggcttggtaaaaaaaccagttgaggtgttaatgaccctttttgctgggtgtaaaacaaagcatctttaaccactgttcattaaacccagctgctcttaccaaggctttgaaggagaaatctggggttcc

SEQ ID NO: 450979 - DNA, 3732 bp, Homo sapiens
caggcgggtcgggctctcccttgggtgcttagccccgcccccgtcccactctgccctgttgctgtcgcgccgctgctggttgctgtccctggacccctaccatggaggagaccatcaaagatccccccacatcagctgtcttgctggatcactgtcatttctctcaggtcatctttaacagtgtggagaagttctacatccctggaggggacgtcacatgtcattataccttcacccagcatttcatccctcgtcgaaaggattggattggcatctttagagcattaaatgtttccaagacaaattggaacaagaactactcaaatggaggagccaaggacagaaattgcaggtggggtggaagacaacccgtgagtattacaccttcatgtgggttactttgcccattgacctaaacaacaaatcagctaaacagcaggaagtccaattcaaagcttactacctgcccaaggatgatgagtattaccagttctgctatgtggatgaggatggtgtggtccggggagcaagtattcctttccaattccgtccagaaaatgaggaagacatcctggttgttaccactcagggagaggtggaagagattgagcagcacaacaaggagctttgcaaagaaaaccaggagctgaaggacagctgtatcagcctccagaagcagaactcagacatgcaggctgagctccaaaagaagcaggaggagctagaaaccctacagagcatcaataagaagttggaactgaaagtgaaagaacagaaggactattgggagacagagctgcttcaactgaaagaacaaaaccagaagatgtcctcagaaaatgagaagatgggaatcagagtggatcagcttcaggcccagctgtcaactcaagagaaagaaatggagaagcttgttcagggagatcaagataagacagagcagttagagcagctgaaaaaggaaaatgaccacctctttctcagtttaactgaacagaggaaggaccagaagaagctcgagcagacagtggagcaaatgaagcagaatgaaactactgcaatgaagaaacaacaggaattaatggatgaaaactttgacctgtcaaaaagactgagtgagaacgaaattatatgtaatgctctgcagagacagaaagagagattggaaggagaaaatgatcttttgaagagggagaacagcagattgctcagttacatgggtctggattttaattctttgccgtatcaagtacctacttcagatgaaggaggcgcaagacaaaatccaggacttgcctatggaaacccatattctggtatccaagaaagttcttcccccagcccgctctccatcaagaaatgccctatctgcaaagcagatgatatttgtgatcacaccttggagcaacagcagatgcagcccctttgtttcaattgtccaatttgtgacaagatcttcccagctacagagaagcagatctttgaagaccacgtgttctgccactctctctgagtatcccaacctcttggatgtatacagagattttatagaatagaacctatagcttctaccatgagttatatgagtcaagatcctgcctaacctgaaattattagggatttactcagccctgctgccgctaacagtggagttatgtcactgatctgaaggtcactgttaagggcttctgctgccatccttgtgggttgctacctttaagtcgcataactctagctgtatcatcctctcacctgtcattcttctgagggtctcagtacaagggccctgggatggagccaacctgggtattcacaacaggcctgacttgatactaagtgattagttttccaagttgtcccactgccattcaaagtcagcccttgagtgtatttgttctcagtcctaaccctggggccagagattggtccgaggttgagaattccttcctcctcatccttggtgttgctttctccaaatgattgttttagactagccaaaaatgccgtggcaaagagctcagaaatccaatttggataccaaaggtttctcatgttaatttctcagcccccaaagaagcatcttactcctgaaccttagacaggaagtattgtttcagtcacagaaagcttttctgggtacctctggttagcactttctactctctgatatttcctatgtacatagcttttattgttgtaaatcctttcttaatggttaaataggattgttagcaactatgggtttgcagttttctgagtaggtgagttttgaatatgggtaaatcagaataatgagacaacttgttaatctctttaatactaaaaataaattactcttctatttcagggacttaggtaatttaaaataaaccttcaatttatggtcttctgttttgaagctcatgggaaaattgtgatcaaaagggctatgggaagggcagaccccgccaatgatttctcttcacctgtcttaagattaaataaaaaagagtgtcctggcagttatcttgaggtggggaaggaggtgatgaaacattagtttgtgaaatccaaggccctggcttgctttctttctttttttttttttttttttttgaaacagtctctctctgtcacccaggctggcgtgcaatggcgcagttgactcactacagcctctgcctcccaggttcaagcgattctcatgccttagcctcccaagtagctgggattacaggtgtgtgccgcaatgcccagctaatttttgtgtttttagtagagacagggtttcactatgttggccaggctggtctcgaactcctggcctcacgtgatctgtccacttcagccgtccaaagtgctgggattacaagcgtgagccactgtgctgggcccgaggccctgacttcttgctgtaactttccatgcattttttttaaaaggagcagtgtggattttcgcaccctttgtgaactaagttcaatgcgctctatccaaatttgcctaattgaactataagaaagtaataattccattttctatcccctcagggactgaacaaatggaaataactcccaggcagtatcaggtggtcactacagagacttccacaaaaacttttgaatgatgtgaaacacgatgtcatgaataagggttgagccaactatagctctgtgttcctactgggctttccctaatgtggttgggagttatgccctagactaactgtattgtcctagtcacagctccttgctttgatttcatccttgataaaatgaagatgaaacttacactacttctccaagccttttgctgtcttaagaataagacctgagattaacactaaccctagaatagaaatgtaatagggagatggtaataaaggagtttttctggcacataccctccctacagaatttctgttgctccccagatccagtgaagaattgcagtttcatttattttgtaccagtcagctcttaattaagtacatgaatggagaggagcagtggtgcacataatccaaatcagtgaataccattttctggtgaattacccacccctttgcccctgctaccccgagggttaccatgattgtcaacagcagcaggagcccttccacagggcttggtaaaaaaaccagttgaggtgttaatgaccctttttgctgggtgtaaaacaaagcatctttaaccactgttcattaaacccagctgctcttaccaaggctttgaaggagaaatctggggttcc

SEQ ID NO: 450980 - DNA, 4029 bp, Homo sapiens
tctgaaggccctggagcccctcccgcggcccgggagggttgcggggcagttttgtcttgcggagggcagcgctgcagtgctgtgtggcagggtgggaggctcctcgggaagaagtgacacccctggcggcggcgagggtcttgaggcggcggctgccgccccacgggtcgtggcgtcccgtcccctcccgcgggcccaggctgtggtggttccgtaatccctcgcctggatgtcatcgccgttggcttcgaggcggaggtggagccttgttgcgtcaccctgagcaagttactttctttttgggcctcagtgtccccctttacgagtaggtttgatccctgaagcgccttgccttttgcatgctgcagctgtcggagaagacgttctaggcaggaggaaagacggtgtcgtgacctgcctctacagttaatccattgcccctccaccactgacccagcttagtttgggagctaatgttcccactcgtatattatttcaaccccactggacgtgttaactcttttctatcacttggattcttgcttcacatgcaagccaacaagtgaccatggttggagctgagtaaaatatggataatataacttattctattattggaaacaccattgcaagtaaaggactttatgtggtggggtggaagacaacccgtgagtattacaccttcatgtgggttactttgcccattgacctaaacaacaaatcagctaaacagcaggaagtccaattcaaagcttactacctgcccaaggatgatgagtattaccagttctgctatgtggatgaggatggtgtggtccggggagcaagtattcctttccaattccgtccagaaaatgaggaagacatcctggttgttaccactcagggagaggtggaagagattgagcagcacaacaaggagctttgcaaagaaaaccaggagctgaaggacagctgtatcagcctccagaagcagaactcagacatgcaggctgagctccaaaagaagcaggaggagctagaaaccctacagagcatcaataagaagttggaactgaaagtgaaagaacagaaggactattgggagacagagctgcttcaactgaaagaacaaaaccagaagatgtcctcagaaaatgagaagatgggaatcagagtggatcagcttcaggcccagctgtcaactcaagagaaagaaatggagaagcttgttcagggagatcaagataagacagagcagttagagcagctgaaaaaggaaaatgaccacctctttctcagtttaactgaacagaggaaggaccagaagaagctcgagcagacagtggagcaaatgaagcagaatgaaactactgcaatgaagaaacaacaggaattaatggatgaaaactttgacctgtcaaaaagactgagtgagaacgaaattatatgtaatgctctgcagagacagaaagagagattggaaggagaaaatgatcttttgaagagggagaacagcagattgctcagttacatgggtctggattttaattctttgccgtatcaagtacctacttcagatgaaggaggcgcaagacaaaatccaggacttgcctatggaaacccatattctggtatccaagaaagttcttcccccagcccgctctccatcaagaaatgccctatctgcaaagcagatgatatttgtgatcacaccttggagcaacagcagatgcagcccctttgtttcaattgtccaatttgtgacaagatcttcccagctacagagaagcagatctttgaagaccacgtgttctgccactctctctgagtatcccaacctcttggatgtatacagagattttatagaatagaacctatagcttctaccatgagttatatgagtcaagatcctgcctaacctgaaattattagggatttactcagccctgctgccgctaacagtggagttatgtcactgatctgaaggtcactgttaagggcttctgctgccatccttgtgggttgctacctttaagtcgcataactctagctgtatcatcctctcacctgtcattcttctgagggtctcagtacaagggccctgggatggagccaacctgggtattcacaacaggcctgacttgatactaagtgattagttttccaagttgtcccactgccattcaaagtcagcccttgagtgtatttgttctcagtcctaaccctggggccagagattggtccgaggttgagaattccttcctcctcatccttggtgttgctttctccaaatgattgttttagactagccaaaaatgccgtggcaaagagctcagaaatccaatttggataccaaaggtttctcatgttaatttctcagcccccaaagaagcatcttactcctgaaccttagacaggaagtattgtttcagtcacagaaagcttttctgggtacctctggttagcactttctactctctgatatttcctatgtacatagcttttattgttgtaaatcctttcttaatggttaaataggattgttagcaactatgggtttgcagttttctgagtaggtgagttttgaatatgggtaaatcagaataatgagacaacttgttaatctctttaatactaaaaataaattactcttctatttcagggacttaggtaatttaaaataaaccttcaatttatggtcttctgttttgaagctcatgggaaaattgtgatcaaaagggctatgggaagggcagaccccgccaatgatttctcttcacctgtcttaagattaaataaaaaagagtgtcctggcagttatcttgaggtggggaaggaggtgatgaaacattagtttgtgaaatccaaggccctggcttgctttctttctttttttttttttttttttttgaaacagtctctctctgtcacccaggctggcgtgcaatggcgcagttgactcactacagcctctgcctcccaggttcaagcgattctcatgccttagcctcccaagtagctgggattacaggtgtgtgccgcaatgcccagctaatttttgtgtttttagtagagacagggtttcactatgttggccaggctggtctcgaactcctggcctcacgtgatctgtccacttcagccgtccaaagtgctgggattacaagcgtgagccactgtgctgggcccgaggccctgacttcttgctgtaactttccatgcattttttttaaaaggagcagtgtggattttcgcaccctttgtgaactaagttcaatgcgctctatccaaatttgcctaattgaactataagaaagtaataattccattttctatcccctcagggactgaacaaatggaaataactcccaggcagtatcaggtggtcactacagagacttccacaaaaacttttgaatgatgtgaaacacgatgtcatgaataagggttgagccaactatagctctgtgttcctactgggctttccctaatgtggttgggagttatgccctagactaactgtattgtcctagtcacagctccttgctttgatttcatccttgataaaatgaagatgaaacttacactacttctccaagccttttgctgtcttaagaataagacctgagattaacactaaccctagaatagaaatgtaatagggagatggtaataaaggagtttttctggcacataccctccctacagaatttctgttgctccccagatccagtgaagaattgcagtttcatttattttgtaccagtcagctcttaattaagtacatgaatggagaggagcagtggtgcacataatccaaatcagtgaataccattttctggtgaattacccacccctttgcccctgctaccccgagggttaccatgattgtcaacagcagcaggagcccttccacagggcttggtaaaaaaaccagttgaggtgttaatgaccctttttgctgggtgtaaaacaaagcatctttaaccactgttcattaaacccagctgctcttaccaaggctttgaaggagaaatctggggttcc

SEQ ID NO: 450981 - DNA, 3125 bp, Homo sapiens
gaagacatcctggttgttaccactcagggagaggtggaagagattgacagctgtatcagcctccagaagcagaactcagacatgcaggctgagctccaaaagaagcaggaggagctagaaaccctacagagcatcaataagaagttggaactgaaagtgaaagaacagaaggactattgggagacagagctgcttcaactgaaagaacaaaaccagaagatgtcctcagaaaatgagaagatgggaatcagagtggatcagcttcaggcccagctgtcaactcaagagaaagaaatggagaagcttgttcagggagatcaagataagacagagcagttagagcagctgaaaaaggaaaatgaccacctctttctcagtttaactgaacagaggaaggaccagaagaagctcgagcagacagtggagcaaatgaagcagaatgaaactactgcaatgaagaaacaacaggaattaatggatgaaaactttgacctgtcaaaaagactgagtgagaacgaaattatatgtaatgctctgcagagacagaaagagagattggaaggagaaaatgatcttttgaagagggagaacagcagattgctcagttacatgggtctggattttaattctttgccgtatcaagtacctacttcagatgaaggaggcgcaagacaaaatccaggacttgcctatggaaacccatattctggtatccaagaaagttcttcccccagcccgctctccatcaagaaatgccctatctgcaaagcagatgatatttgtgatcacaccttggagcaacagcagatgcagcccctttgtttcaattgtccaatttgtgacaagatcttcccagctacagagaagcagatctttgaagaccacgtgttctgccactctctctgagtatcccaacctcttggatgtatacagagattttatagaatagaacctatagcttctaccatgagttatatgagtcaagatcctgcctaacctgaaattattagggatttactcagccctgctgccgctaacagtggagttatgtcactgatctgaaggtcactgttaagggcttctgctgccatccttgtgggttgctacctttaagtcgcataactctagctgtatcatcctctcacctgtcattcttctgagggtctcagtacaagggccctgggatggagccaacctgggtattcacaacaggcctgacttgatactaagtgattagttttccaagttgtcccactgccattcaaagtcagcccttgagtgtatttgttctcagtcctaaccctggggccagagattggtccgaggttgagaattccttcctcctcatccttggtgttgctttctccaaatgattgttttagactagccaaaaatgccgtggcaaagagctcagaaatccaatttggataccaaaggtttctcatgttaatttctcagcccccaaagaagcatcttactcctgaaccttagacaggaagtattgtttcagtcacagaaagcttttctgggtacctctggttagcactttctactctctgatatttcctatgtacatagcttttattgttgtaaatcctttcttaatggttaaataggattgttagcaactatgggtttgcagttttctgagtaggtgagttttgaatatgggtaaatcagaataatgagacaacttgttaatctctttaatactaaaaataaattactcttctatttcagggacttaggtaatttaaaataaaccttcaatttatggtcttctgttttgaagctcatgggaaaattgtgatcaaaagggctatgggaagggcagaccccgccaatgatttctcttcacctgtcttaagattaaataaaaaagagtgtcctggcagttatcttgaggtggggaaggaggtgatgaaacattagtttgtgaaatccaaggccctggcttgctttctttctttttttttttttttttttttgaaacagtctctctctgtcacccaggctggcgtgcaatggcgcagttgactcactacagcctctgcctcccaggttcaagcgattctcatgccttagcctcccaagtagctgggattacaggtgtgtgccgcaatgcccagctaatttttgtgtttttagtagagacagggtttcactatgttggccaggctggtctcgaactcctggcctcacgtgatctgtccacttcagccgtccaaagtgctgggattacaagcgtgagccactgtgctgggcccgaggccctgacttcttgctgtaactttccatgcattttttttaaaaggagcagtgtggattttcgcaccctttgtgaactaagttcaatgcgctctatccaaatttgcctaattgaactataagaaagtaataattccattttctatcccctcagggactgaacaaatggaaataactcccaggcagtatcaggtggtcactacagagacttccacaaaaacttttgaatgatgtgaaacacgatgtcatgaataagggttgagccaactatagctctgtgttcctactgggctttccctaatgtggttgggagttatgccctagactaactgtattgtcctagtcacagctccttgctttgatttcatccttgataaaatgaagatgaaacttacactacttctccaagccttttgctgtcttaagaataagacctgagattaacactaaccctagaatagaaatgtaatagggagatggtaataaaggagtttttctggcacataccctccctacagaatttctgttgctccccagatccagtgaagaattgcagtttcatttattttgtaccagtcagctcttaattaagtacatgaatggagaggagcagtggtgcacataatccaaatcagtgaataccattttctggtgaattacccacccctttgcccctgctaccccgagggttaccatgattgtcaacagcagcaggagcccttccacagggcttggtaaaaaaaccagttgaggtgttaatgaccctttttgctgggtgtaaaacaaagcatctttaaccactgttcattaaacccagctgctcttaccaaggctttgaaggagaaatctggggttcc

SEQ ID NO: 450982 - DNA, 2776 bp, Homo sapiens
atcgcgagcggcgctcgcgatgactaggtttaactgaacagaggaaggaccagaagaagctcgagcagacagtggagcaaatgaagcagaatgaaactactgcaatgaagaaacaacaggaattaatggatgaaaactttgacctgtcaaaaagactgagtgagaacgaaattatatgtaatgctctgcagagacagaaagagagattggaaggagaaaatgatcttttgaagagggagaacagcagattgctcagttacatgggtctggattttaattctttgccgtatcaagtacctacttcagatgaaggaggcgcaagacaaaatccaggacttgcctatggaaacccatattctggtatccaagaaagttcttcccccagcccgctctccatcaagaaatgccctatctgcaaagcagatgatatttgtgatcacaccttggagcaacagcagatgcagcccctttgtttcaattgtccaatttgtgacaagatcttcccagctacagagaagcagatctttgaagaccacgtgttctgccactctctctgagtatcccaacctcttggatgtatacagagattttatagaatagaacctatagcttctaccatgagttatatgagtcaagatcctgcctaacctgaaattattagggatttactcagccctgctgccgctaacagtggagttatgtcactgatctgaaggtcactgttaagggcttctgctgccatccttgtgggttgctacctttaagtcgcataactctagctgtatcatcctctcacctgtcattcttctgagggtctcagtacaagggccctgggatggagccaacctgggtattcacaacaggcctgacttgatactaagtgattagttttccaagttgtcccactgccattcaaagtcagcccttgagtgtatttgttctcagtcctaaccctggggccagagattggtccgaggttgagaattccttcctcctcatccttggtgttgctttctccaaatgattgttttagactagccaaaaatgccgtggcaaagagctcagaaatccaatttggataccaaaggtttctcatgttaatttctcagcccccaaagaagcatcttactcctgaaccttagacaggaagtattgtttcagtcacagaaagcttttctgggtacctctggttagcactttctactctctgatatttcctatgtacatagcttttattgttgtaaatcctttcttaatggttaaataggattgttagcaactatgggtttgcagttttctgagtaggtgagttttgaatatgggtaaatcagaataatgagacaacttgttaatctctttaatactaaaaataaattactcttctatttcagggacttaggtaatttaaaataaaccttcaatttatggtcttctgttttgaagctcatgggaaaattgtgatcaaaagggctatgggaagggcagaccccgccaatgatttctcttcacctgtcttaagattaaataaaaaagagtgtcctggcagttatcttgaggtggggaaggaggtgatgaaacattagtttgtgaaatccaaggccctggcttgctttctttctttttttttttttttttttttgaaacagtctctctctgtcacccaggctggcgtgcaatggcgcagttgactcactacagcctctgcctcccaggttcaagcgattctcatgccttagcctcccaagtagctgggattacaggtgtgtgccgcaatgcccagctaatttttgtgtttttagtagagacagggtttcactatgttggccaggctggtctcgaactcctggcctcacgtgatctgtccacttcagccgtccaaagtgctgggattacaagcgtgagccactgtgctgggcccgaggccctgacttcttgctgtaactttccatgcattttttttaaaaggagcagtgtggattttcgcaccctttgtgaactaagttcaatgcgctctatccaaatttgcctaattgaactataagaaagtaataattccattttctatcccctcagggactgaacaaatggaaataactcccaggcagtatcaggtggtcactacagagacttccacaaaaacttttgaatgatgtgaaacacgatgtcatgaataagggttgagccaactatagctctgtgttcctactgggctttccctaatgtggttgggagttatgccctagactaactgtattgtcctagtcacagctccttgctttgatttcatccttgataaaatgaagatgaaacttacactacttctccaagccttttgctgtcttaagaataagacctgagattaacactaaccctagaatagaaatgtaatagggagatggtaataaaggagtttttctggcacataccctccctacagaatttctgttgctccccagatccagtgaagaattgcagtttcatttattttgtaccagtcagctcttaattaagtacatgaatggagaggagcagtggtgcacataatccaaatcagtgaataccattttctggtgaattacccacccctttgcccctgctaccccgagggttaccatgattgtcaacagcagcaggagcccttccacagggcttggtaaaaaaaccagttgaggtgttaatgaccctttttgctgggtgtaaaacaaagcatctttaaccactgttcattaaacccagctgctcttaccaaggctttgaaggagaaatctggggttcc

SEQ ID NO: 450983 - DNA, 3776 bp, Homo sapiens
cagatcagccaactcggggcggctgcactggtaggtgacagagataagggggcccaggaaagcaagaggtgcaaaggttagtggttcttagaccaagtccagaaaatggtacacccttgttaaggtgagaaagttatctttgcactaaaaagagggatgtagtgtatggccagaaactagcatgggggtccctggaaatactggccccaacttagccacaggtctcagggaaggtttttgtaactatcaagcaggtttctgtgcagactcagagagccctttcttatttctgccttttgaggaagtgaagcaggactagaagagccatcaggagccaacggggatgggaagcaaggagcctgcagtcagcattgtcactgggtagccccctctggcattactacctcagggtcggctagacatgcacagcagtttgggcaccagcattcaaataaaaaatcttggatgaaaaaccacaactagtaggcttagcttaagtgtgtttgtgaggtatgcacatgtgtatgtatgcaggtagaagatgggaagctctgaagcatgaaaccagttaggtcaacccatcacactgggttgcttatggccccagtctgagctccttgtatccttggacaaatgccttcctgtgttccctcttccttcatgtaacttgagccgagatgcctattctcacactgtaggaaggaatcacaccaacccaaacctaagtgcttcaggcttcgctgagtgagacgtttattcaaaacaaagattattgttttcatggttaggtgggattcaacaaggtttcatttatccctaattctgataagtcagtcttgagattttccccaaggttgctttttccctccttggtcacttataccctcagctaaaccaaaaaaaaaaaaaaaaaaaaaaattggcatcttgatgccagctcaggccttcaggtgtctttttaagtcactttaatttagcaccctgcccatagtaccatttcttcctcccagttgcgttctcctccatctcagtctccccgctttgcaatgccagattctctacaatttctcaccttgtacccagactgcaatatgtgatcctaatcctaattttttttattgttgacaggatgaaaactttgacctgtcaaaaagactgagtgagaacgaaattatatgtaatgctctgcagagacagaaagagagattggaaggagaaaatgatcttttgaagagggagaacagcagattgctcagttacatgggtctggattttaattctttgccgtatcaagtacctacttcagatgaaggaggcgcaagacaaaatccaggacttgcctatggaaacccatattctggtatccaagaaagttcttcccccagcccgctctccatcaagaaatgccctatctgcaaagcagatgatatttgtgatcacaccttggagcaacagcagatgcagcccctttgtttcaattgtccaatttgtgacaagatcttcccagctacagagaagcagatctttgaagaccacgtgttctgccactctctctgagtatcccaacctcttggatgtatacagagattttatagaatagaacctatagcttctaccatgagttatatgagtcaagatcctgcctaacctgaaattattagggatttactcagccctgctgccgctaacagtggagttatgtcactgatctgaaggtcactgttaagggcttctgctgccatccttgtgggttgctacctttaagtcgcataactctagctgtatcatcctctcacctgtcattcttctgagggtctcagtacaagggccctgggatggagccaacctgggtattcacaacaggcctgacttgatactaagtgattagttttccaagttgtcccactgccattcaaagtcagcccttgagtgtatttgttctcagtcctaaccctggggccagagattggtccgaggttgagaattccttcctcctcatccttggtgttgctttctccaaatgattgttttagactagccaaaaatgccgtggcaaagagctcagaaatccaatttggataccaaaggtttctcatgttaatttctcagcccccaaagaagcatcttactcctgaaccttagacaggaagtattgtttcagtcacagaaagcttttctgggtacctctggttagcactttctactctctgatatttcctatgtacatagcttttattgttgtaaatcctttcttaatggttaaataggattgttagcaactatgggtttgcagttttctgagtaggtgagttttgaatatgggtaaatcagaataatgagacaacttgttaatctctttaatactaaaaataaattactcttctatttcagggacttaggtaatttaaaataaaccttcaatttatggtcttctgttttgaagctcatgggaaaattgtgatcaaaagggctatgggaagggcagaccccgccaatgatttctcttcacctgtcttaagattaaataaaaaagagtgtcctggcagttatcttgaggtggggaaggaggtgatgaaacattagtttgtgaaatccaaggccctggcttgctttctttctttttttttttttttttttttgaaacagtctctctctgtcacccaggctggcgtgcaatggcgcagttgactcactacagcctctgcctcccaggttcaagcgattctcatgccttagcctcccaagtagctgggattacaggtgtgtgccgcaatgcccagctaatttttgtgtttttagtagagacagggtttcactatgttggccaggctggtctcgaactcctggcctcacgtgatctgtccacttcagccgtccaaagtgctgggattacaagcgtgagccactgtgctgggcccgaggccctgacttcttgctgtaactttccatgcattttttttaaaaggagcagtgtggattttcgcaccctttgtgaactaagttcaatgcgctctatccaaatttgcctaattgaactataagaaagtaataattccattttctatcccctcagggactgaacaaatggaaataactcccaggcagtatcaggtggtcactacagagacttccacaaaaacttttgaatgatgtgaaacacgatgtcatgaataagggttgagccaactatagctctgtgttcctactgggctttccctaatgtggttgggagttatgccctagactaactgtattgtcctagtcacagctccttgctttgatttcatccttgataaaatgaagatgaaacttacactacttctccaagccttttgctgtcttaagaataagacctgagattaacactaaccctagaatagaaatgtaatagggagatggtaataaaggagtttttctggcacataccctccctacagaatttctgttgctccccagatccagtgaagaattgcagtttcatttattttgtaccagtcagctcttaattaagtacatgaatggagaggagcagtggtgcacataatccaaatcagtgaataccattttctggtgaattacccacccctttgcccctgctaccccgagggttaccatgattgtcaacagcagcaggagcccttccacagggcttggtaaaaaaaccagttgaggtgttaatgaccctttttgctgggtgtaaaacaaagcatctttaaccactgttcattaaacccagctgctcttaccaaggctttgaaggagaaatctggggttcc

SEQ ID NO: 450984 - DNA, 3479 bp, Homo sapiens
cctggagaggcacaggaggacgtgattccatcaggagccaacggggatgggaagcaaggagcctgcagtcagcattgtcactgggtagccccctctggcattactacctcagggtcggctagacatgcacagcagtttgggcaccagcattcaaataaaaaatcttggatgaaaaaccacaactagtaggcttagcttaagtgtgtttgtgaggtatgcacatgtgtatgtatgcaggtagaagatgggaagctctgaagcatgaaaccagttaggtcaacccatcacactgggttgcttatggccccagtctgagctccttgtatccttggacaaatgccttcctgtgttccctcttccttcatgtaacttgagccgagatgcctattctcacactgtaggaaggaatcacaccaacccaaacctaagtgcttcaggcttcgctgagtgagacgtttattcaaaacaaagattattgttttcatggttaggtgggattcaacaaggtttcatttatccctaattctgataagtcagtcttgagattttccccaaggttgctttttccctccttggtcacttataccctcagctaaaccaaaaaaaaaaaaaaaaaaaaaaattggcatcttgatgccagctcaggccttcaggtgtctttttaagtcactttaatttagcaccctgcccatagtaccatttcttcctcccagttgcgttctcctccatctcagtctccccgctttgcaatgccagattctctacaatttctcaccttgtacccagactgcaatatgtgatcctaatcctaattttttttattgttgacaggatgaaaactttgacctgtcaaaaagactgagtgagaacgaaattatatgtaatgctctgcagagacagaaagagagattggaaggagaaaatgatcttttgaagagggagaacagcagattgctcagttacatgggtctggattttaattctttgccgtatcaagtacctacttcagatgaaggaggcgcaagacaaaatccaggacttgcctatggaaacccatattctggtatccaagaaagttcttcccccagcccgctctccatcaagaaatgccctatctgcaaagcagatgatatttgtgatcacaccttggagcaacagcagatgcagcccctttgtttcaattgtccaatttgtgacaagatcttcccagctacagagaagcagatctttgaagaccacgtgttctgccactctctctgagtatcccaacctcttggatgtatacagagattttatagaatagaacctatagcttctaccatgagttatatgagtcaagatcctgcctaacctgaaattattagggatttactcagccctgctgccgctaacagtggagttatgtcactgatctgaaggtcactgttaagggcttctgctgccatccttgtgggttgctacctttaagtcgcataactctagctgtatcatcctctcacctgtcattcttctgagggtctcagtacaagggccctgggatggagccaacctgggtattcacaacaggcctgacttgatactaagtgattagttttccaagttgtcccactgccattcaaagtcagcccttgagtgtatttgttctcagtcctaaccctggggccagagattggtccgaggttgagaattccttcctcctcatccttggtgttgctttctccaaatgattgttttagactagccaaaaatgccgtggcaaagagctcagaaatccaatttggataccaaaggtttctcatgttaatttctcagcccccaaagaagcatcttactcctgaaccttagacaggaagtattgtttcagtcacagaaagcttttctgggtacctctggttagcactttctactctctgatatttcctatgtacatagcttttattgttgtaaatcctttcttaatggttaaataggattgttagcaactatgggtttgcagttttctgagtaggtgagttttgaatatgggtaaatcagaataatgagacaacttgttaatctctttaatactaaaaataaattactcttctatttcagggacttaggtaatttaaaataaaccttcaatttatggtcttctgttttgaagctcatgggaaaattgtgatcaaaagggctatgggaagggcagaccccgccaatgatttctcttcacctgtcttaagattaaataaaaaagagtgtcctggcagttatcttgaggtggggaaggaggtgatgaaacattagtttgtgaaatccaaggccctggcttgctttctttctttttttttttttttttttttgaaacagtctctctctgtcacccaggctggcgtgcaatggcgcagttgactcactacagcctctgcctcccaggttcaagcgattctcatgccttagcctcccaagtagctgggattacaggtgtgtgccgcaatgcccagctaatttttgtgtttttagtagagacagggtttcactatgttggccaggctggtctcgaactcctggcctcacgtgatctgtccacttcagccgtccaaagtgctgggattacaagcgtgagccactgtgctgggcccgaggccctgacttcttgctgtaactttccatgcattttttttaaaaggagcagtgtggattttcgcaccctttgtgaactaagttcaatgcgctctatccaaatttgcctaattgaactataagaaagtaataattccattttctatcccctcagggactgaacaaatggaaataactcccaggcagtatcaggtggtcactacagagacttccacaaaaacttttgaatgatgtgaaacacgatgtcatgaataagggttgagccaactatagctctgtgttcctactgggctttccctaatgtggttgggagttatgccctagactaactgtattgtcctagtcacagctccttgctttgatttcatccttgataaaatgaagatgaaacttacactacttctccaagccttttgctgtcttaagaataagacctgagattaacactaaccctagaatagaaatgtaatagggagatggtaataaaggagtttttctggcacataccctccctacagaatttctgttgctccccagatccagtgaagaattgcagtttcatttattttgtaccagtcagctcttaattaagtacatgaatggagaggagcagtggtgcacataatccaaatcagtgaataccattttctggtgaattacccacccctttgcccctgctaccccgagggttaccatgattgtcaacagcagcaggagcccttccacagggcttggtaaaaaaaccagttgaggtgttaatgaccctttttgctgggtgtaaaacaaagcatctttaaccactgttcattaaacccagctgctcttaccaaggctttgaaggagaaatctggggttcc

SEQ ID NO: 450985 - DNA, 2006 bp, Homo sapiens
caggcgggtcgggctctcccttgggtgcttagccccgcccccgtcccactctgccctgttgctgtcgcgccgctgctggttgctgtccctggacccctaccatggaggagaccatcaaagatccccccacatcagctgtcttgctggatcactgtcatttctctcaggtcatctttaacagtgtggagaagttctacatccctggaggggacgtcacatgtcattataccttcacccagcatttcatccctcgtcgaaaggattggattggcatctttagagtggggtggaagacaacccgtgagtattacaccttcatgtgggttactttgcccattgacctaaacaacaaatcagctaaacagcaggaagtccaattcaaagcttactacctgcccaaggatgatgagtattaccagttctgctatgtggatgaggatggtgtggtccggggagcaagtattcctttccaattccgtccagaaaatgaggaagacatcctggttgttaccactcagggagaggtggaagagattgagcagcacaacaaggagctttgcaaagaaaaccaggagctgaaggacagctgtatcagcctccagaagcagaactcagacatgcaggctgagctccaaaagaagcaggaggagctagaaaccctacagagcatcaataagaagttggaactgaaagtgaaagaacagaaggactattgggagacagagctgcttcaactgaaagaacaaaaccagaagatgtcctcagaaaatgagaagatgggaatcagagtggatcagcttcaggcccagctgtcaactcaagagaaagaaatggagaagcttgttcagggagatcaagataagacagagcagttagagcagctgaaaaaggaaaatgaccacctctttctcagtttaactgaacagaggaaggaccagaagaagctcgagcagacagtggagcaaatgaagcagaatgaaactactgcaatgaagaaacaacaggaattaatggatgaaaactttgacctgtcaaaaagactgagtgagaacgaaattatatgtaatgctctgcagagacagaaagagagattggaaggagaaaatgatcttttgaagagggagaacagcagattgctcagttacatgggtctggattttaattctttgccgtatcaagtacctacttcagatgaaggaggcgcaagacaaaatccaggacttgcctatggaaacccatattctggtatccaagaaagttcttcccccagcccgctctccatcaagaaatgccctatctgcaaagcagatgatatttgtgatcacaccttggagcaacagcagatgcagcccctttgtttcaattgtccaatttgtgacaagatcttcccagctacagagaagcagatctttgaagaccacgtgttctgccactctctctgagtatcccaacctcttggatgtatacagagattttatagaatagaacctatagcttctaccatgagttatatgagtcaagatcctgcctaacctgaaattattagggatttactcagccctgctgccgctaacagtggagttatgtcactgatctgaaggtcactgttaagggcttctgctgccatccttgtgggttgctacctttaagtcgcataactctagctgtatcatcctctcacctgtcattcttctgagggtctcagtacaagggccctgggatggagccaacctgggtattcacaacaggcctgacttgatactaagtgattagttttccaagttgtcccactgccattcaaagtcagcccttgagtgtatttgttctcagtcctaaccctggggccagagattggtccgaggttgagaattccttcctcctcatccttggtgttgctttctccaaatgattgttttagactagccaaaaatgccgtggcaaagagctcagaaatccaatttggataccaaagggtgcggctcgctgggatcctctagggtcggcgc

SEQ ID NO: 450986 - DNA, 2708 bp, Homo sapiens
  misc_feature (71)..(71): n is a, c, g, or t
  misc_feature (88)..(88): n is a, c, g, or t
cgggcagaggagccggggtggaactacgcatgagaacacggatatggatgaaaactttgaacccctgtccnaagaaagcaacgttggntgagtgagaacgaaattatatgtaatgctctgcagagacagaaagagagattggaaggagaaaatgatcttttgaagagggagaacagcagattgctcagttacatgggtctggattttaattctttgccgtatcaagtacctacttcagatgaaggaggcgcaagacaaaatccaggacttgcctatggaaacccatattctggtatccaagaaagttcttcccccagcccgctctccatcaagaaatgccctatctgcaaagcagatgatatttgtgatcacaccttggagcaacagcagatgcagcccctttgtttcaattgtccaatttgtgacaagatcttcccagctacagagaagcagatctttgaagaccacgtgttctgccactctctctgagtatcccaacctcttggatgtatacagagattttatagaatagaacctatagcttctaccatgagttatatgagtcaagatcctgcctaacctgaaattattagggatttactcagccctgctgccgctaacagtggagttatgtcactgatctgaaggtcactgttaagggcttctgctgccatccttgtgggttgctacctttaagtcgcataactctagctgtatcatcctctcacctgtcattcttctgagggtctcagtacaagggccctgggatggagccaacctgggtattcacaacaggcctgacttgatactaagtgattagttttccaagttgtcccactgccattcaaagtcagcccttgagtgtatttgttctcagtcctaaccctggggccagagattggtccgaggttgagaattccttcctcctcatccttggtgttgctttctccaaatgattgttttagactagccaaaaatgccgtggcaaagagctcagaaatccaatttggataccaaaggtttctcatgttaatttctcagcccccaaagaagcatcttactcctgaaccttagacaggaagtattgtttcagtcacagaaagcttttctgggtacctctggttagcactttctactctctgatatttcctatgtacatagcttttattgttgtaaatcctttcttaatggttaaataggattgttagcaactatgggtttgcagttttctgagtaggtgagttttgaatatgggtaaatcagaataatgagacaacttgttaatctctttaatactaaaaataaattactcttctatttcagggacttaggtaatttaaaataaaccttcaatttatggtcttctgttttgaagctcatgggaaaattgtgatcaaaagggctatgggaagggcagaccccgccaatgatttctcttcacctgtcttaagattaaataaaaaagagtgtcctggcagttatcttgaggtggggaaggaggtgatgaaacattagtttgtgaaatccaaggccctggcttgctttctttctttttttttttttttttttttgaaacagtctctctctgtcacccaggctggcgtgcaatggcgcagttgactcactacagcctctgcctcccaggttcaagcgattctcatgccttagcctcccaagtagctgggattacaggtgtgtgccgcaatgcccagctaatttttgtgtttttagtagagacagggtttcactatgttggccaggctggtctcgaactcctggcctcacgtgatctgtccacttcagccgtccaaagtgctgggattacaagcgtgagccactgtgctgggcccgaggccctgacttcttgctgtaactttccatgcattttttttaaaaggagcagtgtggattttcgcaccctttgtgaactaagttcaatgcgctctatccaaatttgcctaattgaactataagaaagtaataattccattttctatcccctcagggactgaacaaatggaaataactcccaggcagtatcaggtggtcactacagagacttccacaaaaacttttgaatgatgtgaaacacgatgtcatgaataagggttgagccaactatagctctgtgttcctactgggctttccctaatgtggttgggagttatgccctagactaactgtattgtcctagtcacagctccttgctttgatttcatccttgataaaatgaagatgaaacttacactacttctccaagccttttgctgtcttaagaataagacctgagattaacactaaccctagaatagaaatgtaatagggagatggtaataaaggagtttttctggcacataccctccctacagaatttctgttgctccccagatccagtgaagaattgcagtttcatttattttgtaccagtcagctcttaattaagtacatgaatggagaggagcagtggtgcacataatccaaatcagtgaataccattttctggtgaattacccacccctttgcccctgctaccccgagggttaccatgattgtcaacagcagcaggagcccttccacagggcttggtaaaaaaaccagttgaggtgttaatgaccctttttgctgggtgtaaaacaaagcatctttaaccactgttcattaaacccagctgctcttaccaaggctttgaaggagaaatctggggttcc

SEQ ID NO: 450987 - DNA, 2599 bp, Homo sapiens
cataatataattaccgcaaccactgacctatacaccagacccccgcggctgctggggaccaggagacattacatgctcacctcatgggtctggattttaattctttgccgtatcaagtacctacttcagatgaaggaggcgcaagacaaaatccaggacttgcctatggaaacccatattctggtatccaagaaagttcttcccccagcccgctctccatcaagaaatgccctatctgcaaagcagatgatatttgtgatcacaccttggagcaacagcagatgcagcccctttgtttcaattgtccaatttgtgacaagatcttcccagctacagagaagcagatctttgaagaccacgtgttctgccactctctctgagtatcccaacctcttggatgtatacagagattttatagaatagaacctatagcttctaccatgagttatatgagtcaagatcctgcctaacctgaaattattagggatttactcagccctgctgccgctaacagtggagttatgtcactgatctgaaggtcactgttaagggcttctgctgccatccttgtgggttgctacctttaagtcgcataactctagctgtatcatcctctcacctgtcattcttctgagggtctcagtacaagggccctgggatggagccaacctgggtattcacaacaggcctgacttgatactaagtgattagttttccaagttgtcccactgccattcaaagtcagcccttgagtgtatttgttctcagtcctaaccctggggccagagattggtccgaggttgagaattccttcctcctcatccttggtgttgctttctccaaatgattgttttagactagccaaaaatgccgtggcaaagagctcagaaatccaatttggataccaaaggtttctcatgttaatttctcagcccccaaagaagcatcttactcctgaaccttagacaggaagtattgtttcagtcacagaaagcttttctgggtacctctggttagcactttctactctctgatatttcctatgtacatagcttttattgttgtaaatcctttcttaatggttaaataggattgttagcaactatgggtttgcagttttctgagtaggtgagttttgaatatgggtaaatcagaataatgagacaacttgttaatctctttaatactaaaaataaattactcttctatttcagggacttaggtaatttaaaataaaccttcaatttatggtcttctgttttgaagctcatgggaaaattgtgatcaaaagggctatgggaagggcagaccccgccaatgatttctcttcacctgtcttaagattaaataaaaaagagtgtcctggcagttatcttgaggtggggaaggaggtgatgaaacattagtttgtgaaatccaaggccctggcttgctttctttctttttttttttttttttttttgaaacagtctctctctgtcacccaggctggcgtgcaatggcgcagttgactcactacagcctctgcctcccaggttcaagcgattctcatgccttagcctcccaagtagctgggattacaggtgtgtgccgcaatgcccagctaatttttgtgtttttagtagagacagggtttcactatgttggccaggctggtctcgaactcctggcctcacgtgatctgtccacttcagccgtccaaagtgctgggattacaagcgtgagccactgtgctgggcccgaggccctgacttcttgctgtaactttccatgcattttttttaaaaggagcagtgtggattttcgcaccctttgtgaactaagttcaatgcgctctatccaaatttgcctaattgaactataagaaagtaataattccattttctatcccctcagggactgaacaaatggaaataactcccaggcagtatcaggtggtcactacagagacttccacaaaaacttttgaatgatgtgaaacacgatgtcatgaataagggttgagccaactatagctctgtgttcctactgggctttccctaatgtggttgggagttatgccctagactaactgtattgtcctagtcacagctccttgctttgatttcatccttgataaaatgaagatgaaacttacactacttctccaagccttttgctgtcttaagaataagacctgagattaacactaaccctagaatagaaatgtaatagggagatggtaataaaggagtttttctggcacataccctccctacagaatttctgttgctccccagatccagtgaagaattgcagtttcatttattttgtaccagtcagctcttaattaagtacatgaatggagaggagcagtggtgcacataatccaaatcagtgaataccattttctggtgaattacccacccctttgcccctgctaccccgagggttaccatgattgtcaacagcagcaggagcccttccacagggcttggtaaaaaaaccagttgaggtgttaatgaccctttttgctgggtgtaaaacaaagcatctttaaccactgttcattaaacccagctgctcttaccaaggctttgaaggagaaatctggggttcc

SEQ ID NO: 450988 - DNA, 2433 bp, Homo sapiens
gaaatcacaacatggaattcctcgaataacaatttattgactcaagctctccatcaagaaatgccctatctgcaaagcagatgatatttgtgatcacaccttggagcaacagcagatgcagcccctttgtttcaattgtccaatttgtgacaagatcttcccagctacagagaagcagatctttgaagaccacgtgttctgccactctctctgagtatcccaacctcttggatgtatacagagattttatagaatagaacctatagcttctaccatgagttatatgagtcaagatcctgcctaacctgaaattattagggatttactcagccctgctgccgctaacagtggagttatgtcactgatctgaaggtcactgttaagggcttctgctgccatccttgtgggttgctacctttaagtcgcataactctagctgtatcatcctctcacctgtcattcttctgagggtctcagtacaagggccctgggatggagccaacctgggtattcacaacaggcctgacttgatactaagtgattagttttccaagttgtcccactgccattcaaagtcagcccttgagtgtatttgttctcagtcctaaccctggggccagagattggtccgaggttgagaattccttcctcctcatccttggtgttgctttctccaaatgattgttttagactagccaaaaatgccgtggcaaagagctcagaaatccaatttggataccaaaggtttctcatgttaatttctcagcccccaaagaagcatcttactcctgaaccttagacaggaagtattgtttcagtcacagaaagcttttctgggtacctctggttagcactttctactctctgatatttcctatgtacatagcttttattgttgtaaatcctttcttaatggttaaataggattgttagcaactatgggtttgcagttttctgagtaggtgagttttgaatatgggtaaatcagaataatgagacaacttgttaatctctttaatactaaaaataaattactcttctatttcagggacttaggtaatttaaaataaaccttcaatttatggtcttctgttttgaagctcatgggaaaattgtgatcaaaagggctatgggaagggcagaccccgccaatgatttctcttcacctgtcttaagattaaataaaaaagagtgtcctggcagttatcttgaggtggggaaggaggtgatgaaacattagtttgtgaaatccaaggccctggcttgctttctttctttttttttttttttttttttgaaacagtctctctctgtcacccaggctggcgtgcaatggcgcagttgactcactacagcctctgcctcccaggttcaagcgattctcatgccttagcctcccaagtagctgggattacaggtgtgtgccgcaatgcccagctaatttttgtgtttttagtagagacagggtttcactatgttggccaggctggtctcgaactcctggcctcacgtgatctgtccacttcagccgtccaaagtgctgggattacaagcgtgagccactgtgctgggcccgaggccctgacttcttgctgtaactttccatgcattttttttaaaaggagcagtgtggattttcgcaccctttgtgaactaagttcaatgcgctctatccaaatttgcctaattgaactataagaaagtaataattccattttctatcccctcagggactgaacaaatggaaataactcccaggcagtatcaggtggtcactacagagacttccacaaaaacttttgaatgatgtgaaacacgatgtcatgaataagggttgagccaactatagctctgtgttcctactgggctttccctaatgtggttgggagttatgccctagactaactgtattgtcctagtcacagctccttgctttgatttcatccttgataaaatgaagatgaaacttacactacttctccaagccttttgctgtcttaagaataagacctgagattaacactaaccctagaatagaaatgtaatagggagatggtaataaaggagtttttctggcacataccctccctacagaatttctgttgctccccagatccagtgaagaattgcagtttcatttattttgtaccagtcagctcttaattaagtacatgaatggagaggagcagtggtgcacataatccaaatcagtgaataccattttctggtgaattacccacccctttgcccctgctaccccgagggttaccatgattgtcaacagcagcaggagcccttccacagggcttggtaaaaaaaccagttgaggtgttaatgaccctttttgctgggtgtaaaacaaagcatctttaaccactgttcattaaacccagctgctcttaccaaggctttgaaggagaaatctggggttcc

SEQ ID NO: 450989 - DNA, 1244 bp, Homo sapiens
caggcgggtcgggctctcccttgggtgcttagccccgcccccgtcccactctgccctgttgctgtcgcgccgctgctggttgctgtccctggacccctaccatggaggagaccatcaaagatccccccacatcagctgtcttgctggatcactgtcatttctctcaggtcatctttaacagtgtggagaagttctacatccctggaggggacgtcacatgtcattataccttcacccagcatttcatccctcgtcgaaaggattggattggcatctttagagtggggtggaagacaacccgtgagtattacaccttcatgtgggttactttgcccattgacctaaacaacaaatcagctaaacagcaggaagtccaattcaaagcttactacctgcccaaggatgatgagtattaccagttctgctatgtggatgaggatggtgtggtccggggagcaagtattcctttccaattccgtccagaaaatgaggaagacatcctggttgttaccactcagggagaggtggaagagattgagcagcacaacaaggagctttgcaaagaaaaccaggagctgaaggacagctgtatcagcctccagaagcagaactcagacatgcaggctgagctccaaaagaagcaggaggagctagaaaccctacagagcatcaataagaagttggaactgaaagtgaaagaacagaaggactattgggagacagagctgcttcaactgaaagaacaaaaccagaagatgtcctcagaaaatgagaagatgggaatcagagtggatcagcttcaggcccagctgtcaactcaagagaaagaaatggagaagcttgttcagggagatcaagataagacagagcagttagagcagctgaaaaaggaaaatgaccacctctttctcagtttaactgaacagaggaaggaccagaagaagctcgagcagacagtggagcaaatgaagcagaatgaaactactgcaatgaagaaacaacaggaattaatggcatgtctgtctttggatggttatgtgggagggagcctatagggatgtagaagaaaaggatatgggcctattttccggttgatggacaggataaataagagagtgttcacctctagatgttttgctttctagccaaaaggacagagaatctgccatttataaaatgtttagaagtgggcatttctaatatgtgataagtaataaaggaatattgcaagttaaacttcatga

SEQ ID NO: 450990 - DNA, 1286 bp, Homo sapiens
caggcgggtcgggctctcccttgggtgcttagccccgcccccgtcccactctgccctgttgctgtcgcgccgctgctggttgctgtccctggacccctaccatggaggagaccatcaaagatccccccacatcagctgtcttgctggatcactgtcatttctctcaggtcatctttaacagtgtggagaagttctacatccctggaggggacgtcacatgtcattataccttcacccagcatttcatccctcgtcgaaaggattggattggcatctttagagtggggtggaagacaacccgtgagtattacaccttcatgtgggttactttgcccattgacctaaacaacaaatcagctaaacagcaggaagtccaattcaaagcttactacctgcccaaggatgatgagtattaccagttctgctatgtggatgaggatggtgtggtccggggagcaagtattcctttccaattccgtccagaaaatgaggaagacatcctggttgttaccactcagggagaggtggaagagattgagcagcacaacaaggagctttgcaaagaaaaccaggagctgaaggacagctgtatcagcctccagaagcagaactcagacatgcaggctgagctccaaaagaagcaggaggagctagaaaccctacagagcatcaataagaagttggaactgaaagtgaaagaacagaaggactattgggagacagagctgcttcaactgaaagaacaaaaccagaagatgtcctcagaaaatgagaagatgggaatcagagtggatcagcttcaggtaggtaatgccatatgtttgtcaaaggatattttcttagccttaccactgctccaatttggtggcctagaaagatgtatttcattgcagtgagtgcctaatggcatacttttcaaagtatcacactaaagtttcaggttatgtattttccattcttggaccaggtaagcctccaccctacccatgcccctgcttttaaaaaaaaaaaaatcatgattcacagccgggcgcagtggctcatgtctgtaatcccagcactttgggaggccaaggcaggtggatcacctgaggtcaggagttcgagatcagcctggccaatatggcaaaaccccgtctctactaaaaatacaaaaattagctgggcgtgctaatttacaggcgcacgtgtaattccagctactcgggaggctgaggcagaagaatcacttgagccccggaggcaaaggttgcagtgaatagagattgcaccactgcactccagcc

SEQ ID NO: 450991 - DNA, 1040 bp, Homo sapiens
caggcgggtcgggctctcccttgggtgcttagccccgcccccgtcccactctgccctgttgctgtcgcgccgctgctggttgctgtccctggacccctaccatggaggagaccatcaaagatccccccacatcagctgtcttgctggatcactgtcatttctctcaggtcatctttaacagtgtggagaagttctacatccctggaggggacgtcacatgtcattataccttcacccagcatttcatccctcgtcgaaaggattggattggcatctttagagtggggtggaagacaacccgtgagtattacaccttcatgtgggttactttgcccattgacctaaacaacaaatcagctaaacagcaggaagtccaattcaaagcttactacctgcccaaggatgatgagtattaccagttctgctatgtggatgaggatggtgtggtccggggagcaagtattcctttccaattccgtccagaaaatgaggaagacatcctggttgttaccactcagggagaggtggaagagattgagcagcacaacaaggagctttgcaaagaaaaccaggagctgaaggacagctgtatcagcctccagaagcagaactcagacatgcaggctgagctccaaaagaagcaggaggagctagaaaccctacagagcatcaataagaagttggaactgaaagtgaaagaacagaaggactattgggagacagagctgcttcaactgaaagaacaaaaccagaagatgtcctcagaaaatgagaagatgggaatcagagtggatcagcttcaggtaggtaatgccatatgtttgtcaaaggatattttcttagccttaccactgctccaatttggtggcctagaaagatgtatttcattgcagtgagtgcctaatggcatacttttcaaagtatcacactaaagtttcaggttatgtattttccattcttggaccaggtaagcctccacctcccccgggggaggtggaggtttatctttgggcattaattcttagggttcttcatcgctt

SEQ ID NO: 450992 - DNA, 1358 bp, Homo sapiens
cagatcagccaactcggggcggctgcactggtaggtgacagagataagggggcccaggaaagcaagaggtgcaaaggttagtggttcttagaccaagtccagaaaatggtacacccttgttaaggtgagaaagttatctttgcactaaaaagagggatgtagtgtatggccagaaactagcatgggggtccctggaaatactggccccaacttagccacaggtctcagggaaggtttttgtaactatcaagcaggtttctgtgcagactcagagagccctttcttatttctgccttttgaggaagtgaagcaggactagaagagccatcaggagccaacggggatgggaagcaaggagcctgcagtcagcattgtcactgggtagccccctctggcattactacctcagggtcggctagacatgcacagcagtttgggcaccagcattcaaataaaaaatcttggatgaaaaaccacaactagtaggcttagcttaagtgtgtttgtgaggtatgcacatgtgtatgtatgcaggtagaagatgggaagctctgaagcatgaaaccagttaggtcaacccatcacactgggttgcttatggccccagtctgagctccttgtatccttggacaaatgccttcctgtgttccctcttccttcatgtaacttgagccgagatgcctattctcacactgtaggaaggaatcacaccaacccaaacctaagtgcttcaggcttcgctgagtgagacgtttattcaaaacaaagattattgttttcatggttaggtgggattcaacaaggtttcatttatccctaattctgataagtcagtcttgagattttccccaaggttgctttttccctccttggtcacttataccctcagctaaaccaaaaaaaaaaaaaaaaaaaaaaattggcatcttgatgccagctcaggccttcaggtgtctttttaagtcactttaatttagcaccctgcccatagtaccatttcttcctcccagttgcgttctcctccatctcagtctccccgctttgcaatgccagattctctacaatttctcaccttgtacccagactgcaatatgtgatcctaatcctaattttttttattgttgacaggatgaaaactttgacctgtcaaaaagactgagtgagaacgaaattatatgtaatgctctgcagagacagaaagagagattggaaggagaaaatgatgtaagtgtgtgaaagagggtataaaaccccaaggttttaaggggaaggatcagggtggcccagagatgtagtgaaaaaaataaaaagttaagggccctttctgggacagtgggtgaaacagttgttcctaaacg

SEQ ID NO: 450993 - DNA, 3198 bp, Homo sapiens
caggcgggtcgggctctcccttgggtgcttagccccgcccccgtcccactctgccctgttgctgtcgcgccgctgctggttgctgtccctggacccctaccatggaggagaccatcaaagatccccccacatcagctgtcttgctggatcactgtcatttctctcaggtcatctttaacagtgtggagaagttctacatccctggaggggacgtcacatgtcattataccttcacccagcatttcatccctcgtcgaaaggattggattggcatctttagagtggggtggaagacaacccgtgagtattacaccttcatgtgggttactttgcccattgacctaaacaacaaatcagctaaacagcaggaagtccaattcaaagcttactacctgcccaaggatgatgagtattaccagttctgctatgtggatgaggatggtgtggtccggggagcaagtattcctttccaattccgtccagaaaatgaggaagacatcctggttgttaccactcagggagaggtggaagagattgagcagcacaacaaggagctttgcaaagaaaaccaggagctgaaggacagctgtatcagcctccagaagcagaactcagacatgcaggctgagctccaaaagaagcaggaggagctagaaaccctacagagcatcaataagaagttggaactgaaagtgaaagaacagaaggactattgggagacagagctgcttcaactgaaagaacaaaaccagaagatgtcctcagaaaatgagaagatgggaatcagagtggatcagcttcaggcccagctgtcaactcaagagaaagaaatggagaagcttgttcagggagatcaagataagacagagcagttagagcagctgaaaaaggaaaatgaccacctctttctcagtttaactgaacagaggaaggaccagaagaagctcgagcagacagtggagcaaatgaagcagaatgaaactactgcaatgaagaaacaacaggaattaatggatgaaaactttgacctgtcaaaaagactgagtgagaacgaaattatatgtaatgctctgcagagacagaaagagagattggaaggagaaaatgatcttttgaagagggagaacagcagattgctcagttacatgggtctggattttaattctttgccgtatcaagtacctacttcagatgaaggaggcgcaagacaaaatccaggacttgcctatggaaacccatattctggtatccaagaaagttcttcccccagcccgctctccatcaagaaatgccctatctgcaaagcagatgatatttgtgatcacaccttggagcaacagcagatgcagcccctttgtttcaattgtccaatttgtgacaagatcttcccagctacagagaagcagatctttgaagaccacgtgttctgccactctctctgagtatcccaacctcttggatgtatacagagattttatagaatagaacctatagcttctaccatgagttatatgagtcaagatcctgcctaacctgaaattattagggatttactcagccctgctgccgctaacagtggagttatgtcactgatctgaaggtcactgttaagggcttctgctgccatccttgtgggttgctacctttaagtcgcataactctagctgtatcatcctctcacctgtcattcttctgagggtctcagtacaagggccctgggatggagccaacctgggtattcacaacaggcctgacttgatactaagtgattagttttccaagttgtcccactgccattcaaagtcagcccttgagtgtatttgttctcagtcctaaccctggggccagagattggtccgaggttgagaattccttcctcctcatccttggtgttgctttctccaaatgattgttttagactagccaaaaatgccgtggcaaagagctcagaaatccaatttggataccaaaggtttctcatgttaatttctcagcccccaaagaagcatcttactcctgaaccttagacaggaagtattgtttcagtcacagaaagcttttctgggtacctctggttagcactttctactctctgatatttcctatgtacatagcttttattgttgtaaatcctttcttaatggttaaataggattgttagcaactatgggtttgcagttttctgagtaggtgagttttgaatatgggtaaatcagaataatgagacaacttgttaatctctttaatactaaaaataaattactcttctatttcagggacttaggtaatttaaaataaaccttcaatttatggtcttctgttttgaagctcatgggaaaattgtgatcaaaagggctatgggaagggcagaccccgccaatgatttctcttcacctgtcttaagattaaataaaaaagagtgtcctggcagttatcttgaggtggggaaggaggtgatgaaacattagtttgtgaaatccaaggccctggcttgctttctttctttttttttttttttttttttgaaacagtctctctctgtcacccaggctggcgtgcaatggcgcagttgactcactacagcctctgcctcccaggttcaagcgattctcatgccttagcctcccaagtagctgggattacaggtgtgtgccgcaatgcccagctaatttttgtgtttttagtagagacagggtttcactatgttggccaggctggtctcgaactcctggcctcacgtgatctgtccacttcagccgtccaaagtgctgggattacaagcgtgagccactgtgctgggcccgaggccctgacttcttgctgtaactttccatgcattttttttaaaaggagcagtgtggattttcgcaccctttgtgaactaagttcaatgcgctctatccaaatttgcctaattgaactataagaaagtaataattccattttctatcccctcagggactgaacaaatggaaataactcccaggcagtatcaggtggtcactacagagacttccacaaaaacttttgaatgatgtgaaacacgatgtcatgaataagggttgagccaactatagctctgtgttcctactgggctttccctaatgtggttgggagttatgccctagactaactgtattgtcctagtcacagctccttgctttgatttcatccttgataaaatgaagatgaaactta

SEQ ID NO: 450994 - DNA, 3661 bp, Homo sapiens
caggcgggtcgggctctcccttgggtgcttagccccgcccccgtcccactctgccctgttgctgtcgcgccgctgctggttgctgtccctggacccctaccatggaggagaccatcaaagatccccccacatcagctgtcttgctggatcactgtcatttctctcaggtcatctttaacagtgtggagaagttctacatccctggaggggacgtcacatgtcattataccttcacccagcatttcatccctcgtcgaaaggattggattggcatctttagagtggggtggaagacaacccgtgagtattacaccttcatgtgggttactttgcccattgacctaaacaacaaatcagctaaacagcaggaagtccaattcaaagcttactacctgcccaaggatgatgagtattaccagttctgctatgtggatgaggatggtgtggtccggggagcaagtattcctttccaattccgtccagaaaatgaggaagacatcctggttgttaccactcagggagaggtggaagagattgagcagcacaacaaggagctttgcaaagaaaaccaggagctgaaggacagctgtatcagcctccagaagcagaactcagacatgcaggctgagctccaaaagaagcaggaggagctagaaaccctacagagcatcaataagaagttggaactgaaagtgaaagaacagaaggactattgggagacagagctgcttcaactgaaagaacaaaaccagaagatgtcctcagaaaatgagaagatgggaatcagagtggatcagcttcaggcccagctgtcaactcaagagaaagaaatggagaagcttgttcagggagatcaagataagacagagcagttagagcagctgaaaaaggaaaatgaccacctctttctcagtttaactgaacagaggaaggaccagaagaagctcgagcagacagtggagcaaatgaagcagaatgaaactactgcaatgaagaaacaacaggaattaatggatgaaaactttgacctgtcaaaaagactgagtgagaacgaaattatatgtaatgctctgcagagacagaaagagagattggaaggagaaaatgatcttttgaagagggagaacagcagattgctcagttacatgggtctggattttaattctttgccgtatcaagtacctacttcagatgaaggaggcgcaagacaaaatccaggacttgcctatggaaacccatattctggtatccaagaaagttcttcccccagcccgctctccatcaagaaatgccctatctgcaaagcagatgatatttgtgatcacaccttggagcaacagcagatgcagcccctttgtttcaattgtccaatttgtgacaagatcttcccagctacagagaagcagatctttgaagaccacgtgttctgccactctctctgagtatcccaacctcttggatgtatacagagattttatagaatagaacctatagcttctaccatgagttatatgagtcaagatcctgcctaacctgaaattattagggatttactcagccctgctgccgctaacagtggagttatgtcactgatctgaaggtcactgttaagggcttctgctgccatccttgtgggttgctacctttaagtcgcataactctagctgtatcatcctctcacctgtcattcttctgagggtctcagtacaagggccctgggatggagccaacctgggtattcacaacaggcctgacttgatactaagtgattagttttccaagttgtcccactgccattcaaagtcagcccttgagtgtatttgttctcagtcctaaccctggggccagagattggtccgaggttgagaattccttcctcctcatccttggtgttgctttctccaaatgattgttttagactagccaaaaatgccgtggcaaagagctcagaaatccaatttggataccaaaggtttctcatgttaatttctcagcccccaaagaagcatcttactcctgaaccttagacaggaagtattgtttcagtcacagaaagcttttctgggtacctctggttagcactttctactctctgatatttcctatgtacatagcttttattgttgtaaatcctttcttaatggttaaataggattgttagcaactatgggtttgcagttttctgagtaggtgagttttgaatatgggtaaatcagaataatgagacaacttgttaatctctttaatactaaaaataaattactcttctatttcagggacttaggtaatttaaaataaaccttcaatttatggtcttctgttttgaagctcatgggaaaattgtgatcaaaagggctatgggaagggcagaccccgccaatgatttctcttcacctgtcttaagattaaataaaaaagagtgtcctggcagttatcttgaggtggggaaggaggtgatgaaacattagtttgtgaaatccaaggccctggcttgctttctttctttttttttttttttttttttgaaacagtctctctctgtcacccaggctggcgtgcaatggcgcagttgactcactacagcctctgcctcccaggttcaagcgattctcatgccttagcctcccaagtagctgggattacaggtgtgtgccgcaatgcccagctaatttttgtgtttttagtagagacagggtttcactatgttggccaggctggtctcgaactcctggcctcacgtgatctgtccacttcagccgtccaaagtgctgggattacaagcgtgagccactgtgctgggcccgaggccctgacttcttgctgtaactttccatgcattttttttaaaaggagcagtgtggattttcgcaccctttgtgaactaagttcaatgcgctctatccaaatttgcctaattgaactataagaaagtaataattccattttctatcccctcagggactgaacaaatggaaataactcccaggcagtatcaggtggtcactacagagacttccacaaaaacttttgaatgatgtgaaacacgatgtcatgaataagggttgagccaactatagctctgtgttcctactgggctttccctaatgtggttgggagttatgccctagactaactgtattgtcctagtcacagctccttgctttgatttcatccttgataaaatgaagatgaaacttacactacttctccaagccttttgctgtcttaagaataagacctgagattaacactaaccctagaatagaaatgtaatagggagatggtaataaaggagtttttctggcacataccctccctacagaatttctgttgctccccagatccagtgaagaattgcagtttcatttattttgtaccagtcagctcttaattaagtacatgaatggagaggagcagtggtgcacataatccaaatcagtgaataccattttctggtgaattacccacccctttgcccctgctaccccgagggttaccatgattgtcaacagcagcaggagcccttccacagggcttggtaaaaaaaccagttgaggtgttaatgaccctttttgctgggtgtaaaacaaagcatctttaaccactgttcattaaacccagctgctcttaccaaggctttgaaggagaaatctggggttcc

SEQ ID NO: 450995 - DNA, 2507 bp, Homo sapiens
  misc_feature (2362)..(2362): n is a, c, g, or t
  misc_feature (2379)..(2379): n is a, c, g, or t
  misc_feature (2384)..(2384): n is a, c, g, or t
  misc_feature (2389)..(2389): n is a, c, g, or t
caggcgggtcgggctctcccttgggtgcttagccccgcccccgtcccactctgccctgttgctgtcgcgccgctgctggttgctgtccctggacccctaccatggaggagaccatcaaagatccccccacatcagctgtcttgctggatcactgtcatttctctcaggtcatctttaacagtgtggagaagttctacatccctggaggggacgtcacatgtcattataccttcacccagcatttcatccctcgtcgaaaggattggattggcatctttagagtggggtggaagacaacccgtgagtattacaccttcatgtgggttactttgcccattgacctaaacaacaaatcagctaaacagcaggaagtccaattcaaagcttactacctgcccaaggatgatgagtattaccagttctgctatgtggatgaggatggtgtggtccggggagcaagtattcctttccaattccgtccagaaaatgaggaagacatcctggttgttaccactcagggagaggtggaagagattgagcagcacaacaaggagctttgcaaagaaaaccaggagctgaaggacagctgtatcagcctccagaagcagaactcagacatgcaggctgagctccaaaagaagcaggaggagctagaaaccctacagagcatcaataagaagttggaactgaaagtgaaagaacagaaggactattgggagacagagctgcttcaactgaaagaacaaaaccagaagatgtcctcagaaaatgagaagatgggaatcagagtggatcagcttcaggcccagctgtcaactcaagagaaagaaatggagaagcttgttcagggagatcaagataagacagagcagttagagcagctgaaaaaggaaaatgaccacctctttctcagtttaactgaacagaggaaggaccagaagaagctcgagcagacagtggagcaaatgaagcagaatgaaactactgcaatgaagaaacaacaggaattaatggatgaaaactttgacctgtcaaaaagactgagtgagaacgaaattatatgtaatgctctgcagagacagaaagagagattggaaggagaaaatgatcttttgaagagggagaacagcagattgctcagttacatgggtctggattttaattctttgccgtatcaagtacctacttcagatgaaggaggcgcaagacaaaatccaggacttgcctatggaaacccatattctggtatccaagaaagttcttcccccagcccgctctccatcaagaaatgccctatctgcaaagcagatgatatttgtgatcacaccttggagcaacagcagatgcagcccctttgtttcaattgtccaatttgtgacaagatcttcccagctacagagaagcagatctttgaagaccacgtgttctgccactctctctgagtatcccaacctcttggatgtatacagagattttatagaatagaacctatagcttctaccatgagttatatgagtcaagatcctgcctaacctgaaattattagggatttactcagccctgctgccgctaacagtggagttatgtcactgatctgaaggtcactgttaagggcttctgctgccatccttgtgggttgctacctttaagtcgcataactctagctgtatcatcctctcacctgtcattcttctgagggtctcagtacaagggccctgggatggagccaacctgggtattcacaacaggcctgacttgatactaagtgattagttttccaagttgtcccactgccattcaaagtcagcccttgagtgtatttgttctcagtcctaaccctggggccagagattggtccgaggttgagaattccttcctcctcatccttggtgttgctttctccaaatgattgttttagactagccaaaaatgccgtggcaaagagctcagaaatccaatttggataccaaaggtttctcatgttaatttctcagcccccaaagaagcatcttactcctgaaccttagacaggaagtattgtttcagtcacagaaagcttttctgggtacctctggttagcactttctactctctgatatttcctatgtacatagcttttattgttgtaaatcctttcttaatggttaaataggattgttagcaactatgggtttgcagttttctgagtaggtgagttttgaatatgggtaaatcagaataatgagacaacttgttaatctctttaatactaaaaataaattactcttctatttcagggacttaggtaatttaaaataaaccttcaatttatggtaaacaaaaaaaaaaaaacaaaaaaaaaaaacaaccccgggggcctttnttggcgggggggggaanaaggnggttngaaggggccccgcggggcaaaagggtggtcccggccccagtttttttggcaaagggggaaaactcggcgggcccccaaagaggggcggcgaaaaatcgggaagaccggggaacccgtg

SEQ ID NO: 450996 - DNA, 3705 bp, Homo sapiens
taatctcagtatttgtcaggattttgcttttcctgacttgctttgcacagaatgttccctggatgaaagcccagaaatcaccaacatttcagacaatgctttctgagccttactctgttccacatttcataacaggacccctaccatggaggagaccatcaaagatccccccacatcagctgtcttgctggatcactgtcatttctctcaggtcatctttaacagtgtggagaagttctacatccctggaggggacgtcacatgtcattataccttcacccagcatttcatccctcgtcgaaaggattggattggcatctttagagtggggtggaagacaacccgtgagtattacaccttcatgtgggttactttgcccattgacctaaacaacaaatcagctaaacagcaggaagtccaattcaaagcttactacctgcccaaggatgatgagtattaccagttctgctatgtggatgaggatggtgtggtccggggagcaagtattcctttccaattccgtccagaaaatgaggaagacatcctggttgttaccactcagggagaggtggaagagattgagcagcacaacaaggagctttgcaaagaaaaccaggagctgaaggacagctgtatcagcctccagaagcagaactcagacatgcaggctgagctccaaaagaagcaggaggagctagaaaccctacagagcatcaataagaagttggaactgaaagtgaaagaacagaaggactattgggagacagagctgcttcaactgaaagaacaaaaccagaagatgtcctcagaaaatgagaagatgggaatcagagtggatcagcttcaggcccagctgtcaactcaagagaaagaaatggagaagcttgttcagggagatcaagataagacagagcagttagagcagctgaaaaaggaaaatgaccacctctttctcagtttaactgaacagaggaaggaccagaagaagctcgagcagacagtggagcaaatgaagcagaatgaaactactgcaatgaagaaacaacaggaattaatggatgaaaactttgacctgtcaaaaagactgagtgagaacgaaattatatgtaatgctctgcagagacagaaagagagattggaaggagaaaatgatcttttgaagagggagaacagcagattgctcagttacatgggtctggattttaattctttgccgtatcaagtacctacttcagatgaaggaggcgcaagacaaaatccaggacttgcctatggaaacccatattctggtatccaagaaagttcttcccccagcccgctctccatcaagaaatgccctatctgcaaagcagatgatatttgtgatcacaccttggagcaacagcagatgcagcccctttgtttcaattgtccaatttgtgacaagatcttcccagctacagagaagcagatctttgaagaccacgtgttctgccactctctctgagtatcccaacctcttggatgtatacagagattttatagaatagaacctatagcttctaccatgagttatatgagtcaagatcctgcctaacctgaaattattagggatttactcagccctgctgccgctaacagtggagttatgtcactgatctgaaggtcactgttaagggcttctgctgccatccttgtgggttgctacctttaagtcgcataactctagctgtatcatcctctcacctgtcattcttctgagggtctcagtacaagggccctgggatggagccaacctgggtattcacaacaggcctgacttgatactaagtgattagttttccaagttgtcccactgccattcaaagtcagcccttgagtgtatttgttctcagtcctaaccctggggccagagattggtccgaggttgagaattccttcctcctcatccttggtgttgctttctccaaatgattgttttagactagccaaaaatgccgtggcaaagagctcagaaatccaatttggataccaaaggtttctcatgttaatttctcagcccccaaagaagcatcttactcctgaaccttagacaggaagtattgtttcagtcacagaaagcttttctgggtacctctggttagcactttctactctctgatatttcctatgtacatagcttttattgttgtaaatcctttcttaatggttaaataggattgttagcaactatgggtttgcagttttctgagtaggtgagttttgaatatgggtaaatcagaataatgagacaacttgttaatctctttaatactaaaaataaattactcttctatttcagggacttaggtaatttaaaataaaccttcaatttatggtcttctgttttgaagctcatgggaaaattgtgatcaaaagggctatgggaagggcagaccccgccaatgatttctcttcacctgtcttaagattaaataaaaaagagtgtcctggcagttatcttgaggtggggaaggaggtgatgaaacattagtttgtgaaatccaaggccctggcttgctttctttctttttttttttttttttttttgaaacagtctctctctgtcacccaggctggcgtgcaatggcgcagttgactcactacagcctctgcctcccaggttcaagcgattctcatgccttagcctcccaagtagctgggattacaggtgtgtgccgcaatgcccagctaatttttgtgtttttagtagagacagggtttcactatgttggccaggctggtctcgaactcctggcctcacgtgatctgtccacttcagccgtccaaagtgctgggattacaagcgtgagccactgtgctgggcccgaggccctgacttcttgctgtaactttccatgcattttttttaaaaggagcagtgtggattttcgcaccctttgtgaactaagttcaatgcgctctatccaaatttgcctaattgaactataagaaagtaataattccattttctatcccctcagggactgaacaaatggaaataactcccaggcagtatcaggtggtcactacagagacttccacaaaaacttttgaatgatgtgaaacacgatgtcatgaataagggttgagccaactatagctctgtgttcctactgggctttccctaatgtggttgggagttatgccctagactaactgtattgtcctagtcacagctccttgctttgatttcatccttgataaaatgaagatgaaacttacactacttctccaagccttttgctgtcttaagaataagacctgagattaacactaaccctagaatagaaatgtaatagggagatggtaataaaggagtttttctggcacataccctccctacagaatttctgttgctccccagatccagtgaagaattgcagtttcatttattttgtaccagtcagctcttaattaagtacatgaatggagaggagcagtggtgcacataatccaaatcagtgaataccattttctggtgaattacccacccctttgcccctgctaccccgagggttaccatgattgtcaacagcagcaggagcccttccacagggcttggtaaaaaaaccagttgaggtgttaatgaccctttttgctgggtgtaaaacaaagcatctttaaccactgttcattaaacccagctgctcttaccaaggctttgaaggagaaatctggggttcc

SEQ ID NO: 450997 - DNA, 3525 bp, Homo sapiens
caggcgggtcgggctctcccttgggtgcttagccccgcccccgtcccactctgccctgttgctgtcgcgccgctgctggttgctgtccctggacccctaccatggaggagaccatcaaagatccccccacatcagctgtcttgctggatcactgtcatttctctcaggtcatctttaacagtgtggagaagttctacatccctggaggggacgtcacatgtcattataccttcacccagcatttcatccctcgtcgaaaggattggattggcatctttagagtggggtggaagacaacccgtgagtattacaccttcatgtgggttactttgcccattgacctaaacaacaaatcagctaaacagcaggaagtccaattcaaagcttactacctgcccaaggatgatgagtattaccagttctgctatgtggatgaggatggtgtggtccggggagcaagtattcctttccaattccgtccagaaaatgaggaagacatcctggttgttaccactcagggagaggtggaagagattgagcagcacaacaaggagctttgcaaagaaaaccaggagctgaaggacagctgtatcagcctccagaagcagaactcagacatgcaggctgagctccaaaagaagcaggaggagctagaaaccctacagagcatcaataagaagttggaactgaaagtgaaagaacagaaggactattgggagacagagctgcttcaactgaaagaacaaaaccagaagatgtcctcagaaaatgagaagatgggaatcagagtggatcagcttcaggcccagctgtcaactcaagagaaagaaatggagaagcttgttcagggagatcaagataagacagagcagttagagcagctgaaaaaggaaaatgaccacctctttctcagtttaactgaacagaggaaggaccagaagaagctcgagcagacagtggagcaaatgaagcagaatgaaactactgcaatgaagaaacaacaggaattaatggatgaaaactttgacctgtcaaaaagactgagtgagaacgaaattatatgtaatgctctgcagagacagaaagagagattggaaggagaaaatgatgtatccaagaaagttcttcccccagcccgctctccatcaagaaatgccctatctgcaaagcagatgatatttgtgatcacaccttggagcaacagcagatgcagcccctttgtttcaattgtccaatttgtgacaagatcttcccagctacagagaagcagatctttgaagaccacgtgttctgccactctctctgagtatcccaacctcttggatgtatacagagattttatagaatagaacctatagcttctaccatgagttatatgagtcaagatcctgcctaacctgaaattattagggatttactcagccctgctgccgctaacagtggagttatgtcactgatctgaaggtcactgttaagggcttctgctgccatccttgtgggttgctacctttaagtcgcataactctagctgtatcatcctctcacctgtcattcttctgagggtctcagtacaagggccctgggatggagccaacctgggtattcacaacaggcctgacttgatactaagtgattagttttccaagttgtcccactgccattcaaagtcagcccttgagtgtatttgttctcagtcctaaccctggggccagagattggtccgaggttgagaattccttcctcctcatccttggtgttgctttctccaaatgattgttttagactagccaaaaatgccgtggcaaagagctcagaaatccaatttggataccaaaggtttctcatgttaatttctcagcccccaaagaagcatcttactcctgaaccttagacaggaagtattgtttcagtcacagaaagcttttctgggtacctctggttagcactttctactctctgatatttcctatgtacatagcttttattgttgtaaatcctttcttaatggttaaataggattgttagcaactatgggtttgcagttttctgagtaggtgagttttgaatatgggtaaatcagaataatgagacaacttgttaatctctttaatactaaaaataaattactcttctatttcagggacttaggtaatttaaaataaaccttcaatttatggtcttctgttttgaagctcatgggaaaattgtgatcaaaagggctatgggaagggcagaccccgccaatgatttctcttcacctgtcttaagattaaataaaaaagagtgtcctggcagttatcttgaggtggggaaggaggtgatgaaacattagtttgtgaaatccaaggccctggcttgctttctttctttttttttttttttttttttgaaacagtctctctctgtcacccaggctggcgtgcaatggcgcagttgactcactacagcctctgcctcccaggttcaagcgattctcatgccttagcctcccaagtagctgggattacaggtgtgtgccgcaatgcccagctaatttttgtgtttttagtagagacagggtttcactatgttggccaggctggtctcgaactcctggcctcacgtgatctgtccacttcagccgtccaaagtgctgggattacaagcgtgagccactgtgctgggcccgaggccctgacttcttgctgtaactttccatgcattttttttaaaaggagcagtgtggattttcgcaccctttgtgaactaagttcaatgcgctctatccaaatttgcctaattgaactataagaaagtaataattccattttctatcccctcagggactgaacaaatggaaataactcccaggcagtatcaggtggtcactacagagacttccacaaaaacttttgaatgatgtgaaacacgatgtcatgaataagggttgagccaactatagctctgtgttcctactgggctttccctaatgtggttgggagttatgccctagactaactgtattgtcctagtcacagctccttgctttgatttcatccttgataaaatgaagatgaaacttacactacttctccaagccttttgctgtcttaagaataagacctgagattaacactaaccctagaatagaaatgtaatagggagatggtaataaaggagtttttctggcacataccctccctacagaatttctgttgctccccagatccagtgaagaattgcagtttcatttattttgtaccagtcagctcttaattaagtacatgaatggagaggagcagtggtgcacataatccaaatcagtgaataccattttctggtgaattacccacccctttgcccctgctaccccgagggttaccatgattgtcaacagcagcaggagcccttccacagggcttggtaaaaaaaccagttgaggtgttaatgaccctttttgctgggtgtaaaacaaagcatctttaaccactgttcattaaacccagctgctcttaccaaggctttgaaggagaaatctggggttcc

SEQ ID NO: 450998 - DNA, 3924 bp, Homo sapiens
ggacggagtctcactctgtcacccaggctggagtgcagtggtgcaatctcggctcactgcaacctccgcctcctgggttcaagcaattctcctgcctcaacctcctgagtagctgggattacaggcgcacaccaccgtgccaacttattttttgtattttaatggagacgggttttcaccatgttgcccaggctggtctcaaactactgagctcaggcaatccacccaccttggcctcccaaagtgctaggattacaggcatgagccactgcacccggcctatattttcaatatatacaaataaaaagtgattttaagaagatgtagcccaattaggattttccccagtcccctttcaggtactaaataagaacttcttgtcattgcaggtggggtggaagacaacccgtgagtattacaccttcatgtgggttactttgcccattgacctaaacaacaaatcagctaaacagcaggaagtccaattcaaaggtgagaaaaatactggatcaaaggtgttgaagacagtagccaagactaattaattcccttcagcttgagctttctggggcagataaaaagatttccagaattttacttttctgaatagatcttattttggatgaaaaattatgttgtgttttcagcttactacctgcccaaggatgatgagtattaccagttctgctatgtggatgaggatggtgtggtccggggagcaagtattcctttccaattccgtccagaaaatgaggaagacatcctggttgttaccactcagggagaggtggaagagattgagcagcacaacaaggagctttgcaaagaaaaccaggagctgaaggacagctgtatcagcctccagaagcagaactcagacatgcaggctgagctccaaaagaagcaggaggagctagaaaccctacagagcatcaataagaagttggaactgaaagtgaaagaacagaaggactattgggagacagagctgcttcaactgaaagaacaaaaccagaagatgtcctcagaaaatgagaagatgggaatcagagtggatcagcttcaggcccagctgtcaactcaagagaaagaaatggagaagcttgttcagggagatcaagataagacagagcagttagagcagctgaaaaaggaaaatgaccacctctttctcagtttaactgaacagaggaaggaccagaagaagctcgagcagacagtggagcaaatgaagcagaatgaaactactgcaatgaagaaacaacaggaattaatggatgaaaactttgacctgtcaaaaagactgagtgagaacgaaattatatgtaatgctctgcagagacagaaagagagattggaaggagaaaatgatcttttgaagagggagaacagcagattgctcagttacatgggtctggattttaattctttgccgtatcaagtacctacttcagatgaaggaggcgcaagacaaaatccaggacttgcctatggaaacccatattctggtatccaagaaagttcttcccccagcccgctctccatcaagaaatgccctatctgcaaagcagatgatatttgtgatcacaccttggagcaacagcagatgcagcccctttgtttcaattgtccaatttgtgacaagatcttcccagctacagagaagcagatctttgaagaccacgtgttctgccactctctctgagtatcccaacctcttggatgtatacagagattttatagaatagaacctatagcttctaccatgagttatatgagtcaagatcctgcctaacctgaaattattagggatttactcagccctgctgccgctaacagtggagttatgtcactgatctgaaggtcactgttaagggcttctgctgccatccttgtgggttgctacctttaagtcgcataactctagctgtatcatcctctcacctgtcattcttctgagggtctcagtacaagggccctgggatggagccaacctgggtattcacaacaggcctgacttgatactaagtgattagttttccaagttgtcccactgccattcaaagtcagcccttgagtgtatttgttctcagtcctaaccctggggccagagattggtccgaggttgagaattccttcctcctcatccttggtgttgctttctccaaatgattgttttagactagccaaaaatgccgtggcaaagagctcagaaatccaatttggataccaaaggtttctcatgttaatttctcagcccccaaagaagcatcttactcctgaaccttagacaggaagtattgtttcagtcacagaaagcttttctgggtacctctggttagcactttctactctctgatatttcctatgtacatagcttttattgttgtaaatcctttcttaatggttaaataggattgttagcaactatgggtttgcagttttctgagtaggtgagttttgaatatgggtaaatcagaataatgagacaacttgttaatctctttaatactaaaaataaattactcttctatttcagggacttaggtaatttaaaataaaccttcaatttatggtcttctgttttgaagctcatgggaaaattgtgatcaaaagggctatgggaagggcagaccccgccaatgatttctcttcacctgtcttaagattaaataaaaaagagtgtcctggcagttatcttgaggtggggaaggaggtgatgaaacattagtttgtgaaatccaaggccctggcttgctttctttctttttttttttttttttttttgaaacagtctctctctgtcacccaggctggcgtgcaatggcgcagttgactcactacagcctctgcctcccaggttcaagcgattctcatgccttagcctcccaagtagctgggattacaggtgtgtgccgcaatgcccagctaatttttgtgtttttagtagagacagggtttcactatgttggccaggctggtctcgaactcctggcctcacgtgatctgtccacttcagccgtccaaagtgctgggattacaagcgtgagccactgtgctgggcccgaggccctgacttcttgctgtaactttccatgcattttttttaaaaggagcagtgtggattttcgcaccctttgtgaactaagttcaatgcgctctatccaaatttgcctaattgaactataagaaagtaataattccattttctatcccctcagggactgaacaaatggaaataactcccaggcagtatcaggtggtcactacagagacttccacaaaaacttttgaatgatgtgaaacacgatgtcatgaataagggttgagccaactatagctctgtgttcctactgggctttccctaatgtggttgggagttatgccctagactaactgtattgtcctagtcacagctccttgctttgatttcatccttgataaaatgaagatgaaacttacactacttctccaagccttttgctgtcttaagaataagacctgagattaacactaaccctagaatagaaatgtaatagggagatggtaataaaggagtttttctggcacataccctccctacagaatttctgttgctccccagatccagtgaagaattgcagtttcatttattttgtaccagtcagctcttaattaagtacatgaatggagaggagcagtggtgcacataatccaaatcagtgaataccattttctggtgaattacccacccctttgcccctgctaccccgagggttaccatgattgtcaacagcagcaggagcccttccacagggcttggtaaaaaaaccagttgaggtgttaatgaccctttttgctgggtgtaaaacaaagcatctttaaccactgttcattaaacccagctgctcttaccaaggctttgaaggagaaatctggggttcc

SEQ ID NO: 450999 - DNA, 3458 bp, Homo sapiens
tggtgcggcgacatctagtaggatccccacccagcattacatcgcgtcgatcgaaggattggattggcatctttagacgtggggtggaagacaacccgtgagtattacaccttcatgtgggttactttgcccattgacctaaacaacaaatcagctaaacagcaggaagtccaattcaaagcttactacctgcccaaggatgatgagtattaccagttctgctatgtggatgaggatggtgtggtccggggagcaagtattcctttccaattccgtccagaaaatgaggaagacatcctggttgttaccactcagggagaggtggaagagattgagcagcacaacaaggagctttgcaaagaaaaccaggagctgaaggacagctgtatcagcctccagaagcagaactcagacatgcaggctgagctccaaaagaagcaggaggagctagaaaccctacagagcatcaataagaagttggaactgaaagtgaaagaacagaaggactattgggagacagagctgcttcaactgaaagaacaaaaccagaagatgtcctcagaaaatgagaagatgggaatcagagtggatcagcttcaggcccagctgtcaactcaagagaaagaaatggagaagcttgttcagggagatcaagataagacagagcagttagagcagctgaaaaaggaaaatgaccacctctttctcagtttaactgaacagaggaaggaccagaagaagctcgagcagacagtggagcaaatgaagcagaatgaaactactgcaatgaagaaacaacaggaattaatggatgaaaactttgacctgtcaaaaagactgagtgagaacgaaattatatgtaatgctctgcagagacagaaagagagattggaaggagaaaatgatcttttgaagagggagaacagcagattgctcagttacatgggtctggattttaattctttgccgtatcaagtacctacttcagatgaaggaggcgcaagacaaaatccaggacttgcctatggaaacccatattctggtatccaagaaagttcttcccccagcccgctctccatcaagaaatgccctatctgcaaagcagatgatatttgtgatcacaccttggagcaacagcagatgcagcccctttgtttcaattgtccaatttgtgacaagatcttcccagctacagagaagcagatctttgaagaccacgtgttctgccactctctctgagtatcccaacctcttggatgtatacagagattttatagaatagaacctatagcttctaccatgagttatatgagtcaagatcctgcctaacctgaaattattagggatttactcagccctgctgccgctaacagtggagttatgtcactgatctgaaggtcactgttaagggcttctgctgccatccttgtgggttgctacctttaagtcgcataactctagctgtatcatcctctcacctgtcattcttctgagggtctcagtacaagggccctgggatggagccaacctgggtattcacaacaggcctgacttgatactaagtgattagttttccaagttgtcccactgccattcaaagtcagcccttgagtgtatttgttctcagtcctaaccctggggccagagattggtccgaggttgagaattccttcctcctcatccttggtgttgctttctccaaatgattgttttagactagccaaaaatgccgtggcaaagagctcagaaatccaatttggataccaaaggtttctcatgttaatttctcagcccccaaagaagcatcttactcctgaaccttagacaggaagtattgtttcagtcacagaaagcttttctgggtacctctggttagcactttctactctctgatatttcctatgtacatagcttttattgttgtaaatcctttcttaatggttaaataggattgttagcaactatgggtttgcagttttctgagtaggtgagttttgaatatgggtaaatcagaataatgagacaacttgttaatctctttaatactaaaaataaattactcttctatttcagggacttaggtaatttaaaataaaccttcaatttatggtcttctgttttgaagctcatgggaaaattgtgatcaaaagggctatgggaagggcagaccccgccaatgatttctcttcacctgtcttaagattaaataaaaaagagtgtcctggcagttatcttgaggtggggaaggaggtgatgaaacattagtttgtgaaatccaaggccctggcttgctttctttctttttttttttttttttttttgaaacagtctctctctgtcacccaggctggcgtgcaatggcgcagttgactcactacagcctctgcctcccaggttcaagcgattctcatgccttagcctcccaagtagctgggattacaggtgtgtgccgcaatgcccagctaatttttgtgtttttagtagagacagggtttcactatgttggccaggctggtctcgaactcctggcctcacgtgatctgtccacttcagccgtccaaagtgctgggattacaagcgtgagccactgtgctgggcccgaggccctgacttcttgctgtaactttccatgcattttttttaaaaggagcagtgtggattttcgcaccctttgtgaactaagttcaatgcgctctatccaaatttgcctaattgaactataagaaagtaataattccattttctatcccctcagggactgaacaaatggaaataactcccaggcagtatcaggtggtcactacagagacttccacaaaaacttttgaatgatgtgaaacacgatgtcatgaataagggttgagccaactatagctctgtgttcctactgggctttccctaatgtggttgggagttatgccctagactaactgtattgtcctagtcacagctccttgctttgatttcatccttgataaaatgaagatgaaacttacactacttctccaagccttttgctgtcttaagaataagacctgagattaacactaaccctagaatagaaatgtaatagggagatggtaataaaggagtttttctggcacataccctccctacagaatttctgttgctccccagatccagtgaagaattgcagtttcatttattttgtaccagtcagctcttaattaagtacatgaatggagaggagcagtggtgcacataatccaaatcagtgaataccattttctggtgaattacccacccctttgcccctgctaccccgagggttaccatgattgtcaacagcagcaggagcccttccacagggcttggtaaaaaaaccagttgaggtgttaatgaccctttttgctgggtgtaaaacaaagcatctttaaccactgttcattaaacccagctgctcttaccaaggctttgaaggagaaatctggggttcc

SEQ ID NO: 451000 - DNA, 2759 bp, Homo sapiens
tcgacccacgcgtcgcccacgcgtcgcggacgcgtgggtcgactcgagcagacagtggagcaaatgaagcagaatgaaactactgcaatgaagaaacaacaggaattaatggatgaaaactttgacctgtcaaaaagactgagtgagaacgaaattatatgtaatgctctgcagagacagaaagagagattggaaggagaaaatgatcttttgaagagggagaacagcagattgctcagttacatgggtctggattttaattctttgccgtatcaagtacctacttcagatgaaggaggcgcaagacaaaatccaggacttgcctatggaaacccatattctggtatccaagaaagttcttcccccagcccgctctccatcaagaaatgccctatctgcaaagcagatgatatttgtgatcacaccttggagcaacagcagatgcagcccctttgtttcaattgtccaatttgtgacaagatcttcccagctacagagaagcagatctttgaagaccacgtgttctgccactctctctgagtatcccaacctcttggatgtatacagagattttatagaatagaacctatagcttctaccatgagttatatgagtcaagatcctgcctaacctgaaattattagggatttactcagccctgctgccgctaacagtggagttatgtcactgatctgaaggtcactgttaagggcttctgctgccatccttgtgggttgctacctttaagtcgcataactctagctgtatcatcctctcacctgtcattcttctgagggtctcagtacaagggccctgggatggagccaacctgggtattcacaacaggcctgacttgatactaagtgattagttttccaagttgtcccactgccattcaaagtcagcccttgagtgtatttgttctcagtcctaaccctggggccagagattggtccgaggttgagaattccttcctcctcatccttggtgttgctttctccaaatgattgttttagactagccaaaaatgccgtggcaaagagctcagaaatccaatttggataccaaaggtttctcatgttaatttctcagcccccaaagaagcatcttactcctgaaccttagacaggaagtattgtttcagtcacagaaagcttttctgggtacctctggttagcactttctactctctgatatttcctatgtacatagcttttattgttgtaaatcctttcttaatggttaaataggattgttagcaactatgggtttgcagttttctgagtaggtgagttttgaatatgggtaaatcagaataatgagacaacttgttaatctctttaatactaaaaataaattactcttctatttcagggacttaggtaatttaaaataaaccttcaatttatggtcttctgttttgaagctcatgggaaaattgtgatcaaaagggctatgggaagggcagaccccgccaatgatttctcttcacctgtcttaagattaaataaaaaagagtgtcctggcagttatcttgaggtggggaaggaggtgatgaaacattagtttgtgaaatccaaggccctggcttgctttctttctttttttttttttttttttttgaaacagtctctctctgtcacccaggctggcgtgcaatggcgcagttgactcactacagcctctgcctcccaggttcaagcgattctcatgccttagcctcccaagtagctgggattacaggtgtgtgccgcaatgcccagctaatttttgtgtttttagtagagacagggtttcactatgttggccaggctggtctcgaactcctggcctcacgtgatctgtccacttcagccgtccaaagtgctgggattacaagcgtgagccactgtgctgggcccgaggccctgacttcttgctgtaactttccatgcattttttttaaaaggagcagtgtggattttcgcaccctttgtgaactaagttcaatgcgctctatccaaatttgcctaattgaactataagaaagtaataattccattttctatcccctcagggactgaacaaatggaaataactcccaggcagtatcaggtggtcactacagagacttccacaaaaacttttgaatgatgtgaaacacgatgtcatgaataagggttgagccaactatagctctgtgttcctactgggctttccctaatgtggttgggagttatgccctagactaactgtattgtcctagtcacagctccttgctttgatttcatccttgataaaatgaagatgaaacttacactacttctccaagccttttgctgtcttaagaataagacctgagattaacactaaccctagaatagaaatgtaatagggagatggtaataaaggagtttttctggcacataccctccctacagaatttctgttgctccccagatccagtgaagaattgcagtttcatttattttgtaccagtcagctcttaattaagtacatgaatggagaggagcagtggtgcacataatccaaatcagtgaataccattttctggtgaattacccacccctttgcccctgctaccccgagggttaccatgattgtcaacagcagcaggagcccttccacagggcttggtaaaaaaaccagttgaggtgttaatgaccctttttgctgggtgtaaaacaaagcatctttaaccactgttcattaaacccagctgctcttaccaaggctttgaaggagaaatctggggttcc

SEQ ID NO: 451001 - DNA, 2712 bp, Homo sapiens
  misc_feature (20)..(20): n is a, c, g, or t
cttaggctaggtacgaggcngggtgttgtgaaactactgcatgaagaaacaacaggaattaatggatgaaaactttgacctgtcaaaaagactgagtgagaacgaaattatatgtaatgctctgcagagacagaaagagagattggaaggagaaaatgatcttttgaagagggagaacagcagattgctcagttacatgggtctggattttaattctttgccgtatcaagtacctacttcagatgaaggaggcgcaagacaaaatccaggacttgcctatggaaacccatattctggtatccaagaaagttcttcccccagcccgctctccatcaagaaatgccctatctgcaaagcagatgatatttgtgatcacaccttggagcaacagcagatgcagcccctttgtttcaattgtccaatttgtgacaagatcttcccagctacagagaagcagatctttgaagaccacgtgttctgccactctctctgagtatcccaacctcttggatgtatacagagattttatagaatagaacctatagcttctaccatgagttatatgagtcaagatcctgcctaacctgaaattattagggatttactcagccctgctgccgctaacagtggagttatgtcactgatctgaaggtcactgttaagggcttctgctgccatccttgtgggttgctacctttaagtcgcataactctagctgtatcatcctctcacctgtcattcttctgagggtctcagtacaagggccctgggatggagccaacctgggtattcacaacaggcctgacttgatactaagtgattagttttccaagttgtcccactgccattcaaagtcagcccttgagtgtatttgttctcagtcctaaccctggggccagagattggtccgaggttgagaattccttcctcctcatccttggtgttgctttctccaaatgattgttttagactagccaaaaatgccgtggcaaagagctcagaaatccaatttggataccaaaggtttctcatgttaatttctcagcccccaaagaagcatcttactcctgaaccttagacaggaagtattgtttcagtcacagaaagcttttctgggtacctctggttagcactttctactctctgatatttcctatgtacatagcttttattgttgtaaatcctttcttaatggttaaataggattgttagcaactatgggtttgcagttttctgagtaggtgagttttgaatatgggtaaatcagaataatgagacaacttgttaatctctttaatactaaaaataaattactcttctatttcagggacttaggtaatttaaaataaaccttcaatttatggtcttctgttttgaagctcatgggaaaattgtgatcaaaagggctatgggaagggcagaccccgccaatgatttctcttcacctgtcttaagattaaataaaaaagagtgtcctggcagttatcttgaggtggggaaggaggtgatgaaacattagtttgtgaaatccaaggccctggcttgctttctttctttttttttttttttttttttgaaacagtctctctctgtcacccaggctggcgtgcaatggcgcagttgactcactacagcctctgcctcccaggttcaagcgattctcatgccttagcctcccaagtagctgggattacaggtgtgtgccgcaatgcccagctaatttttgtgtttttagtagagacagggtttcactatgttggccaggctggtctcgaactcctggcctcacgtgatctgtccacttcagccgtccaaagtgctgggattacaagcgtgagccactgtgctgggcccgaggccctgacttcttgctgtaactttccatgcattttttttaaaaggagcagtgtggattttcgcaccctttgtgaactaagttcaatgcgctctatccaaatttgcctaattgaactataagaaagtaataattccattttctatcccctcagggactgaacaaatggaaataactcccaggcagtatcaggtggtcactacagagacttccacaaaaacttttgaatgatgtgaaacacgatgtcatgaataagggttgagccaactatagctctgtgttcctactgggctttccctaatgtggttgggagttatgccctagactaactgtattgtcctagtcacagctccttgctttgatttcatccttgataaaatgaagatgaaacttacactacttctccaagccttttgctgtcttaagaataagacctgagattaacactaaccctagaatagaaatgtaatagggagatggtaataaaggagtttttctggcacataccctccctacagaatttctgttgctccccagatccagtgaagaattgcagtttcatttattttgtaccagtcagctcttaattaagtacatgaatggagaggagcagtggtgcacataatccaaatcagtgaataccattttctggtgaattacccacccctttgcccctgctaccccgagggttaccatgattgtcaacagcagcaggagcccttccacagggcttggtaaaaaaaccagttgaggtgttaatgaccctttttgctgggtgtaaaacaaagcatctttaaccactgttcattaaacccagctgctcttaccaaggctttgaaggagaaatctggggttcc

SEQ ID NO: 451002 - DNA, 2429 bp, Homo sapiens
ggtccgtctcttcttctgaatcaagaaagtcttcccccagccctctccatcaagaaatgccctatctgcaaagcagatgatatttgtgatcacaccttggagcaacagcagatgcagcccctttgtttcaattgtccaatttgtgacaagatcttcccagctacagagaagcagatctttgaagaccacgtgttctgccactctctctgagtatcccaacctcttggatgtatacagagattttatagaatagaacctatagcttctaccatgagttatatgagtcaagatcctgcctaacctgaaattattagggatttactcagccctgctgccgctaacagtggagttatgtcactgatctgaaggtcactgttaagggcttctgctgccatccttgtgggttgctacctttaagtcgcataactctagctgtatcatcctctcacctgtcattcttctgagggtctcagtacaagggccctgggatggagccaacctgggtattcacaacaggcctgacttgatactaagtgattagttttccaagttgtcccactgccattcaaagtcagcccttgagtgtatttgttctcagtcctaaccctggggccagagattggtccgaggttgagaattccttcctcctcatccttggtgttgctttctccaaatgattgttttagactagccaaaaatgccgtggcaaagagctcagaaatccaatttggataccaaaggtttctcatgttaatttctcagcccccaaagaagcatcttactcctgaaccttagacaggaagtattgtttcagtcacagaaagcttttctgggtacctctggttagcactttctactctctgatatttcctatgtacatagcttttattgttgtaaatcctttcttaatggttaaataggattgttagcaactatgggtttgcagttttctgagtaggtgagttttgaatatgggtaaatcagaataatgagacaacttgttaatctctttaatactaaaaataaattactcttctatttcagggacttaggtaatttaaaataaaccttcaatttatggtcttctgttttgaagctcatgggaaaattgtgatcaaaagggctatgggaagggcagaccccgccaatgatttctcttcacctgtcttaagattaaataaaaaagagtgtcctggcagttatcttgaggtggggaaggaggtgatgaaacattagtttgtgaaatccaaggccctggcttgctttctttctttttttttttttttttttttgaaacagtctctctctgtcacccaggctggcgtgcaatggcgcagttgactcactacagcctctgcctcccaggttcaagcgattctcatgccttagcctcccaagtagctgggattacaggtgtgtgccgcaatgcccagctaatttttgtgtttttagtagagacagggtttcactatgttggccaggctggtctcgaactcctggcctcacgtgatctgtccacttcagccgtccaaagtgctgggattacaagcgtgagccactgtgctgggcccgaggccctgacttcttgctgtaactttccatgcattttttttaaaaggagcagtgtggattttcgcaccctttgtgaactaagttcaatgcgctctatccaaatttgcctaattgaactataagaaagtaataattccattttctatcccctcagggactgaacaaatggaaataactcccaggcagtatcaggtggtcactacagagacttccacaaaaacttttgaatgatgtgaaacacgatgtcatgaataagggttgagccaactatagctctgtgttcctactgggctttccctaatgtggttgggagttatgccctagactaactgtattgtcctagtcacagctccttgctttgatttcatccttgataaaatgaagatgaaacttacactacttctccaagccttttgctgtcttaagaataagacctgagattaacactaaccctagaatagaaatgtaatagggagatggtaataaaggagtttttctggcacataccctccctacagaatttctgttgctccccagatccagtgaagaattgcagtttcatttattttgtaccagtcagctcttaattaagtacatgaatggagaggagcagtggtgcacataatccaaatcagtgaataccattttctggtgaattacccacccctttgcccctgctaccccgagggttaccatgattgtcaacagcagcaggagcccttccacagggcttggtaaaaaaaccagttgaggtgttaatgaccctttttgctgggtgtaaaacaaagcatctttaaccactgttcattaaacccagctgctcttaccaaggctttgaaggagaaatctggggttcc

SEQ ID NO: 451003 - DNA, 1243 bp, Homo sapiens
caggcgggtcgggctctcccttgggtgcttagccccgcccccgtcccactctgccctgttgctgtcgcgccgctgctggttgctgtccctggacccctaccatggaggagaccatcaaagatccccccacatcagctgtcttgctggatcactgtcatttctctcaggtcatctttaacagtgtggagaagttctacatccctggaggggacgtcacatgtcattataccttcacccagcatttcatccctcgtcgaaaggattggattggcatctttagagtggggtggaagacaacccgtgagtattacaccttcatgtgggttactttgcccattgacctaaacaacaaatcagctaaacagcaggaagtccaattcaaagcttactacctgcccaaggatgatgagtattaccagttctgctatgtggatgaggatggtgtggtccggggagcaagtattcctttccaattccgtccagaaaatgaggaagacatcctggttgttaccactcagggagaggtggaagagattgagcagcacaacaaggagctttgcaaagaaaaccaggagctgaaggacagctgtatcagcctccagaagcagaactcagacatgcaggctgagctccaaaagaagcaggaggagctagaaaccctacagagcatcaataagaagttggaactgaaagtgaaagaacagaaggactattgggagacagagctgcttcaactgaaagaacaaaaccagaagatgtcctcagaaaatgagaagatgggaatcagagtggatcagcttcaggcccagctgtcaactcaagagaaagaaatggagaagcttgttcagggagatcaagataagacagagcagttagagcagctgaaaaaggaaaatgaccacctctttctcagtttaactgaacagaggaaggaccagaagaagctcgagcagacagtggagcaaatgaagcagaatgaaactactgcaatgaagaaacaacaggaattaatggatgaaaactttgacctgtcaaaaagactgagtgagaacgaaattatatgtaatgctctgcagagacagaaagagagattggaaggagaaaatgatgtaagtgtgtgaaagagggtataaaaccccaaggttttaaggggaaggatcagggtggcccagagatgtagtgaaaaaaataaaaagttaagggccctttctgggacagtgggtgaaacagttgttcctaaacg

SEQ ID NO: 451004 - DNA, 1156 bp, Homo sapiens
caggcgggtcgggctctcccttgggtgcttagccccgcccccgtcccactctgccctgttgctgtcgcgccgctgctggttgctgtccctggacccctaccatggaggagaccatcaaagatccccccacatcagctgtcttgctggatcactgtcatttctctcaggtcatctttaacagtgtggagaagttctacatccctggaggggacgtcacatgtcattataccttcacccagcatttcatccctcgtcgaaaggattggattggcatctttagagtggggtggaagacaacccgtgagtattacaccttcatgtgggttactttgcccattgacctaaacaacaaatcagctaaacagcaggaagtccaattcaaagcttactacctgcccaaggatgatgagtattaccagttctgctatgtggatgaggatggtgtggtccggggagcaagtattcctttccaattccgtccagaaaatgaggaagacatcctggttgttaccactcagggagaggtggaagagattgagcagcacaacaaggagctttgcaaagaaaaccaggagctgaaggacagctgtatcagcctccagaagcagaactcagacatgcaggctgagctccaaaagaagcaggaggagctagaaaccctacagagcatcaataagaagttggaactgaaagtgaaagaacagaaggactattgggagacagagctgcttcaactgaaagaacaaaaccagaagatgtcctcagaaaatgagaagatgggaatcagagtggatcagcttcaggcccagctgtcaactcaagagaaagaaatggagaagcttgttcagggagatcaagataagacagagcagttagagcagctgaaaaaggaaaatgaccacctctttctcagtttaactgaacaggtagagtcatgagagaaaacaacacttttaggcatttgcaagaaaatatacgttgttctttgtataaagaacattttaatgttctttaatatacctggatgtcactggctttaggaaagggctcagaggaagctatctgaaatgagatagctcatggctttcttcagaaactgacgagagaagacttgcctctccctatgcatcctgcttgctcattagcttaacaggcc

SEQ ID NO: 451005 - DNA, 1631 bp, Homo sapiens
  misc_feature (1631)..(1631): n is a, c, g, or t
aggcaaggctgtacggtccggagtttttggagcagccgctgcatcctccgtgcccggcctgagctggagtcccccgcgccccccgcgttccgcccggccatggctgcggtggcgctgatgccaccgccgctgctgctgctgctgctgttggcgtcgccgcccgccgcctccgcgccgtccgcccgcgatcccttcgccccccagctcggggacacgcagaactgccagctgcggtgccgcgaccgcgacctcggcccgcagccctcgcaggcggggctggagggcgcctccgagtctccctatgacagagccgttctgatcagcgcttgcgagcgtggctgccgcctcttctccatctgccgatttgtggccagaagctccaagcccaatgccacccaaactgagtgtgaagcagcctgcgtggaagcctatgtgaaggaggcagagcagcaggcctgtagccacggctgctggagccagcccgcggagcctgagccggagcagaagagaaaggtcctggaggctccaagtggggccctctccctcttggacttgttttccaccctctgcaatgacctcgtcaactcagcccagggatttgtctcctccacctggacatactacttgcagactgacaatgggaaagtggtggtgtttcagactcagcccatagtggagagcctcggcttccaggggggccgtctgcagcgcgtggaggtgacctggcgaggctcccaccctgaagccctggaggtgcacgtggaccctgtaggccccctggacaaggtgaggaaggccaagatccgagtcaagaccagcagcaaggccaaggtggagtctgaagagccacaggacaatgacttcctcagttgcatgtcccggcgctcgggtctgcctcgctggatcctggcctgctgcctcttcctctccgtgctggtgatgctgtggctgagctgctccaccctggtgaccgcgcctggccagcacctcaagttccagcctctgaccctggagcagcacaagggcttcatgatggagcccgattggcccctgtacccgccgccgtcccacgcctgtgaggacagcctaccaccctacaagctgaagctggacctgaccaagctgtaggcctccactggccccatcactgccaactgcagggggcccctcgggcctcacttgccctgagcccaggagtccaagggcagggtgggtccagccttgagcccctccacccccaaatccttcctctcctcccagtcccaccccttgccccacggagtcctggggacgcagtgccccagctgggaagagggcgggatcgggcactggttcctccttgtccccgctttcttgggggcttgctactttttgtcttctattgtgtggctttctgagtatttgaaccccagtcctgtgtcaccttcctttttccttctctgtcccctctctgcgggggggcgctgaggctgagggggagctgcgtcttgctagggcttcccccttctccccatcccggtctccagagacccagcttctgagagacagggtgtgggcatctccatgcccctataaagcgtgcctggggcttgtctggggctggggaggaataaaccatgtatataaaagan

SEQ ID NO: 451006 - DNA, 2084 bp, Homo sapiens
  misc_feature (1717)..(1717): n is a, c, g, or t
gaaaaagcaggaaggcacggagtccctcgccttcgccctggctgcgctgtccccttcgcgcgcgggatgggtttgaggctgcctcgctcgggtgacgtcagcgccccggtccccgccgcagccgctgcatcctccgtgcccggcctgagctggagtcccccgcgccccccgcgttccgcccggccatggctgcggtggcgctgatgccaccgccgctgctgctgctgctgctgttggcgtcgccgcccgccgcctccgcgccgtccgcccgcgatcccttcgccccccagctcggggacacgcagaactgccagctgcggtgccgcgaccgcgacctcggcccgcagccctcgcaggcggggctggagggcgcctccgagtctccctatgacagagccgttctgatcagcgcttgcgagcgtggctgccgcctcttctccatctgccgatttgtggccagaagctccaagcccaatgccacccaaactgagtgtgaagcagcctgcgtggaagcctatgtgaaggaggcagagcagcaggcctgtagccacggctgctggagccagcccgcggagcctgagccggagcagaagagaaaggtcctggaggctccaagtggggccctctccctcttggacttgttttccaccctctgcaatgacctcgtcaactcagcccagggatttgtctcctccacctggacatactacttgcagactgacaatgggaaagtggtggtgtttcagactcagcccatagtggagagcctcggcttccaggggggccgtctgcagcgcgtggaggtgacctggcgaggctcccaccctgaagccctggaggtgcacgtggaccctgtaggccccctggacaaggtgaggaaggccaagatccgagtcaagaccagcagcaaggccaaggtggagtctgaagagccacaggacaatgacttcctcagttgcatgtcccggcgctcgggtctgcctcgctggatcctggcctgctgcctcttcctctccgtgctggtgatgctgtggctgagctgctccaccctggtgaccgcgcctggccagcacctcaagttccagcctctgaccctggagcagcacaagggcttcatgatggagcccgattggcccctgtacccgccgccgtcccacgcctgtgaggacagcctaccaccctacaagctgaagctggacctgaccaagctgtaggcctccactggccccatcactgccaactgcagggggcccctcgggcctcacttgccctgagcccaggagtccaagggcagggtgggtccagccttgagcccctccacccccaaatccttcctctcctcccagtcccaccccttgccccacggagtcctggggacgcagtgccccagctgggaagagggcgggatcgggcactggttcctccttgtccccgctttcttgggggcttgctactttttgtcttctattgtgtggctttctgagtatttgaaccccagtcctgtgtcaccttcctttttccttctctgtcccctctctgcgggggggcgctgaggctgagggggagctgcgtcttgctagggcttcccccttctccccatcccggtctccagagacccagcttctgagagacagggtgtgggcatctccatgcccctataaagcgtgcctggggcttgtctggggctggggaggaataaaccatgtatataaaaganaaaaaaaaaaaaaaaaaaaaaaaaaaaaaaaaaaaaaaaaaaaaaaaaaacaacaaaaaaacaaaaaaaaaaaggggccacacacaaaaaaccccccacaaggggacaaagcaaacagcacaacaagaagaaagagacaagaggggccccccaaaaaaaagacaaaaaaacaaaaggcaaagaatgcacggaagaaacacaccaccgagaaagaggaacaacagcgcaaacgggagaaaaaaggagagaaaaacaaacatcacaaagagcaagagaacacaaataaaagacaacaaaaaaccacacaacaagaaacaaaagacacacaaaaagagaaaacaaaaaagaaagaaaagcacgacacaaa

SEQ ID NO: 451007 - DNA, 1667 bp, Homo sapiens
  misc_feature (1667)..(1667): n is a, c, g, or t
gaaaaagcaggaaggcacggagtccctcgccttcgccctggctgcgctgtccccttcgcgcgcgggatgggtttgaggctgcctcgctcgggtgacgtcagcgccccggtccccgccgcagccgctgcatcctccgtgcccggcctgagctggagtcccccgcgccccccgcgttccgcccggccatggctgcggtggcgctgatgccaccgccgctgctgctgctgctgctgttggcgtcgccgcccgccgcctccgcgccgtccgcccgcgatcccttcgccccccagctcggggacacgcagaactgccagctgcggtgccgcgaccgcgacctcggcccgcagccctcgcaggcggggctggagggcgcctccgagtctccctatgacagagccgttctgatcagcgcttgcgagcgtggctgccgcctcttctccatctgccgatttgtggccagaagctccaagcccaatgccacccaaactgagtgtgaagcagcctgcgtggaagcctatgtgaaggaggcagagcagcaggcctgtagccacggctgctggagccagcccgcggagcctgagccggagcagaagagaaaggtcctggaggctccaagtggggccctctccctcttggacttgttttccaccctctgcaatgacctcgtcaactcagcccagggatttgtctcctccacctggacatactacttgcagactgacaatgggaaagtggtggtgtttcagactcagcccatagtggagagcctcggcttccaggggggccgtctgcagcgcgtggaggtgacctggcgaggctcccaccctgaagccctggaggtgcacgtggaccctgtaggccccctggacaaggtgaggaaggccaagatccgagtcaagaccagcagcaaggccaaggcgctcgggtctgcctcgctggatcctggcctgctgcctcttcctctccgtgctggtgatgctgtggctgagctgctccaccctggtgaccgcgcctggccagcacctcaagttccagcctctgaccctggagcagcacaagggcttcatgatggagcccgattggcccctgtacccgccgccgtcccacgcctgtgaggacagcctaccaccctacaagctgaagctggacctgaccaagctgtaggcctccactggccccatcactgccaactgcagggggcccctcgggcctcacttgccctgagcccaggagtccaagggcagggtgggtccagccttgagcccctccacccccaaatccttcctctcctcccagtcccaccccttgccccacggagtcctggggacgcagtgccccagctgggaagagggcgggatcgggcactggttcctccttgtccccgctttcttgggggcttgctactttttgtcttctattgtgtggctttctgagtatttgaaccccagtcctgtgtcaccttcctttttccttctctgtcccctctctgcgggggggcgctgaggctgagggggagctgcgtcttgctagggcttcccccttctccccatcccggtctccagagacccagcttctgagagacagggtgtgggcatctccatgcccctataaagcgtgcctggggcttgtctggggctggggaggaataaaccatgtatataaaagan

SEQ ID NO: 451008 - DNA, 1046 bp, Homo sapiens
gaaaaagcaggaaggcacggagtccctcgccttcgccctggctgcgctgtccccttcgcgcgcgggatgggtttgaggctgcctcgctcgggtgacgtcagcgccccggtccccgccgcagccgctgcatcctccgtgcccggcctgagctggagtcccccgcgccccccgcgttccgcccggccatggctgcggtggcgctgatgccaccgccgctgctgctgctgctgctgttggcgtcgccgcccgccgcctccgcgccgtccgcccgcgatcccttcgccccccagctcggggacacgcagaactgccagctgcggtgccgcgaccgcgacctcggcccgcagccctcgcaggcggggctggagggcgcctccgagtctccctatgacagagccgttctgatcagcgcttgcgagcgtggctgccgcctcttctccatctgccgatttgtggccagaagctccaagcccaatgccacccaaactgagtgtgaagcagcctgcgtggaagcctatgtgaaggaggcagagcagcaggcctgtagccacggctgctggagccagcccgcggagcctgagccggagcagaagagaaaggtcctggaggctccaagtggggccctctccctcttggacttgttttccaccctctgcaatgacctcgtcaactcagcccagggatttgtctcctccacctggacatactacttgcagactgacaatgggaaagtggtggtgtttcagactcagcccatagtggagagcctcggcttccaggggggccgtctgcagcgcgtggaggtgacctggcgaggctcccaccctgaagccctggaggtgcacgtgggtaaggtgcaacctagaccagtgttccttccatgggtggccccactgccacaaggagtcggcctggcaaacagaccttctaggatcgggatctccatctctcaagtcctgggttccatggctcatcccccaggtctccatggtctatttcccagggttccatggtccacctcccagggttccatggtccacttctca

SEQ ID NO: 451009 - DNA, 1717 bp, Homo sapiens
  misc_feature (1717)..(1717): n is a, c, g, or t
gaaaaagcaggaaggcacggagtccctcgccttcgccctggctgcgctgtccccttcgcgcgcgggatgggtttgaggctgcctcgctcgggtgacgtcagcgccccggtccccgccgcagccgctgcatcctccgtgcccggcctgagctggagtcccccgcgccccccgcgttccgcccggccatggctgcggtggcgctgatgccaccgccgctgctgctgctgctgctgttggcgtcgccgcccgccgcctccgcgccgtccgcccgcgatcccttcgccccccagctcggggacacgcagaactgccagctgcggtgccgcgaccgcgacctcggcccgcagccctcgcaggcggggctggagggcgcctccgagtctccctatgacagagccgttctgatcagcgcttgcgagcgtggctgccgcctcttctccatctgccgatttgtggccagaagctccaagcccaatgccacccaaactgagtgtgaagcagcctgcgtggaagcctatgtgaaggaggcagagcagcaggcctgtagccacggctgctggagccagcccgcggagcctgagccggagcagaagagaaaggtcctggaggctccaagtggggccctctccctcttggacttgttttccaccctctgcaatgacctcgtcaactcagcccagggatttgtctcctccacctggacatactacttgcagactgacaatgggaaagtggtggtgtttcagactcagcccatagtggagagcctcggcttccaggggggccgtctgcagcgcgtggaggtgacctggcgaggctcccaccctgaagccctggaggtgcacgtggaccctgtaggccccctggacaaggtgaggaaggccaagatccgagtcaagaccagcagcaaggccaaggtggagtctgaagagccacaggacaatgacttcctcagttgcatgtcccggcgctcgggtctgcctcgctggatcctggcctgctgcctcttcctctccgtgctggtgatgctgtggctgagctgctccaccctggtgaccgcgcctggccagcacctcaagttccagcctctgaccctggagcagcacaagggcttcatgatggagcccgattggcccctgtacccgccgccgtcccacgcctgtgaggacagcctaccaccctacaagctgaagctggacctgaccaagctgtaggcctccactggccccatcactgccaactgcagggggcccctcgggcctcacttgccctgagcccaggagtccaagggcagggtgggtccagccttgagcccctccacccccaaatccttcctctcctcccagtcccaccccttgccccacggagtcctggggacgcagtgccccagctgggaagagggcgggatcgggcactggttcctccttgtccccgctttcttgggggcttgctactttttgtcttctattgtgtggctttctgagtatttgaaccccagtcctgtgtcaccttcctttttccttctctgtcccctctctgcgggggggcgctgaggctgagggggagctgcgtcttgctagggcttcccccttctccccatcccggtctccagagacccagcttctgagagacagggtgtgggcatctccatgcccctataaagcgtgcctggggcttgtctggggctggggaggaataaaccatgtatataaaagan

SEQ ID NO: 451010 - DNA, 1630 bp, Homo sapiens
  misc_feature (25)..(25): n is a, c, g, or t
  misc_feature (1630)..(1630): n is a, c, g, or t
ccaggctggtacgccctcggtgtantggatgcagccgctgcatcctccgtgcccggcctgagctggagtcccccgcgccccccgcgttccgcccggccatggctgcggtggcgctgatgccaccgccgctgctgctgctgctgctgttggcgtcgccgcccgccgcctccgcgccgtccgcccgcgatcccttcgccccccagctcggggacacgcagaactgccagctgcggtgccgcgaccgcgacctcggcccgcagccctcgcaggcggggctggagggcgcctccgagtctccctatgacagagccgttctgatcagcgcttgcgagcgtggctgccgcctcttctccatctgccgatttgtggccagaagctccaagcccaatgccacccaaactgagtgtgaagcagcctgcgtggaagcctatgtgaaggaggcagagcagcaggcctgtagccacggctgctggagccagcccgcggagcctgagccggagcagaagagaaaggtcctggaggctccaagtggggccctctccctcttggacttgttttccaccctctgcaatgacctcgtcaactcagcccagggatttgtctcctccacctggacatactacttgcagactgacaatgggaaagtggtggtgtttcagactcagcccatagtggagagcctcggcttccaggggggccgtctgcagcgcgtggaggtgacctggcgaggctcccaccctgaagccctggaggtgcacgtggaccctgtaggccccctggacaaggtgaggaaggccaagatccgagtcaagaccagcagcaaggccaaggtggagtctgaagagccacaggacaatgacttcctcagttgcatgtcccggcgctcgggtctgcctcgctggatcctggcctgctgcctcttcctctccgtgctggtgatgctgtggctgagctgctccaccctggtgaccgcgcctggccagcacctcaagttccagcctctgaccctggagcagcacaagggcttcatgatggagcccgattggcccctgtacccgccgccgtcccacgcctgtgaggacagcctaccaccctacaagctgaagctggacctgaccaagctgtaggcctccactggccccatcactgccaactgcagggggcccctcgggcctcacttgccctgagcccaggagtccaagggcagggtgggtccagccttgagcccctccacccccaaatccttcctctcctcccagtcccaccccttgccccacggagtcctggggacgcagtgccccagctgggaagagggcgggatcgggcactggttcctccttgtccccgctttcttgggggcttgctactttttgtcttctattgtgtggctttctgagtatttgaaccccagtcctgtgtcaccttcctttttccttctctgtcccctctctgcgggggggcgctgaggctgagggggagctgcgtcttgctagggcttcccccttctccccatcccggtctccagagacccagcttctgagagacagggtgtgggcatctccatgcccctataaagcgtgcctggggcttgtctggggctggggaggaataaaccatgtatataaaagan

SEQ ID NO: 451011 - DNA, 1819 bp, Homo sapiens
  misc_feature (1819)..(1819): n is a, c, g, or t
gaaaaagcaggaaggcacggagtccctcgccttcgccctggctgcgctgtccccttcgcgcgcgggatgggtttgaggctgcctcgctcgggtgacgtcagcgccccggtccccgccgcagccgctgcatcctccgtgcccggcctgagctggagtcccccgcgccccccgcgttccgcccggccatggctgcggtggcgctgatgccaccgccgctgctgctgctgctgctgttggcgtcgccgcccgccgcctccgcgccgtccgcccgcgatcccttcgccccccagctcggggacacgcagaactgccagctgcggtgccgcgaccgcgacctcggcccgcagccctcgcaggcggggctggagggcgcctccgagtctccctatgacagagccgttctgatcagcgcttgcgagcgtggctgccgcctcttctccatctgccgatttgtggccagaagctccaagcccaatgccacccaaactgagtgtgaagcagcctgcgtggaagcctatgtgaaggaggcagagcagcaggcctgtagccacggctgctggagccagcccgcggagcctgagccggagcagaagagaaaggtcctggaggctccaagtggggccctctccctcttggacttgttttccaccctctgcaatgacctcgtcaactcagcccagggatttgtctcctccacctggacatactacttgcagactgacaatgggaaagtggtggtgtttcagactcagcccatagtggagagcctcggcttccaggggggccgtctgcagcgcgtggaggtgacctggcgaggctcccaccctgaagccctggaggtgcacgtggaccctgtaggccccctggacaaggtgaggaaggccaagatccgagtcaagaccagcagcaaggccaaggtggagtctgaagagccacaggacaatgacttcctcagttgcatgtcccggtgggtggcaggaccttgggggtgggaggggggtgggactggaggtacgggtctccctggtcccggcctgggcagctgagtggtgcctgccgggcggggcaggcgctcgggtctgcctcgctggatcctggcctgctgcctcttcctctccgtgctggtgatgctgtggctgagctgctccaccctggtgaccgcgcctggccagcacctcaagttccagcctctgaccctggagcagcacaagggcttcatgatggagcccgattggcccctgtacccgccgccgtcccacgcctgtgaggacagcctaccaccctacaagctgaagctggacctgaccaagctgtaggcctccactggccccatcactgccaactgcagggggcccctcgggcctcacttgccctgagcccaggagtccaagggcagggtgggtccagccttgagcccctccacccccaaatccttcctctcctcccagtcccaccccttgccccacggagtcctggggacgcagtgccccagctgggaagagggcgggatcgggcactggttcctccttgtccccgctttcttgggggcttgctactttttgtcttctattgtgtggctttctgagtatttgaaccccagtcctgtgtcaccttcctttttccttctctgtcccctctctgcgggggggcgctgaggctgagggggagctgcgtcttgctagggcttcccccttctccccatcccggtctccagagacccagcttctgagagacagggtgtgggcatctccatgcccctataaagcgtgcctggggcttgtctggggctggggaggaataaaccatgtatataaaagan

SEQ ID NO: 451012 - DNA, 819 bp, Homo sapiens
  misc_feature (819)..(819): n is a, c, g, or t
gaacctaggaggcggaggttgcagtgagctgagatggcgccactgcactccagcctgggtgacagagagagactctctcaaaaaaagaaaaaaaataaaacaatcagaggtgggaaggagacagtcagggttgggggctcggcctctccccgtccctccacttccctcctcccctctcttcctgcagcctctgaccctggagcagcacaagggcttcatgatggagcccgattggcccctgtacccgccgccgtcccacgcctgtgaggacagcctaccaccctacaagctgaagctggacctgaccaagctgtaggcctccactggccccatcactgccaactgcagggggcccctcgggcctcacttgccctgagcccaggagtccaagggcagggtgggtccagccttgagcccctccacccccaaatccttcctctcctcccagtcccaccccttgccccacggagtcctggggacgcagtgccccagctgggaagagggcgggatcgggcactggttcctccttgtccccgctttcttgggggcttgctactttttgtcttctattgtgtggctttctgagtatttgaaccccagtcctgtgtcaccttcctttttccttctctgtcccctctctgcgggggggcgctgaggctgagggggagctgcgtcttgctagggcttcccccttctccccatcccggtctccagagacccagcttctgagagacagggtgtgggcatctccatgcccctataaagcgtgcctggggcttgtctggggctggggaggaataaaccatgtatataaaagan

SEQ ID NO: 451013 - DNA, 522 bp, Homo sapiens
acagacaagaaagcaaggccccgcgtcacatccatagctgcagcccaaggtcttgttcctgcaccttagacttgaacctttcttggttctctgtgatgtgttagtgtttatttagcccttgagaatttcctcaggtactatcacatttcctaatatcgtagtcaatatttagattcaaatggtataatgtgaatcattttcttaatttaaaataagagctaataagaatggctgaacatttactgaggatgttaaatatgcccactgttctgagctctttatgggaatgaattcatttcattctcaccgtagtcctatgcaggctgttattccattttacttatgagaatactgaggcatagtaaaaagcttattgaactagtagtaagtgccaaagattcaggtttaggcagcgtggcctcttgagtgtgtgctcttaatcactaggtcaaatcacctctctctgtttctgctgtaaataaatctactaccatttaaaatgaacattgtgtgcattaggaa

SEQ ID NO: 451014 - DNA, 837 bp, Homo sapiens
  misc_feature (2)..(2): n is a, c, g, or t
  misc_feature (7)..(7): n is a, c, g, or t
gncacgngatgcatgtcatggccgcctccatggcccggggaggcgtgagtgccaggttctgctgcaggctgccagggcacctggtggaacagacctgggggcacttccgggtcgggggagggggtggcgctggggacaaccagaaagtttcaagcgacaggctcgcgcccggcgggagaggaggacgcgggcggcccggagcggcccggggacgtggtgaacgtggtgttcgtagaccgctcaggccagcggatcccagtgagtggcagagtcggggacaatgttcttcacctggcccagcgccacggggtggacctggaaggggcctgtgaagcctccctggcctgctccacctgccatgtgtatgtgagtgaagaccacctggatctcctgcctcctcccgaggagagggaagacgacatgctagacatggcccccctcctccaggagaactcgcggctgggctgccagattgtgctgacaccggagctggaaggagcggaattcaccctgcccaagatcaccaggaacttctacgtggatggccatgtccccaagccccactgacatgaacacctggaccattccacattgccatggccccagggcccagattgagggaatagccaggtgccagccctgcccagagtgcggacaggcccgggagagacgtggaagcccctgtgaaggacaacacccctgcttgggagagagtcccatgtccaggctctggtggggacagggcccctagtggggtggccttccccaggcccctgagaatcagggtttgagtaggagtggactcatattggagctgcaataaatcgataacacagg

SEQ ID NO: 451015 - DNA, 2572 bp, Homo sapiens
  misc_feature (2)..(2): n is a, c, g, or t
  misc_feature (7)..(7): n is a, c, g, or t
gncacgngatgcatgtcatggccgcctccatggcccggggaggcgtgagtgccaggttctgctgcaggctgccagggcacctggtggaacagacctgggggcacttccgggtcgggggagggggtggcgctggggacaaccagaaagtttcaagcgacaggctcgcgcccggcgggagaggaggacgcgggcggcccggagcggcccggggacgtggtgaacgtggtgttcgtagaccgctcaggccagcggatcccagtgagtggcagagtcggggacaatgttcttcacctggcccagcgccacggggtggacctggaaggggcctgtgaagcctccctggcctgctccacctgccatgtgtatgtgagtgaagaccacctggatctcctgcctcctcccgaggagagggaagacgacatgctagacatggcccccctcctccaggagaactcgcggctgggctgccagattgtgctgacaccggagctggaaggagcggaattcaccctgcccaagatcaccaggaacttctacgtggatggccatgtccccaagccccactgacatgaacacctggaccattccacattgccatggccccagggcccagattgagggaatagccaggtgccagccctgcccagagtgcggacaggcccgggagagacgtggaagcccctgtgaaggacaacacccctgcttgggagagagtcccatgtccaggctctggtggggacagggcccctagtggggtggccttccccaggcccctgagaatcagggtttgagtaggagtggactcatattggagctgcaataaatcgataacacaggccccagcatgttgagtgtccttgggggacagatctggggtctacaggtggctcacacctgtaatcctagcactttgggaagccaagatgggaggatcacttgaggccaggagcttaagaccatcctgggcaacatggcgagacctcgtctctataaaaacagtaaaaattagcgtggagtggtggtaagtgcctgtagtcccagctactcgggagactgaggtgggaggatcacttgagcccaggggatttaggctgcagtggagcggtgatcaggccattccactccagcctgggtgacagagtgaggccctgtctcaaaaaaaaaaaaaacaaaaacaaaaacaaaccacacctgcatctgctgtgctgggcccccggttctcttttccctctgggatctaagatgccgctggggatccaaggcagaggcctgggagcccccatttccgagggggagggctagcgtggaaggccccgccccggcagctgcggagggatttggtggggtccaggccgcccttgccacgcaggggtgcgcggatgacctgaaaaaagccagaaagaggaaaggtgccgccgaggctggtcgctctcagctggggctcatcgcatcctctaccaagagcgctcccaccacacaggtcccgcccctcccagcaaagcttctggcgccgccctgtctgaacctggagcggctgggaggatccccctcccaggagaagccgaggaccccaggatgctgcagaatcagtgagaggtccctctggcctgcatgccaggagtcggtcaccgccctgtgcttcctccaagagacagtggagaggctgggtcagtcccctgcccaggacaccccggtcctggggccttgctgggacccgatggctctggggactcagggccgcctgctgctggacagggattccaaggacacacagaccaggatcagccaaaagggccgccgtctgcagcccccggggactccctcggccccaccccagagaaggccccggaaacagctgaacccctgccggggcaccgagagagtggaccctgggttcgagggggtgactctgaagtttcagataaagccggactccagcctgcagatcatccccacgtacagcctgccctgcagtagccgttctcaggaatcccctgcagatgctgttgggggccctgcagcccacccaggaggcaccgaggcccactcagcaggcagcgaggccctggagccccggcgctgtgcttcctgtcggacccagaggaccccgctctggagagacgctgaagatgggacccctctctgcaacgcctgtgggatcaggtacaagaaatacggcactcgctgctccagctgctggctggtgcccaggaaaaatgtccagcccaagaggctatgtggcagatgtggagtgtccctggaccccattcaggaaggttaaacccagcttcaccctgctgagctgctgcttctgcctccgtttcaccagtgggagaatgggcagaagcagctctcctaggaggattggggaaagagccggcctgcctcctctctgccatctccagattcaaggatcccgggggaagacccaggcctcaggtggcagagcctgctaggggtcaccagccccttctccagtcagccttggccgaggccccctcaggagacgctctcaggaaggatgagcattgttacagcagggacaataaagtacagagatatgccgagagaa

SEQ ID NO: 451016 - DNA, 2311 bp, Homo sapiens
tggctgctccacctgccatggaggcttcacaggccccttccaggtccaccccgtgtgcgctgggcctgtgaagcctccctggcctgctccacctgccatgtgtatgtgagtgaagaccacctggatctcctgcctcctcccgaggagagggaagacgacatgctagacatggcccccctcctccaggagaactcgcggctgggctgccagattgtgctgacaccggagctggaaggagcggaattcaccctgcccaagatcaccaggaacttctacgtggatggccatgtccccaagccccactgacatgaacacctggaccattccacattgccatggccccagggcccagattgagggaatagccaggtgccagccctgcccagagtgcggacaggcccgggagagacgtggaagcccctgtgaaggacaacacccctgcttgggagagagtcccatgtccaggctctggtggggacagggcccctagtggggtggccttccccaggcccctgagaatcagggtttgagtaggagtggactcatattggagctgcaataaatcgataacacaggccccagcatgttgagtgtccttgggggacagatctggggtctacaggtggctcacacctgtaatcctagcactttgggaagccaagatgggaggatcacttgaggccaggagcttaagaccatcctgggcaacatggcgagacctcgtctctataaaaacagtaaaaattagcgtggagtggtggtaagtgcctgtagtcccagctactcgggagactgaggtgggaggatcacttgagcccaggggatttaggctgcagtggagcggtgatcaggccattccactccagcctgggtgacagagtgaggccctgtctcaaaaaaaaaaaaaacaaaaacaaaaacaaaccacacctgcatctgctgtgctgggcccccggttctcttttccctctgggatctaagatgccgctggggatccaaggcagaggcctgggagcccccatttccgagggggagggctagcgtggaaggccccgccccggcagctgcggagggatttggtggggtccaggccgcccttgccacgcaggggtgcgcggatgacctgaaaaaagccagaaagaggaaaggtgccgccgaggctggtcgctctcagctggggctcatcgcatcctctaccaagagcgctcccaccacacaggtcccgcccctcccagcaaagcttctggcgccgccctgtctgaacctggagcggctgggaggatccccctcccaggagaagccgaggaccccaggatgctgcagaatcagtgagaggtccctctggcctgcatgccaggagtcggtcaccgccctgtgcttcctccaagagacagtggagaggctgggtcagtcccctgcccaggacaccccggtcctggggccttgctgggacccgatggctctggggactcagggccgcctgctgctggacagggattccaaggacacacagaccaggatcagccaaaagggccgccgtctgcagcccccggggactccctcggccccaccccagagaaggccccggaaacagctgaacccctgccggggcaccgagagagtggaccctgggttcgagggggtgactctgaagtttcagataaagccggactccagcctgcagatcatccccacgtacagcctgccctgcagtagccgttctcaggaatcccctgcagatgctgttgggggccctgcagcccacccaggaggcaccgaggcccactcagcaggcagcgaggccctggagccccggcgctgtgcttcctgtcggacccagaggaccccgctctggagagacgctgaagatgggacccctctctgcaacgcctgtgggatcaggtacaagaaatacggcactcgctgctccagctgctggctggtgcccaggaaaaatgtccagcccaagaggctatgtggcagatgtggagtgtccctggaccccattcaggaaggttaaacccagcttcaccctgctgagctgctgcttctgcctccgtttcaccagtgggagaatgggcagaagcagctctcctaggaggattggggaaagagccggcctgcctcctctctgccatctccagattcaaggatcccgggggaagacccaggcctcaggtggcagagcctgctaggggtcaccagccccttctccagtcagccttggccgaggccccctcaggagacgctctcaggaaggatgagcattgttacagcagggacaataaagtacagagatatgccgagagaa

SEQ ID NO: 451017 - DNA, 2274 bp, Homo sapiens
tggctgctccacctgccatggaggcttcacaggccccttccaggtccaccccgtgtgcgctgggcctgtgaagcctccctggcctgctccacctgccatgtgtatgtgagtgaagaccacctggatctcctgcctcctcccgaggagaggagaactcgcggctgggctgccagattgtgctgacaccggagctggaaggagcggaattcaccctgcccaagatcaccaggaacttctacgtggatggccatgtccccaagccccactgacatgaacacctggaccattccacattgccatggccccagggcccagattgagggaatagccaggtgccagccctgcccagagtgcggacaggcccgggagagacgtggaagcccctgtgaaggacaacacccctgcttgggagagagtcccatgtccaggctctggtggggacagggcccctagtggggtggccttccccaggcccctgagaatcagggtttgagtaggagtggactcatattggagctgcaataaatcgataacacaggccccagcatgttgagtgtccttgggggacagatctggggtctacaggtggctcacacctgtaatcctagcactttgggaagccaagatgggaggatcacttgaggccaggagcttaagaccatcctgggcaacatggcgagacctcgtctctataaaaacagtaaaaattagcgtggagtggtggtaagtgcctgtagtcccagctactcgggagactgaggtgggaggatcacttgagcccaggggatttaggctgcagtggagcggtgatcaggccattccactccagcctgggtgacagagtgaggccctgtctcaaaaaaaaaaaaaacaaaaacaaaaacaaaccacacctgcatctgctgtgctgggcccccggttctcttttccctctgggatctaagatgccgctggggatccaaggcagaggcctgggagcccccatttccgagggggagggctagcgtggaaggccccgccccggcagctgcggagggatttggtggggtccaggccgcccttgccacgcaggggtgcgcggatgacctgaaaaaagccagaaagaggaaaggtgccgccgaggctggtcgctctcagctggggctcatcgcatcctctaccaagagcgctcccaccacacaggtcccgcccctcccagcaaagcttctggcgccgccctgtctgaacctggagcggctgggaggatccccctcccaggagaagccgaggaccccaggatgctgcagaatcagtgagaggtccctctggcctgcatgccaggagtcggtcaccgccctgtgcttcctccaagagacagtggagaggctgggtcagtcccctgcccaggacaccccggtcctggggccttgctgggacccgatggctctggggactcagggccgcctgctgctggacagggattccaaggacacacagaccaggatcagccaaaagggccgccgtctgcagcccccggggactccctcggccccaccccagagaaggccccggaaacagctgaacccctgccggggcaccgagagagtggaccctgggttcgagggggtgactctgaagtttcagataaagccggactccagcctgcagatcatccccacgtacagcctgccctgcagtagccgttctcaggaatcccctgcagatgctgttgggggccctgcagcccacccaggaggcaccgaggcccactcagcaggcagcgaggccctggagccccggcgctgtgcttcctgtcggacccagaggaccccgctctggagagacgctgaagatgggacccctctctgcaacgcctgtgggatcaggtacaagaaatacggcactcgctgctccagctgctggctggtgcccaggaaaaatgtccagcccaagaggctatgtggcagatgtggagtgtccctggaccccattcaggaaggttaaacccagcttcaccctgctgagctgctgcttctgcctccgtttcaccagtgggagaatgggcagaagcagctctcctaggaggattggggaaagagccggcctgcctcctctctgccatctccagattcaaggatcccgggggaagacccaggcctcaggtggcagagcctgctaggggtcaccagccccttctccagtcagccttggccgaggccccctcaggagacgctctcaggaaggatgagcattgttacagcagggacaataaagtacagagatatgccgagagaa

SEQ ID NO: 451018 - DNA, 539 bp, Homo sapiens
tggctgctccacctgccatggaggcttcacaggccccttccaggtccaccccgtgtgcgctgggcctgtgaagcctccctggcctgctccacctgccatgtgtatgtgagtgaagaccacctggatctcctgcctcctcccgaggagaggagaactcgcggctgggctgccagattgtgctgacaccggagctggaaggagcggaattcaccctgcccaagatcaccaggaacttctacgtggatggccatgtccccaagccccactgacatgaacacctggaccattccacattgccatggccccagggcccagattgagggaatagccaggtgccagccctgcccagagtgcggacaggcccgggagagacgtggaagcccctgtgaaggacaacacccctgcttgggagagagtcccatgtccaggctctggtggggacagggcccctagtggggtggccttccccaggcccctgagaatcagggtttgagtaggagtggactcatattggagctgcaataaatcgataacacagg

SEQ ID NO: 451019 - DNA, 776 bp, Homo sapiens
gtgggtttcatcgggtgggcccagcgggacagggccgggtgaaattagggagggggctgggctggggcgcaatggaggccgagccaatcccggactcctcaatgccagcaaagcttctggcgccgccctgtctgaacctggagcggctgggaggatccccctcccaggagaagccgaggaccccaggatgctgcagaatcagtgagaggtgcgtaaggccaaaccccattccccggaccccgctagcacttcaccacctggctcagtgatcaaggggtcatgacctctctttgctggggttatcgagaagtggcaattttataatagttactgaaacttacaaagaggttctggtgcccagagacacttggggtcatctagggatcagaggccatgcaattccatgtctctggggctgatgtaggcactccccagggatcatccaggggttatggagggcaactcaataataatgaaaatgataaaaatcgtaatcatattatggcaagccagcggcgtggtggcgcgtgcctgtaagtcccagctactcgggaggctgaggcggaaggatcggtcgagcccaggagttctaggctgcactgagtcctgatcacgcccctgcactccaggcgggggtacagagtgaggctcggtctctaaaagaaacacaaagaaaaaaagtaacctttttctcgatcctgcagccagaggcttgatatcctgcctcggtcacctagggcggtccctgcctgggtgatctacgggtgccgtaaggg

SEQ ID NO: 451020 - DNA, 774 bp, Homo sapiens
gctcggcgcagccgctcaccgaaccgtgttttccaggctcgcgcccggcgggagaggaggacgcgggcggcccggagcggcccggggacgtattctacccgggccctgagcccatcatccagttcggcattcgcacttccatctgtccccagggtgaacgtggtgttcgtagaccgctcaggccagcggatcccagtgagtggcagagtcggggacaatgttcttcacctggcccagcgccacggggtggacctggaaggggcctgtgaagcctccctggcctgctccacctgccatgtgtatgtgagtgaagaccacctggatctcctgcctcctcccgaggagagggaagacgacatgctagacatggcccccctcctccaggagaactcgcggctgggctgccagattgtgctgacaccggagctggaaggagcggaattcaccctgcccaagatcaccaggaacttctacgtggatggccatgtccccaagccccactgacatgaacacctggaccattccacattgccatggccccagggcccagattgagggaatagccaggtgccagccctgcccagagtgcggacaggcccgggagagacgtggaagcccctgtgaaggacaacacccctgcttgggagagagtcccatgtccaggctctggtggggacagggcccctagtggggtggccttccccaggcccctgagaatcagggtttgagtaggagtggactcatattggagctgcaataaatcgataacacagg

SEQ ID NO: 451021 - DNA, 703 bp, Homo sapiens
cggagcggccctggggacgtattctacccgggccctgagcccatcatccagttcggcattcgcacttccatctgtccccagggtgaacgtggtgttcgtagaccgctcaggccagcggatcccagtgagtggcagagtcggggacaatgttcttcacctggcccagcgccacggggtggacctggaaggggcctgtgaagcctccctggcctgctccacctgccatgtgtatgtgagtgaagaccacctggatctcctgcctcctcccgaggagagggaagacgacatgctagacatggcccccctcctccaggagaactcgcggctgggctgccagattgtgctgacaccggagctggaaggagcggaattcaccctgcccaagatcaccaggaacttctacgtggatggccatgtccccaagccccactgacatgaacacctggaccattccacattgccatggccccagggcccagattgagggaatagccaggtgccagccctgcccagagtgcggacaggcccgggagagacgtggaagcccctgtgaaggacaacacccctgcttgggagagagtcccatgtccaggctctggtggggacagggcccctagtggggtggccttccccaggcccctgagaatcagggtttgagtaggagtggactcatattggagctgcaataaatcgataacacagg

SEQ ID NO: 451022 - DNA, 2663 bp, Homo sapiens
  misc_feature (2)..(2): n is a, c, g, or t
  misc_feature (7)..(7): n is a, c, g, or t
gncacgngatgcatgtcatggccgcctccatggcccggggaggcgtgagtgccaggttctgctgcaggctgccagggcacctggtggaacagacctgggggcacttccgggtcgggggagggggtggcgctggggacaaccagaaagtttcaagcgacaggctcgcgcccggcgggagaggaggacgcgggcggcccggagcggcccggggacgtgtgagtgcagggggccaagtcccccattcctcatcccacggaattcctctggtccccatcttgccctgtagcttcatctcgaggtcccccttctgctttgccctattcagtacctgtgcgtcaagcctcaattcctacttcctaaccctagattctacccgggccctgagcccatcatccagttcggcattcgcacttccatctgtccccagggtgaacgtggtgttcgtagaccgctcaggccagcggatcccagtgagtggcagagtcggggacaatgttcttcacctggcccagcgccacggggtggacctggaaggggcctgtgaagcctccctggcctgctccacctgccatgtgtatgtgagtgaagaccacctggatctcctgcctcctcccgaggagagggaagacgacatgctagacatggcccccctcctccaggagaactcgcggctgggctgccagattgtgctgacaccggagctggaaggagcggaattcaccctgcccaagatcaccaggaacttctacgtggatggccatgtccccaacccctgtgaaggacaacacccctgcttgggagagagtcccatgtccaggctctggtggggacagggcccctagtggggtggccttccccaggcccctgagaatcagggtttgagtaggagtggactcatattggagctgcaataaatcgataacacaggccccagcatgttgagtgtccttgggggacagatctggggtctacaggtggctcacacctgtaatcctagcactttgggaagccaagatgggaggatcacttgaggccaggagcttaagaccatcctgggcaacatggcgagacctcgtctctataaaaacagtaaaaattagcgtggagtggtggtaagtgcctgtagtcccagctactcgggagactgaggtgggaggatcacttgagcccaggggatttaggctgcagtggagcggtgatcaggccattccactccagcctgggtgacagagtgaggccctgtctcaaaaaaaaaaaaaacaaaaacaaaaacaaaccacacctgcatctgctgtgctgggcccccggttctcttttccctctgggatctaagatgccgctggggatccaaggcagaggcctgggagcccccatttccgagggggagggctagcgtggaaggccccgccccggcagctgcggagggatttggtggggtccaggccgcccttgccacgcaggggtgcgcggatgacctgaaaaaagccagaaagaggaaaggtgccgccgaggctggtcgctctcagctggggctcatcgcatcctctaccaagagcgctcccaccacacaggtcccgcccctcccagcaaagcttctggcgccgccctgtctgaacctggagcggctgggaggatccccctcccaggagaagccgaggaccccaggatgctgcagaatcagtgagaggtccctctggcctgcatgccaggagtcggtcaccgccctgtgcttcctccaagagacagtggagaggctgggtcagtcccctgcccaggacaccccggtcctggggccttgctgggacccgatggctctggggactcagggccgcctgctgctggacagggattccaaggacacacagaccaggatcagccaaaagggccgccgtctgcagcccccggggactccctcggccccaccccagagaaggccccggaaacagctgaacccctgccggggcaccgagagagtggaccctgggttcgagggggtgactctgaagtttcagataaagccggactccagcctgcagatcatccccacgtacagcctgccctgcagtagccgttctcaggaatcccctgcagatgctgttgggggccctgcagcccacccaggaggcaccgaggcccactcagcaggcagcgaggccctggagccccggcgctgtgcttcctgtcggacccagaggaccccgctctggagagacgctgaagatgggacccctctctgcaacgcctgtgggatcaggtacaagaaatacggcactcgctgctccagctgctggctggtgcccaggaaaaatgtccagcccaagaggctatgtggcagatgtggagtgtccctggaccccattcaggaaggttaaacccagcttcaccctgctgagctgctgcttctgcctccgtttcaccagtgggagaatgggcagaagcagctctcctaggaggattggggaaagagccggcctgcctcctctctgccatctccagattcaaggatcccgggggaagacccaggcctcaggtggcagagcctgctaggggtcaccagccccttctccagtcagccttggccgaggccccctcaggagacgctctcaggaaggatgagcattgttacagcagggacaataaagtacagagatatgccgagagaa

SEQ ID NO: 451023 - DNA, 421 bp, Homo sapiens
tgttcgtggacccaagggaggaactccatacagaggcactcgaagagtttacggggcctatttctacccaaaagtcgtacatcgcacgacttcgtcttttatacatttaaagtgcagaggtttttatttttttctgcttagcctcaaggttgaggttttccatgatttgtaatattacagacaagacgatcaaaaccatggcttttcacttgaatgtatattgttaagtcccattccttttagattaatgaaaagaatgaataaacatttgaaggaaaaatatgagtactataaggattttgacttaatttttatgtaccttgccattcaattttattatatgtatatatttgtaataaatgagggtgaggtgttgattgttcaataagtttcatgagcataataaagtctattttaattc

SEQ ID NO: 451024 - DNA, 3352 bp, Homo sapiens
gagcggccgcccgggcaggtaatttgatcaaggctgtttgtgtctggctaatgttgacaatagtggaaatggacaagataaaataattgtgggtagctttatgggatacctaaggatctttagcccccatcctgcaaaaacaggagatggagctcaagccgaagatttgcttctagaagtggatctacgagatccagtacttcaagtggaagtaggaaagtttgtttcaggtaccgaaatgctacatttggctgtgttacattctagaaaactttgtgtctactctgtctcaggaaccttgggtaatgtggaacatgggaaccaatgtcagatgaaattgatgtatgaacataatcttcagagaacagcctgcaatatgacctatggatcatttggtggtgtaaaaggtcgagatttaatttgcatccagtctatggatgggatgctgatggtatttgagcaggagagctatgcttttggaagatttctccctggctttcttctgcctggtcctcttgcctacagttcccgtacagattccttccttactgtctcttcctgccaacaagtggaaagttataagtaccaggtacttgcttttgcaacagatgcagataaaaggcaggagactgaacagcaaaaacttggttctggaaaaagactagttgtggattggactctaaatattggagagcaagcccttgacatatgtattgtctctttcaatcagtcggcatcctctgtttttgttcttggtgagagaaactttttttgccttaaggataatggacaaattcgattcatgaagaggcttgattggagcccaagttgttttctgccatattgctcagtttctgaaggaacaataaatactttgattggaaatcataataacatgctgcatatttatcaagatgtgacactgaagtgggccacccaacttccccacattcctgtagcagtaagagtgggctgtttgcatgatttaaagggagtgatagtcactctgagtgatgatggtcacttgcagtgttcatacctggggacagatccttctctgttccaagctccaaacgttcaatctcgagaactaaactatgatgaacttgatgtagaaatgaaagaacttcagaaaatcatcaaagatgttaacaaatcacaaggtgtttggcccatgactgagagagaagatgacttgaacgtttctgtcgtggtttctcctaactttgattcagtttctcaagcgaccgatgttgaggtgggaactgaccttgtcccttctgtcacggtgaaggtcacactgcagaacagagtgatattgcaaaaagccaaattatcagtctacgtgcaaccaccattagaattgacttgtgatcagttcacctttgaatttatgagcattccgcgagttatccaatgtaaatttagacttcccctaaagttaatttgcctaccaggtcagccttcaaaaactgcaagccacaaaattactattgataccaacaaatctccagtcagtcttcttagtctcttcccaggttttgccagtcagtcagatgatgatcaggtgaatgtaatgggttttcacttcttaggaggtgctcgaattactgttcttgcttccaaaacttctcaacgatatcgcattcagagtgaacaatttgaagatctttggctcataaccaatgagcttattcttcgccttcaagaatattttgaaaaacagggagtcaaagattttgcatgttctttttcgggatctataccccttcaagaatattttgagttgattgatcatcattttgagctacggataaatggtgaaaaattagaagaactcttatctgagagagctgtacaatttcgggccattcaacgccggctactagcaagattcaaagataaaactcctgcccctcttcaacacctggacaccttgttagatggaacctacaagcaggtaattgctctagcagatgcagtggaggaaaaccaaggcaatctgttccagtcattcaccaggctgaagagtgccacccatttggtgattctgctgatcgcgctgtggcagaagcttagtgctgaccaggttgctattctggaagcggcatttctgccgctacaagaagacactcaagaattgggctgggaagaaacggtggatgccgccatttcccacctgttgaagacttgcctgtcgaagagttctaaggagcaggctttgaacctcaacagccagctgaacatacccaaagacacaagccaactgaagaaacatatcaccttgctctgcgatagattatccaaaggtggccgtctctgcctaagtaccgatgcagcagccccacagaccatggtcatgccaggtggttgtactacaatcccagagtcagacctagaagaaagatcagtagaacaagactctacagaactgtttaccaaccacagacatctcactgcagagacacccaggcctgaagtttcacccctccaaggagtctcggaataattcaagtagagttgtttggttgagaggaacatccccatctcaaggccgaacctgtgtgaacctcatgccaagcacagatatagggctggcgcaggtgcttcctaaagctcaccttcctggagatgacatgcatagaaagaggggttgggactttttacttcactaggagaacttgtaacaccatggggaagtcagctgaaacttgtcttgttttgccaggaaaggaagtagttgcctttggtcatccatctgctaatagtcacagaatacagtgaaatgacatagttttgggttagattttataatgcaaagattcagatccaaaataatttcataccccattttttcacagaattcttatatagtaaatgtatcaagtttaataaagcatctcattgtcaaataatatcttggattttatttataattagagggatttatgagtgattgctctacattatttcttcaaaggaaaggaaaggaattgaagactttgctactctctggtaagacttgaatgtgattattttataaataaaagaaccactatgaaactttcatgtgatttgttctattaagctaaacgtggaagaagggaagttttctagtattgtatgaaaatgtttaaatattttcaaggaagctagtacattaacatccccttttcattaccccattgggtggcaccttttaaaaatccaggttattaaaggattcacactttattacagttaaaatttaaggtttttatgtgtaagaagtgaaagaaactttgctaatttcaagttcgaattacagttgtgagattgatttatttaaataaaaatatgcctttgccagtta

SEQ ID NO: 451025 - DNA, 3108 bp, Homo sapiens
gagcggccgcccgggcaggtaatttgatcaaggctgtttgtgtctggctaatgttgacaatagtggaaatggacaagataaaataattgtgggtagctttatgggatacctaaggatctttagcccccatcctgcaaaaacaggagatggagctcaagccgaagatttgcttctagaagtggatctacgagatccagtacttcaagtggaagtaggaaagtttgtttcaggtaccgaaatgctacatttggctgtgttacattctagaaaactttgtgtctactctgtctcaggaaccttgggtaatgtggaacatgggaaccaatgtcagatgaaattgatgtatgaacataatcttcagagaacagcctgcaatatgacctatggatcatttggtggtgtaaaaggtcgagatttaatttgcatccagtctatggatgggatgctgatggtatttgagcaggagagctatgcttttggaagatttctccctggctttcttctgcctggtcctcttgcctacagttcccgtacagattccttccttactgtctcttcctgccaacaagtggaaagttataagtaccaggtacttgcttttgcaacagatgcagataaaaggcaggagactgaacagcaaaaacttggttctggaaaaagactagttgtggattggactctaaatattggagagcaagcccttgacatatgtattgtctctttcaatcagtcggcatcctctgtttttgttcttggtgagagaaactttttttgccttaaggataatggacaaattcgattcatgaagaggcttgattggagcccaagttgttttctgccatattgctcagtttctgaaggaacaataaatactttgattggaaatcataataacatgctgcatatttatcaagatgtgacactgaagtgggccacccaacttccccacattcctgtagcagtaagagtgggctgtttgcatgatttaaagggagtgatagtcactctgagtgatgatggtcacttgcagtgttcatacctggggacagatccttctctgttccaagctccaaacgttcaatctcgagaactaaactatgatgaacttgatgtagaaatgaaagaacttcagaaaatcatcaaagatgttaacaaatcacaaggtgtttggcccatgactgagagagaagatgacttgaacgtttctgtcgtggtttctcctaactttgattcagtttctcaagcgaccgatgttgaggtgggaactgaccttgtcccttctgtcacggtgaaggtcacactgcagaacagagtgatattgcaaaaagccaaattatcagtctacgtgcaaccaccattagaattgacttgtgatcagttcacctttgaatttatgagcattccgcgagttatccaatgtaaatttagacttcccctaaagttaatttgcctaccaggtcagccttcaaaaactgcaagccacaaaattactattgataccaacaaatctccagtcagtcttcttagtctcttcccaggttttgccagtcagtcagatgatgatcaggtgaatgtaatgggttttcacttcttaggaggtgctcgaattactgttcttgcttccaaaacttctcaacgatatcgcattcagagtgaacaatttgaagatctttggctcataaccaatgagcttattcttcgccttcaagaatattttgaaaaacagggagtcaaagattttgcatgttctttttcgggatctataccccttcaagaatattttgagttgattgatcatcattttgagctacggataaatggtgaaaaattagaagaactcttatctgagagagctgtacaatttcgggccattcaacgccggctactagcaagattcaaagataaaactcctgcccctcttcaacacctggacaccttgttagatggaacctacaagcaggtaattgctctagcagatgcagtggaggaaaaccaaggcaatctgttccagtcattcaccaggctgaagagtgccacccatttggtgattctgctgatcgcgctgtggcagaagcttagtgctgaccaggttgctattctggaagcggcatttctgccgctacaagaagacactcaagaattgggctgggaagaaacggtggatgccgccatttcccacctgttgaagacttgcctgtcgaagagttctaaggagcaggctttgaacctcaacagccagctgaacatacccaaagacacaagccaactgaagaaacatatcaccttgctctgcgatagattatccaaaggtggccgtctctgcctaagtaccgatgcagcagccccacagaccatggtcatgccaggtggttgtactacaatcccagagtcagacctagaagaaagatcagtagaacaagactctacagaactgtttaccaaccacagacatctcactgcagagacacccaggcctgaagtttcacccctccaaggagtctcggaataattcaagtagagttgtttggttgagaggaacatccccatctcaaggccgaacctgtgtgaacctcatgccaagcacagatatagggctggcgcaggtgcttcctaaagctcaccttcctggagatgacatgcatagaaagaggggttgggactttttacttcactaggagaacttgtaacaccatggggaagtcagctgaaacttgtcttgttttgccaggaaaggaagtagttgcctttggtcatccatctgctaatagtcacagaatacagtgaaatgacatagttttgggttagattttataatgcaaagattcagatccaaaataatttcataccccattttttcacagaattcttatatagtaaatgtatcaagtttaataaagcatctcattgtcaaataatatcttggattttatttataattagagggatttatgagtgattgctctacattatttcttcaaaggaaaggaaaggaattgaagactttgctactctctggtaagacttgaatgtgattattttataaataaaagaaccactatgaaactttaaaaaaaaaaagtcgacgcggccgcgaatttagtagtagta

SEQ ID NO: 451026 - DNA, 4030 bp, Homo sapiens
gggggcgtggcctgcccccggagcccaggcaggaggagggtcttccttaaggaactgctgccaggacagggcagaggattgcagtaattatcactctctgctaatgaggaccaggccgtggttcactcgagccccgccccagtagcaatctaattccaaccgcggccctctcagaagtcggtccccgcctttgcgcctcagcctctctggactccagcccccagaagtcggcgcggcacggcgtgacctgcgcagtggcgtccgttgtaagtgctatgacaacagggcgaagatggctcagagttaggctggagaggggaggtgtcccttccgctgcggccgtcgggtttctgctacatcccattcaccgcctcctccatcctttcctcctcggtgtgagcagcaggacttgcatttgttctcgcctgcctagtgtcttccaagggatagatgccgtttcctctgctggtctctgggggtgacggggggcgcaggggagcttcttgggggaatcactccaactctgtggagctggtggtgctgcctggtggggctctctctttgcccgggacgtggaacaactttcagctggaggacgagagggaatagtgaagctaaaggttgcttttctctgcaccgtccgttcttgctccctctgctccatcactgggaccttgtcaggcgttcataaagcaaaatttgccgaacgagggttcgcagaaaggtggggcagagctcatctgacgtggcatcagataaaataattgtgggtagctttatgggatacctaaggatctttagcccccatcctgcaaaaacaggagatggagctcaagccgaagatttgcttctagaagtggatctacgagatccagtacttcaagtggaagtaggaaagtttgtttcaggtaccgaaatgctacatttggctgtgttacattctagaaaactttgtgtctactctgtctcaggaaccttgggtaatgtggaacatgggaaccaatgtcagatgaaattgatgtatgaacataatcttcagagaacagcctgcaatatgacctatggatcatttggtggtgtaaaaggtcgagatttaatttgcatccagtctatggatgggatgctgatggtatttgagcaggagagctatgcttttggaagatttctccctggctttcttctgcctggtcctcttgcctacagttcccgtacagattccttccttactgtctcttcctgccaacaagtggaaagttataagtaccaggtacttgcttttgcaacagatgcagataaaaggcaggagactgaacagcaaaaacttggttctggaaaaagactagttgtggattggactctaaatattggagagcaagcccttgacatatgtattgtctctttcaatcagtcggcatcctctgtttttgttcttggtgagagaaactttttttgccttaaggataatggacaaattcgattcatgaagaggcttgattggagcccaagttgttttctgccatattgctcagtttctgaaggaacaataaatactttgattggaaatcataataacatgctgcatatttatcaagatgtgacactgaagtgggccacccaacttccccacattcctgtagcagtaagagtgggctgtttgcatgatttaaagggagtgatagtcactctgagtgatgatggtcacttgcagtgttcatacctggggacagatccttctctgttccaagctccaaacgttcaatctcgagaactaaactatgatgaacttgatgtagaaatgaaagaacttcagaaaatcatcaaagatgttaacaaatcacaaggtgtttggcccatgactgagagagaagatgacttgaacgtttctgtcgtggtttctcctaactttgattcagtttctcaagcgaccgatgttgaggtgggaactgaccttgtcccttctgtcacggtgaaggtcacactgcagaacagagtgatattgcaaaaagccaaattatcagtctacgtgcaaccaccattagaattgacttgtgatcagttcacctttgaatttatgagcattccgcgagttatccaatgtaaatttagacttcccctaaagttaatttgcctaccaggtcagccttcaaaaactgcaagccacaaaattactattgataccaacaaatctccagtcagtcttcttagtctcttcccaggttttgccagtcagtcagatgatgatcaggtgaatgtaatgggttttcacttcttaggaggtgctcgaattactgttcttgcttccaaaacttctcaacgatatcgcattcagagtgaacaatttgaagatctttggctcataaccaatgagcttattcttcgccttcaagaatattttgaaaaacagggagtcaaagattttgcatgttctttttcgggatctataccccttcaagaatattttgagttgattgatcatcattttgagctacggataaatggtgaaaaattagaagaactcttatctgagagagctgtacaatttcgggccattcaacgccggctactagcaagattcaaagataaaactcctgcccctcttcaacacctggacaccttgttagatggaacctacaagcaggtaattgctctagcagatgcagtggaggaaaaccaaggcaatctgttccagtcattcaccaggctgaagagtgccacccatttggtgattctgctgatcgcgctgtggcagaagcttagtgctgaccaggttgctattctggaagcggcatttctgccgctacaagaagacactcaagaattgggctgggaagaaacggtggatgccgccatttcccacctgttgaagacttgcctgtcgaagagttctaaggagcaggctttgaacctcaacagccagctgaacatacccaaagacacaagccaactgaagaaacatatcaccttgctctgcgatagattatccaaaggtggccgtctctgcctaagtaccgatgcagcagccccacagaccatggtcatgccaggtggttgtactacaatcccagagtcagacctagaagaaagatcagtagaacaagactctacagaactgtttaccaaccacagacatctcactgcagagacacccaggcctgaagtttcacccctccaaggagtctcggaataattcaagtagagttgtttggttgagaggaacatccccatctcaaggccgaacctgtgtgaacctcatgccaagcacagatatagggctggcgcaggtgcttcctaaagctcaccttcctggagatgacatgcatagaaagaggggttgggactttttacttcactaggagaacttgtaacaccatggggaagtcagctgaaacttgtcttgttttgccaggaaaggaagtagttgcctttggtcatccatctgctaatagtcacagaatacagtgaaatgacatagttttgggttagattttataatgcaaagattcagatccaaaataatttcataccccattttttcacagaattcttatatagtaaatgtatcaagtttaataaagcatctcattgtcaaataatatcttggattttatttataattagagggatttatgagtgattgctctacattatttcttcaaaggaaaggaaaggaattgaagactttgctactctctggtaagacttgaatgtgattattttataaataaaagaaccactatgaaactttcatgtgatttgttctattaagctaaacgtggaagaagggaagttttctagtattgtatgaaaatgtttaaatattttcaaggaagctagtacattaacatccccttttcattaccccattgggtggcaccttttaaaaatccaggttattaaaggattcacactttattacagttaaaatttaaggtttttatgtgtaagaagtgaaagaaactttgctaatttcaagttcgaattacagttgtgagattgatttatttaaataaaaatatgcctttgccagtta

SEQ ID NO: 451027 - DNA, 2067 bp, Homo sapiens
attgggaaagggcaggcacacagggacagaagttcttctgggttctgggtttcatccaggaccagcagtacggtctttcagccctcaggctgttttaagcctgaaggtaagagcattccgcgagttatccaatgtaaatttagacttcccctaaagttaatttgcctaccaggtcagccttcaaaaactgcaagccacaaaattactattgataccaacaaatctccagtcagtcttcttagtctcttcccaggttttgccagtcagtcagatgatgatcaggtgaatgtaatgggttttcacttcttaggaggtgctcgaattactgttcttgcttccaaaacttctcaacgatatcgcattcagagtgaacaatttgaagatctttggctcataaccaatgagcttattcttcgccttcaagaatattttgaaaaacagggagtcaaagattttgcatgttctttttcgggatctataccccttcaagaatattttgagttgattgatcatcattttgagctacggataaatggtgaaaaattagaagaactcttatctgagagagctgtacaatttcgggccattcaacgccggctactagcaagattcaaagataaaactcctgcccctcttcaacacctggacaccttgttagatggaacctacaagcaggtaattgctctagcagatgcagtggaggaaaaccaaggcaatctgttccagtcattcaccaggctgaagagtgccacccatttggtgattctgctgatcgcgctgtggcagaagcttagtgctgaccaggttgctattctggaagcggcatttctgccgctacaagaagacactcaagaattgggctgggaagaaacggtggatgccgccatttcccacctgttgaagacttgcctgtcgaagagttctaaggagcaggctttgaacctcaacagccagctgaacatacccaaagacacaagccaactgaagaaacatatcaccttgctctgcgatagattatccaaaggtggccgtctctgcctaagtaccgatgcagcagccccacagaccatggtcatgccaggtggttgtactacaatcccagagtcagacctagaagaaagatcagtagaacaagactctacagaactgtttaccaaccacagacatctcactgcagagacacccaggcctgaagtttcacccctccaaggagtctcggaataattcaagtagagttgtttggttgagaggaacatccccatctcaaggccgaacctgtgtgaacctcatgccaagcacagatatagggctggcgcaggtgcttcctaaagctcaccttcctggagatgacatgcatagaaagaggggttgggactttttacttcactaggagaacttgtaacaccatggggaagtcagctgaaacttgtcttgttttgccaggaaaggaagtagttgcctttggtcatccatctgctaatagtcacagaatacagtgaaatgacatagttttgggttagattttataatgcaaagattcagatccaaaataatttcataccccattttttcacagaattcttatatagtaaatgtatcaagtttaataaagcatctcattgtcaaataatatcttggattttatttataattagagggatttatgagtgattgctctacattatttcttcaaaggaaaggaaaggaattgaagactttgctactctctggtaagacttgaatgtgattattttataaataaaagaaccactatgaaactttcatgtgatttgttctattaagctaaacgtggaagaagggaagttttctagtattgtatgaaaatgtttaaatattttcaaggaagctagtacattaacatccccttttcattaccccattgggtggcaccttttaaaaatccaggttattaaaggattcacactttattacagttaaaatttaaggtttttatgtgtaagaagtgaaagaaactttgctaatttcaagttcgaattacagttgtgagattgatttatttaaataaaaatatgcctttgccagtta

SEQ ID NO: 451028 - DNA, 4248 bp, Homo sapiens
gggggcgtggcctgcccccggagcccaggcaggaggagggtcttccttaaggaactgctgccaggacagggcagaggattgcagtaattatcactctctgctaatgaggaccaggccgtggttcactcgagccccgccccagtagcaatctaattccaaccgcggccctctcagaagtcggtccccgcctttgcgcctcagcctctctggactccagcccccagaagtcggcgcggcacggcgtgacctgcgcagtggcgtccgttgtaagtgctatgacaacagggcgaagatggctcagagttaggctggagaggggaggtgtcccttccgctgcggccgtcgggtttctgctacatcccattcaccgcctcctccatcctttcctcctcggtgtgagcagcaggacttgcatttgttctcgcctgcctagtgtcttccaagggatagatgccgtttcctctgctggtctctgggggtgacggggggcgcaggggagcttcttgggggaatcactccaactctgtggagctggtggtgctgcctggtggggctctctctttgcccgggacgtggaacaactttcagctggaggacgagagggaatagtgaagctaaaggttgcttttctctgcaccgtccgttcttgctccctctgctccatcactgggaccttgtcaggcgttcataaagcaaaatttgccgaacgagggttcgcagaaaggtggggcagagctcatctgacgtggcatcagtgtgaaagaaaatgtctttatttaaagcccgtgattggtggtctactattctgggagataaagaagaatttgatcaaggctgtttgtgtctggctaatgttgacaatagtggaaatggacaagataaaataattgtgggtagctttatgggatacctaaggatctttagcccccatcctgcaaaaacaggagatggagctcaagccgaagatttgcttctagaagtggatctacgagatccagtacttcaagtggaagtaggaaagtttgtttcaggtaccgaaatgctacatttggctgtgttacattctagaaaactttgtgtctactctgtctcaggaaccttgggtaatgtggaacatgggaaccaatgtcagatgaaattgatgtatgaacataatcttcagagaacagcctgcaatatgacctatggatcatttggtggtgtaaaaggtcgagatttaatttgcatccagtctatggatgggatgctgatggtatttgagcaggagagctatgcttttggaagatttctccctggctttcttctgcctggtcctcttgcctacagttcccgtacagattccttccttactgtctcttcctgccaacaagtggaaagttataagtaccaggtacttgcttttgcaacagatgcagataaaaggcaggagactgaacagcaaaaacttggttctggaaaaagactagttgtggattggactctaaatattggagagcaagcccttgacatatgtattgtctctttcaatcagtcggcatcctctgtttttgttcttggtgagagaaactttttttgccttaaggataatggacaaattcgattcatgaagaggcttgattggagcccaagttgttttctgccatattgctcagtttctgaaggaacaataaatactttgattggaaatcataataacatgctgcatatttatcaagatgtgacactgaagtgggccacccaacttccccacattcctgtagcagtaagagtgggctgtttgcatgatttaaagggagtgatagtcactctgagtgatgatggtcacttgcagtgttcatacctggggacagatccttctctgttccaagctccaaacgttcaatctcgagaactaaactatgatgaacttgatgtagaaatgaaagaacttcagaaaatcatcaaagatgttaacaaatcacaaggtgtttggcccatgactgagagagaagatgacttgaacgtttctgtcgtggtttctcctaactttgattcagtttctcaagcgaccgatgttgaggtgggaactgaccttgtcccttctgtcacggtgaaggtcacactgcagaacagagtgatattgcaaaaagccaaattatcagtctacgtgcaaccaccattagaattgacttgtgatcagttcacctttgaatttatgacaccagatttgactagaacagtaagcttttctgtttatctgaaaagaagttatacaccatcagaattggaaggaaatgctgttgtttcttattccagaccaacagatcgaaatcctgatggcattccgcgagttatccaatgtaaatttagacttcccctaaagttaatttgcctaccaggtcagccttcaaaaactgcaagccacaaaattactattgataccaacaaatctccagtcagtcttcttagtctcttcccaggttttgccagtcagtcagatgatgatcaggtgaatgtaatgggttttcacttcttaggaggtgctcgaattactgttcttgcttccaaaacttctcaacgatatcgcattcagagtgaacaatttgaagatctttggctcataaccaatgagcttattcttcgccttcaagaatattttgaaaaacagggagtcaaagattttgcatgttctttttcgggatctataccccttcaagaatattttgagttgattgatcatcattttgagctacggataaatggtgaaaaattagaagaactcttatctgagagagctgtacaatttcgggccattcaacgccggctactagcaagattcaaagataaaactcctgcccctcttcaacacctggacaccttgttagatggaacctacaagcaggtaattgctctagcagatgcagtggaggaaaaccaaggcaatctgttccagtcattcaccaggctgaagagtgccacccatttggtgattctgctgatcgcgctgtggcagaagcttagtgctgaccaggttgctattctggaagcggcatttctgccgctacaagaagacactcaagaattgggctgggaagaaacggtggatgccgccatttcccacctgttgaagacttgcctgtcgaagagttctaaggagcaggctttgaacctcaacagccagctgaacatacccaaagacacaagccaactgaagaaacatatcaccttgctctgcgatagattatccaaaggtggccgtctctgcctaagtaccgatgcagcagccccacagaccatggtcatgccaggtggttgtactacaatcccagagtcagacctagaagaaagatcagtagaacaagactctacagaactgtttaccaaccacagacatctcactgcagagacacccaggcctggtaagagactggatggccttcacaagcgttagttaagtcagaagcagtgacaatctggtcagtttttgtcataccagagagcattccgcaaagctgcttgttttccaatttcttcattcttccccttagcactggtgcagctgaatttgatcctttgtgtattcctgtcactattcagatcttttctctctctttctctcttactctctttttttccagaagtttcacccctccaaggagtctcggaataattcaagtagagttgtttggttgagaggaacatccccatctcaaggccgaacctgtgtgaacctcatgccaagcacagatatagggctggcgcaggtgcttcctaaagctcaccttcctggagatgacatgcatagaaagaggggttgggactttttacttcactaggagaacttgtaacaccatggggaagtcagctgaaacttgtcttgttttgccaggaaaggaagtagttgcctttggtcatccatctgctaatagtcacagaatacagtgaaatgacatagttttgggttagattttataatgcaaagattcagatccaaaataatttcataccccattttttcacagaattcttatatagtaaatgtatcaagtttaataaagcatctcattgtcaaataatatcttggattttatttataattagagggatttatgagtgattgctctacattatttcttcaaaggaaaggaaaggaattgaagactttgctactctctggtaagacttgaatgtgattattttataaataaaagaaccactatgaaactttaaaaaaaaaaagtcgacgcggccgcgaatttagtagtagta

SEQ ID NO: 451029 - DNA, 828 bp, Homo sapiens
ggaatgagaaagaggaaaactctgagaaagcagccacacagaagccaagcgaagggaggatttccaaggtcagcagatggagcaaggtggttgtactacaatcccagagtcagacctagaagaaagatcagtagaacaagactctacagaactgtttaccaaccacagacatctcactgcagagacacccaggcctgaagtttcacccctccaaggagtctcggaataattcaagtagagttgtttggttgagaggaacatccccatctcaaggccgaacctgtgtgaacctcatgccaagcacagatatagggctggcgcaggtgcttcctaaagctcaccttcctggagatgacatgcatagaaagaggggttgggactttttacttcactaggagaacttgtaacaccatggggaagtcagctgaaacttgtcttgttttgccaggaaaggaagtagttgcctttggtcatccatctgctaatagtcacagaatacagtgaaatgacatagttttgggttagattttataatgcaaagattcagatccaaaataatttcataccccattttttcacagaattcttatatagtaaatgtatcaagtttaataaagcatctcattgtcaaataatatcttggattttatttataattagagggatttatgagtgattgctctacattatttcttcaaaggaaaggaaaggaattgaagactttgctactctctggtaagacttgaatgtgattattttataaataaaagaaccactatgaaactttaaaaaaaaaaagtcgacgcggccgcgaatttagtagtagta

SEQ ID NO: 451030 - DNA, 3826 bp, Homo sapiens
gggggcgtggcctgcccccggagcccaggcaggaggagggtcttccttaaggaactgctgccaggacagggcagaggattgcagtaattatcactctctgctaatgaggaccaggccgtggttcactcgagccccgccccagtagcaatctaattccaaccgcggccctctcagaagtcggtccccgcctttgcgcctcagcctctctggactccagcccccagaagtcggcgcggcacggcgtgacctgcgcagtggcgtccgttgtaagtgctatgacaacagggcgaagatggctcagagttaggctggagaggggaggtgtcccttccgctgcggccgtcgggtttctgctacatcccattcaccgcctcctccatcctttcctcctcggtgtgagcagcaggacttgcatttgttctcgcctgcctagtgtcttccaagggatagatgccgtttcctctgctggtctctgggggtgacggggggcgcaggggagcttcttgggggaatcactccaactctgtggagctggtggtgctgcctggtggggctctctctttgcccgggacgtggaacaactttcagctggaggacgagagggaatagtgaagctaaaggttgcttttctctgcaccgtccgttcttgctccctctgctccatcactgggaccttgtcaggcgttcataaagcaaaatttgccgaacgagggttcgcagaaaggtggggcagagctcatctgacgtggcatcagtgtgaaagaaaatgtctttatttaaagcccgtgattggtggtctactattctgggagataaagaagaatttgatcaaggctgtttgtgtctggctaatgttgacaatagtggaaatggacaagataaaataattgtgggtagctttatgggatacctaaggatctttagcccccatcctgcaaaaacaggagatggagctcaagccgaagatttgcttctagaagtggatctacgagatccagtacttcaagtggaagtaggaaagtttgtttcaggtaccgaaatgctacatttggctgtgttacattctagaaaactttgtgtctactctgtctcaggaaccttgggtaatgtggaacatgggaaccaatgtcagatgaaattgatgtatgaacataatcttcagagaacagcctgcaatatgacctatggatcatttggtggtgtaaaaggtcgagatttaatttgcatccagtctatggatgggatgctgatggtatttgagcaggagagctatgcttttggaagatttctccctggctttcttctgcctggtcctcttgcctacagttcccgtacagattccttccttactgtctcttcctgccaacaagtggaaagttataagtaccaggtacttgcttttgcaacagatgcagataaaaggcaggagactgaacagcaaaaacttggttctggaaaaagactagttgtggattggactctaaatattggagagcaagcccttgacatatgtattgtctctttcaatcagtcggcatcctctgtttttgttcttggtgagagaaactttttttgccttaaggataatggacaaattcgattcatgaagaggcttgattggagcccaagttgttttctgccatattgctcagtttctgaaggaacaataaatactttgattggaaatcataataacatgctgcatatttatcaagatgtgacactgaagtgggccacccaacttccccacattcctgtagcagtaagagtgggctgtttgcatgatttaaagggagtgatagtcactctgagtgatgatggtcacttgcagtgttcatacctggggacagatccttctctgttccaagctccaaacgttcaatctcgagaactaaactatgatgaacttgatgtagaaatgaaagaacttcagaaaatcatcaaagatgttaacaaatcacaaggtgtttggcccatgactgagagagaagatgacttgaacgtttctgtcgtggtttctcctaactttgattcagtttctcaagcgaccgatgttgaggtgggaactgaccttgtcccttctgtcacggtgaaggtcacactgcagaacagagtgatattgcaaaaagccaaattatcagtctacgtgcaaccaccattagaattgacttgtgatcagttcacctttgaatttatgacaccagatttgactagaacagtaagcttttctgtttatctgaaaagaagttatacaccatcagaattggaaggaaatgctgttgtttcttattccagaccaacagatcgaaatcctgatggcattccgcgagttatccaatgtaaatttagacttcccctaaagttaatttgcctaccaggtcagccttcaaaaactgcaagccacaaaattactattgataccaacaaatctccagtcagtcttcttagtctcttcccaggttttgccagtcagtcagatgatgatcaggtgaatgtaatgggttttcacttcttaggaggtgctcgaattactgttcttgcttccaaaacttctcaacgatatcgcattcagagtgaacaatttgaagatctttggctcataaccaatgagcttattcttcgccttcaagaatattttgaaaaacagggagtcaaagattttgcatgttctttttcgggatctataccccttcaagaatattttgagttgattgatcatcattttgagctacggataaatggtgaaaaattagaagaactcttatctgagagagctgtacaatttcgggccattcaacgccggctactagcaagattcaaagataaaactcctgcccctcttcaacacctggacaccttgttagatggaacctacaagcaggtaattgctctagcagatgcagtggaggaaaaccaaggcaatctgttccagtcattcaccaggctgaagagtgccacccatttggtgattctgctgatcgcgctgtggcagaagcttagtgctgaccaggttgctattctggaagcggcatttctgccgctacaagaagacactcaagaattggtaaggacctgaaagcctgtggtgggaacagccagcattattgaagtttcggctttaggaagatatcacatggctatcaggttttctaagggctgggaagaaacggtggatgccgccatttcccacctgttgaagacttgcctgtcgaagagttctaaggagcaggctttgaacctcaacagccagctgaacatacccaaagacacaagccaactgaagaaacatatcaccttgctctgcgatagattatccaaaggtggccgtctctgcctaagtaccgatgcagcagccccacagaccatggtcatgccaggtggttgtactacaatcccagagtcagacctagaagaaagatcagtagaacaagactctacagaactgtttaccaaccacagacatctcactgcagagacacccaggcctggtggagttttcctgcacaagctctctttgcttgctgccatccatgtaagatgtgacttgctcctccttgccttccaccatgattgtgaggctaccccagccacatggaactgttgacatggattttattcaacagacaagctgacatttatcaagatgctttcaattacaccaaaagaaatagaagtcttcgtcttattgctgtttatgtggcagtattgttctcctacaataagttgatggaaatgagttgttttgtttttcattttagccattttacaagtaagtttgctattgttgttgctgtttttagaataaaatgattttaccaataacatt

SEQ ID NO: 451031 - DNA, 3249 bp, Homo sapiens
gggggcgtggcctgcccccggagcccaggcaggaggagggtcttccttaaggaactgctgccaggacagggcagaggattgcagtaattatcactctctgctaatgaggaccaggccgtggttcactcgagccccgccccagtagcaatctaattccaaccgcggccctctcagaagtcggtccccgcctttgcgcctcagcctctctggactccagcccccagaagtcggcgcggcacggcgtgacctgcgcagtggcgtccgttgtaagtgctatgacaacagggcgaagatggctcagagttaggctggagaggggaggtgtcccttccgctgcggccgtcgggtttctgctacatcccattcaccgcctcctccatcctttcctcctcggtgtgagcagcaggacttgcatttgttctcgcctgcctagtgtcttccaagggatagatgccgtttcctctgctggtctctgggggtgacggggggcgcaggggagcttcttgggggaatcactccaactctgtggagctggtggtgctgcctggtggggctctctctttgcccgggacgtggaacaactttcagctggaggacgagagggaatagtgaagctaaaggttgcttttctctgcaccgtccgttcttgctccctctgctccatcactgggaccttgtcaggcgttcataaagcaaaatttgccgaacgagggttcgcagaaaggtggggcagagctcatctgacgtggcatcagtgtgaaagaaaatgtctttatttaaagcccgtgattggtggtctactattctgggagataaagaagaatttgatcaaggctgtttgtgtctggctaatgttgacaatagtggaaatggacaagataaaataattgtgggtagctttatgggatacctaaggatctttagcccccatcctgcaaaaacaggagatggagctcaagccgaagatttgcttctagaagtggatctacgagatccagtacttcaagtggaagtaggaaagtttgtttcaggtaccgaaatgctacatttggctgtgttacattctagaaaactttgtgtctactctgtctcaggaaccttgggtaatgtggaacatgggaaccaatgtcagatgaaattgatgtatgaacataatcttcagagaacagcctgcaatatgacctatggatcatttggtggtgtaaaaggtcgagatttaatttgcatccagtctatggatgggatgctgatggtatttgagcaggagagctatgcttttggaagatttctccctggctttcttctgcctggtcctcttgcctacagttcccgtacagattccttccttactgtctcttcctgccaacaagtggaaagttataagtaccaggtacttgcttttgcaacagatgcagataaaaggcaggagactgaacagcaaaaacttggttctggaaaaagactagttgtggattggactctaaatattggagagcaagcccttgacatatgtattgtctctttcaatcagtcggcatcctctgtttttgttcttggtgagagaaactttttttgccttaaggataatggacaaattcgattcatgaagaggcttgattggagcccaagttgttttctgccatattgctcagtttctgaaggaacaataaatactttgattggaaatcataataacatgctgcatatttatcaagatgtgacactgaagtgggccacccaacttccccacattcctgtagcagtaagagtgggctgtttgcatgatttaaagggagtgatagtcactctgagtgatgatggtcacttgcagtgttcatacctggggacagatccttctctgttccaagctccaaacgttcaatctcgagaactaaactatgatgaacttgatgtagaaatgaaagaacttcagaaaatcatcaaagatgttaacaaatcacaaggtgtttggcccatgactgagagagaagatgacttgaacgtttctgtcgtggtttctcctaactttgattcagtttctcaagcgaccgatgttgaggtgggaactgaccttgtcccttctgtcacggtgaaggtcacactgcagaacagagtgatattgcaaaaagccaaattatcagtctacgtgcaaccaccattagaattgacttgtgatcagttcacctttgaatttatgacaccagatttgactagaacagtaagcttttctgtttatctgaaaagaagttatacaccatcagaattggaaggaaatgctgttgtttcttattccagaccaacagatcgaaatcctgatggcattccgcgagttatccaatgtaaatttagacttcccctaaagttaatttgcctaccaggtcagccttcaaaaactgcaagccacaaaattactattgataccaacaaatctccagtcagtcttcttagtctcttcccaggttttgccagtcagtcagatgatgatcaggtgaatgtaatgggttttcacttcttaggaggtgctcgaattactgttcttgcttccaaaacttctcaacgatatcgcattcagagtgaacaatttgaagatctttggctcataaccaatgagcttattcttcgccttcaagaatattttgaaaaacagggagtcaaagattttgcatgttctttttcgggatctataccccttcaagaatattttgagttgattgatcatcattttgagctacggataaatggtgaaaaattagaagaactcttatctgagagagctgtacaatttcgggccattcaacgccggctactagcaagattcaaagataaaactcctgcccctcttcaacacctggacaccttgttttgccaggaaaggaagtagttgcctttggtcatccatctgctaatagtcacagaatacagtgaaatgacatagttttgggttagattttataatgcaaagattcagatccaaaataatttcataccccattttttcacagaattcttatatagtaaatgtatcaagtttaataaagcatctcattgtcaaataatatcttggattttatttataattagagggatttatgagtgattgctctacattatttcttcaaaggaaaggaaaggaattgaagactttgctactctctggtaagacttgaatgtgattattttataaataaaagaaccactatgaaactttaaaaaaaaaaagtcgacgcggccgcgaatttagtagtagta

SEQ ID NO: 451032 - DNA, 513 bp, Homo sapiens
ccctgggttgtcctgtcttcactcctgtgcctccttcctggtcttcagccagccagcagccccgctccatctcttggtccattgtacctccaaagtgttgttcacatgcttattacggaaatgccaagtagtagctggaaggaggattaaaaacagtacttaaaatgctcttagagcaggatttgctttgtagttaggtccccaaaagtggtagctattataataattaagcttttttcccggccttagtggaccttaacattgggaatacttctgtaaatacaaatcgtgtttgaaacatttgaattgagtctttgaagtaaaactttagaaatagatatatagttattttcttaatggtgtgttgatgctgaattgagtaaaaatgtagttggtcaagactaactctactgaaatttaaaattatgtctcattttctcttccttattgtagtgatttaaagggagtgatagtcactctgagtgatgatggtcacttgcagtgttcatacct

SEQ ID NO: 451033 - DNA, 4153 bp, Homo sapiens
gggggcgtggcctgcccccggagcccaggcaggaggagggtcttccttaaggaactgctgccaggacagggcagaggattgcagtaattatcactctctgctaatgaggaccaggccgtggttcactcgagccccgccccagtagcaatctaattccaaccgcggccctctcagaagtcggtccccgcctttgcgcctcagcctctctggactccagcccccagaagtcggcgcggcacggcgtgacctgcgcagtggcgtccgttgtaagtgctatgacaacagggcgaagatggctcagagttaggctggagaggggaggtgtcccttccgctgcggccgtcgggtttctgctacatcccattcaccgcctcctccatcctttcctcctcggtgtgagcagcaggacttgcatttgttctcgcctgcctagtgtcttccaagggatagatgccgtttcctctgctggtctctgggggtgacggggggcgcaggggagcttcttgggggaatcactccaactctgtggagctggtggtgctgcctggtggggctctctctttgcccgggacgtggaacaactttcagctggaggacgagagggaatagtgaagctaaaggttgcttttctctgcaccgtccgttcttgctccctctgctccatcactgggaccttgtcaggcgttcataaagcaaaatttgccgaacgagggttcgcagaaaggtggggcagagctcatctgacgtggcatcagtgtgaaagaaaatgtctttatttaaagcccgtgattggtggtctactattctgggagataaagaagaatttgatcaaggctgtttgtgtctggctaatgttgacaatagtggaaatggacaagataaaataattgtgggtagctttatgggatacctaaggatctttagcccccatcctgcaaaaacaggagatggagctcaagccgaagatttgcttctagaagtggatctacgagatccagtacttcaagtggaagtaggaaagtttgtttcaggtaccgaaatgctacatttggctgtgttacattctagaaaactttgtgtctactctgtctcaggaaccttgggtaatgtggaacatgggaaccaatgtcagatgaaattgatgtatgaacataatcttcagagaacagcctgcaatatgacctatggatcatttggtggtgtaaaaggtcgagatttaatttgcatccagtctatggatgggatgctgatggtatttgagcaggagagctatgcttttggaagatttctccctggctttcttctgcctggtcctcttgcctacagttcccgtacagattccttccttactgtctcttcctgccaacaagtggaaagttataagtaccaggtacttgcttttgcaacagatgcagataaaaggcaggagactgaacagcaaaaacttggttctggaaaaagactagttgtggattggactctaaatattggagagcaagcccttgacatatgtattgtctctttcaatcagtcggcatcctctgtttttgttcttggtgagagaaactttttttgccttaaggataatggacaaattcgattcatgaagaggcttgattggagcccaagttgttttctgccatattgctcagtttctgaaggaacaataaatactttgattggaaatcataataacatgctgcatatttatcaagatgtgacactgaagtgggccacccaacttccccacattcctgtagcagtaagagtgggctgtttgcatgatttaaagggagtgatagtcactctgagtgatgatggtcacttgcagtgttcatacctggggacagatccttctctgttccaagctccaaacgttcaatctcgagaactaaactatgatgaacttgatgtagaaatgaaagaacttcagaaaatcatcaaagatgttaacaaatcacaaggtgtttggcccatgactgagagagaagatgacttgaacgtttctgtcgtggtttctcctaactttgattcagtttctcaagcgaccgatgttgaggtgggaactgaccttgtcccttctgtcacggtgaaggtcacactgcagaacagagtgatattgcaaaaagccaaattatcagtctacgtgcaaccaccattagaattgacttgtgatcagttcacctttgaatttatgagcattccgcgagttatccaatgtaaatttagacttcccctaaagttaatttgcctaccaggtcagccttcaaaaactgcaagccacaaaattactattgataccaacaaatctccagtcagtcttcttagtctcttcccaggttttgccagtcagtcagatgatgatcaggtgaatgtaatgggttttcacttcttaggaggtgctcgaattactgttcttgcttccaaaacttctcaacgatatcgcattcagagtgaacaatttgaagatctttggctcataaccaatgagcttattcttcgccttcaagaatattttgaaaaacagggagtcaaagattttgcatgttctttttcgggatctataccccttcaagaatattttgagttgattgatcatcattttgagctacggataaatggtgaaaaattagaagaactcttatctgagagagctgtacaatttcgggccattcaacgccggctactagcaagattcaaagataaaactcctgcccctcttcaacacctggacaccttgttagatggaacctacaagcaggtaattgctctagcagatgcagtggaggaaaaccaaggcaatctgttccagtcattcaccaggctgaagagtgccacccatttggtgattctgctgatcgcgctgtggcagaagcttagtgctgaccaggttgctattctggaagcggcatttctgccgctacaagaagacactcaagaattgggctgggaagaaacggtggatgccgccatttcccacctgttgaagacttgcctgtcgaagagttctaaggagcaggctttgaacctcaacagccagctgaacatacccaaagacacaagccaactgaagaaacatatcaccttgctctgcgatagattatccaaaggtggccgtctctgcctaagtaccgatgcagcagccccacagaccatggtcatgccaggtggttgtactacaatcccagagtcagacctagaagaaagatcagtagaacaagactctacagaactgtttaccaaccacagacatctcactgcagagacacccaggcctgaagtttcacccctccaaggagtctcggaataattcaagtagagttgtttggttgagaggaacatccccatctcaaggccgaacctgtgtgaacctcatgccaagcacagatatagggctggcgcaggtgcttcctaaagctcaccttcctggagatgacatgcatagaaagaggggttgggactttttacttcactaggagaacttgtaacaccatggggaagtcagctgaaacttgtcttgttttgccaggaaaggaagtagttgcctttggtcatccatctgctaatagtcacagaatacagtgaaatgacatagttttgggttagattttataatgcaaagattcagatccaaaataatttcataccccattttttcacagaattcttatatagtaaatgtatcaagtttaataaagcatctcattgtcaaataatatcttggattttatttataattagagggatttatgagtgattgctctacattatttcttcaaaggaaaggaaaggaattgaagactttgctactctctggtaagacttgaatgtgattattttataaataaaagaaccactatgaaactttcatgtgatttgttctattaagctaaacgtggaagaagggaagttttctagtattgtatgaaaatgtttaaatattttcaaggaagctagtacattaacatccccttttcattaccccattgggtggcaccttttaaaaatccaggttattaaaggattcacactttattacagttaaaatttaaggtttttatgtgtaagaagtgaaagaaactttgctaatttcaagttcgaattacagttgtgagattgatttatttaaataaaaatatgcctttgccagtta

SEQ ID NO: 451034 - DNA, 4273 bp, Homo sapiens
gggggcgtggcctgcccccggagcccaggcaggaggagggtcttccttaaggaactgctgccaggacagggcagaggattgcagtaattatcactctctgctaatgaggaccaggccgtggttcactcgagccccgccccagtagcaatctaattccaaccgcggccctctcagaagtcggtccccgcctttgcgcctcagcctctctggactccagcccccagaagtcggcgcggcacggcgtgacctgcgcagtggcgtccgttgtaagtgctatgacaacagggcgaagatggctcagagttaggctggagaggggaggtgtcccttccgctgcggccgtcgggtttctgctacatcccattcaccgcctcctccatcctttcctcctcggtgtgagcagcaggacttgcatttgttctcgcctgcctagtgtcttccaagggatagatgccgtttcctctgctggtctctgggggtgacggggggcgcaggggagcttcttgggggaatcactccaactctgtggagctggtggtgctgcctggtggggctctctctttgcccgggacgtggaacaactttcagctggaggacgagagggaatagtgaagctaaaggttgcttttctctgcaccgtccgttcttgctccctctgctccatcactgggaccttgtcaggcgttcataaagcaaaatttgccgaacgagggttcgcagaaaggtggggcagagctcatctgacgtggcatcagtgtgaaagaaaatgtctttatttaaagcccgtgattggtggtctactattctgggagataaagaagaatttgatcaaggctgtttgtgtctggctaatgttgacaatagtggaaatggacaagataaaataattgtgggtagctttatgggatacctaaggatctttagcccccatcctgcaaaaacaggagatggagctcaagccgaagatttgcttctagaagtggatctacgagatccagtacttcaagtggaagtaggaaagtttgtttcaggtaccgaaatgctacatttggctgtgttacattctagaaaactttgtgtctactctgtctcaggaaccttgggtaatgtggaacatgggaaccaatgtcagatgaaattgatgtatgaacataatcttcagagaacagcctgcaatatgacctatggatcatttggtggtgtaaaaggtcgagatttaatttgcatccagtctatggatgggatgctgatggtatttgagcaggagagctatgcttttggaagatttctccctggctttcttctgcctggtcctcttgcctacagttcccgtacagattccttccttactgtctcttcctgccaacaagtggaaagttataagtaccaggtacttgcttttgcaacagatgcagataaaaggcaggagactgaacagcaaaaacttggttctggaaaaagactagttgtggattggactctaaatattggagagcaagcccttgacatatgtattgtctctttcaatcagtcggcatcctctgtttttgttcttggtgagagaaactttttttgccttaaggataatggacaaattcgattcatgaagaggcttgattggagcccaagttgttttctgccatattgctcagtttctgaaggaacaataaatactttgattggaaatcataataacatgctgcatatttatcaagatgtgacactgaagtgggccacccaacttccccacattcctgtagcagtaagagtgggctgtttgcatgatttaaagggagtgatagtcactctgagtgatgatggtcacttgcagtgttcatacctggggacagatccttctctgttccaagctccaaacgttcaatctcgagaactaaactatgatgaacttgatgtagaaatgaaagaacttcagaaaatcatcaaagatgttaacaaatcacaaggtgtttggcccatgactgagagagaagatgacttgaacgtttctgtcgtggtttctcctaactttgattcagtttctcaagcgaccgatgttgaggtgggaactgaccttgtcccttctgtcacggtgaaggtcacactgcagaacagagtgatattgcaaaaagccaaattatcagtctacgtgcaaccaccattagaattgacttgtgatcagttcacctttgaatttatgacaccagatttgactagaacagtaagcttttctgtttatctgaaaagaagttatacaccatcagaattggaaggaaatgctgttgtttcttattccagaccaacagatcgaaatcctgatggcattccgcgagttatccaatgtaaatttagacttcccctaaagttaatttgcctaccaggtcagccttcaaaaactgcaagccacaaaattactattgataccaacaaatctccagtcagtcttcttagtctcttcccaggttttgccagtcagtcagatgatgatcaggtgaatgtaatgggttttcacttcttaggaggtgctcgaattactgttcttgcttccaaaacttctcaacgatatcgcattcagagtgaacaatttgaagatctttggctcataaccaatgagcttattcttcgccttcaagaatattttgaaaaacagggagtcaaagattttgcatgttctttttcgggatctataccccttcaagaatattttgagttgattgatcatcattttgagctacggataaatggtgaaaaattagaagaactcttatctgagagagctgtacaatttcgggccattcaacgccggctactagcaagattcaaagataaaactcctgcccctcttcaacacctggacaccttgttagatggaacctacaagcaggtaattgctctagcagatgcagtggaggaaaaccaaggcaatctgttccagtcattcaccaggctgaagagtgccacccatttggtgattctgctgatcgcgctgtggcagaagcttagtgctgaccaggttgctattctggaagcggcatttctgccgctacaagaagacactcaagaattgggctgggaagaaacggtggatgccgccatttcccacctgttgaagacttgcctgtcgaagagttctaaggagcaggctttgaacctcaacagccagctgaacatacccaaagacacaagccaactgaagaaacatatcaccttgctctgcgatagattatccaaaggtggccgtctctgcctaagtaccgatgcagcagccccacagaccatggtcatgccaggtggttgtactacaatcccagagtcagacctagaagaaagatcagtagaacaagactctacagaactgtttaccaaccacagacatctcactgcagagacacccaggcctgaagtttcacccctccaaggagtctcggaataattcaagtagagttgtttggttgagaggaacatccccatctcaaggccgaacctgtgtgaacctcatgccaagcacagatatagggctggcgcaggtgcttcctaaagctcaccttcctggagatgacatgcatagaaagaggggttgggactttttacttcactaggagaacttgtaacaccatggggaagtcagctgaaacttgtcttgttttgccaggaaaggaagtagttgcctttggtcatccatctgctaatagtcacagaatacagtgaaatgacatagttttgggttagattttataatgcaaagattcagatccaaaataatttcataccccattttttcacagaattcttatatagtaaatgtatcaagtttaataaagcatctcattgtcaaataatatcttggattttatttataattagagggatttatgagtgattgctctacattatttcttcaaaggaaaggaaaggaattgaagactttgctactctctggtaagacttgaatgtgattattttataaataaaagaaccactatgaaactttcatgtgatttgttctattaagctaaacgtggaagaagggaagttttctagtattgtatgaaaatgtttaaatattttcaaggaagctagtacattaacatccccttttcattaccccattgggtggcaccttttaaaaatccaggttattaaaggattcacactttattacagttaaaatttaaggtttttatgtgtaagaagtgaaagaaactttgctaatttcaagttcgaattacagttgtgagattgatttatttaaataaaaatatgcctttgccagtta

SEQ ID NO: 451035 - DNA, 4119 bp, Homo sapiens
gggggcgtggcctgcccccggagcccaggcaggaggagggtcttccttaaggaactgctgccaggacagggcagaggattgcagtaattatcactctctgctaatgaggaccaggccgtggttcactcgagccccgccccagtagcaatctaattccaaccgcggccctctcagaagtcggtccccgcctttgcgcctcagcctctctggactccagcccccagaagtcggcgcggcacggcgtgacctgcgcagtggcgtccgttgtaagtgctatgacaacagggcgaagatggctcagagttaggctggagaggggaggtgtcccttccgctgcggccgtcgggtttctgctacatcccattcaccgcctcctccatcctttcctcctcggtgtgagcagcaggacttgcatttgttctcgcctgcctagtgtcttccaagggatagatgccgtttcctctgctggtctctgggggtgacggggggcgcaggggagcttcttgggggaatcactccaactctgtggagctggtggtgctgcctggtggggctctctctttgcccgggacgtggaacaactttcagctggaggacgagagggaatagtgaagctaaaggttgcttttctctgcaccgtccgttcttgctccctctgctccatcactgggaccttgtcaggcgttcataaagcaaaatttgccgaacgagggttcgcagaaaggtggggcagagctcatctgacgtggcatcagtgtgaaagaaaatgtctttatttaaagcccgtgattggtggtctactattctgggagataaagaagaatttgatcaaggctgtttgtgtctggctaatgttgacaatagtggaaatggacaagataaaataattgtgggtagctttatgggatacctaaggatctttagcccccatcctgcaaaaacaggagatggagctcaagccgaagatttgcttctagaagtggatctacgagatccagtacttcaagtggaagtaggaaagtttgtttcaggtaccgaaatgctacatttggctgtgttacattctagaaaactttgtgtctactctgtctcaggaaccttgggtaatgtggaacatgggaaccaatgtcagatgaaattgatgtatgaacataatcttcagagaacagcctgcaatatgacctatggatcatttggtggtgtaaaaggtcgagatttaatttgcatccagtctatggatgggatgctgatggtatttgagcaggagagctatgcttttggaagatttctccctggctttcttctgcctggtcctcttgcctacagttcccgtacagattccttccttactgtctcttcctgccaacaagtggaaagttataagtaccaggtacttgcttttgcaacagatgcagataaaaggcaggagactgaacagcaaaaacttggttctggaaaaagactagttgtggattggactctaaatattggagagcaagcccttgacatatgtattgtctctttcaatcagtcggcatcctctgtttttgttcttggtgagagaaactttttttgccttaaggataatggacaaattcgattcatgaagaggcttgattggagcccaagttgttttctgccatattgctcagtttctgaaggaacaataaatactttgattggaaatcataataacatgctgcatatttatcaagatgtgacactgaagtgggccacccaacttccccacattcctgtagcagtaagagtgggctgtttgcatgatttaaagggagtgatagtcactctgagtgatgatggtcacttgcagtgttcatacctggggacagatccttctctgttccaagctccaaacgttcaatctcgagaactaaactatgatgaacttgatgtagaaatgaaagaacttcagaaaatcatcaaagatgttaacaaatcacaaggtgtttggcccatgactgagagagaagatgacttgaacgtttctgtcgtggtttctcctaactttgattcagtttctcaagcgaccgatgttgaggtgggaactgaccttgtcccttctgtcacggtgaaggtcacactgcagaacagagtgatattgcaaaaagccaaattatcagtctacgtgcaaccaccattagaattgacttgtgatcagttcacctttgaatttatgacaccagatttgactagaacagtaagcttttctgtttatctgaaaagaagttatacaccatcagaattggaaggaaatgctgttgtttcttattccagaccaacagatcgaaatcctgatggcattccgcgagttatccaatgtaaatttagacttcccctaaagttaatttgcctaccaggtcagccttcaaaaactgcaagccacaaaattactattgataccaacaaatctccagtcagtcttcttagtctcttcccaggttttgccagtcagtcagatgatgatcaggtgaatgtaatgggttttcacttcttaggaggtgctcgaattactgttcttgcttccaaaacttctcaacgatatcgcattcagagtgaacaatttgaagatctttggctcataaccaatgagcttattcttcgccttcaagaatattttgaaaaacagggagtcaaagattttgcatgttctttttcgggatctataccccttcaagaatattttgagttgattgatcatcattttgagctacggataaatggtgaaaaattagaagaactcttatctgagagagctgtacaatttcgggccattcaacgccggctactagcaagattcaaagataaaactcctgcccctcttcaacacctggacaccttgttagatggaacctacaagcaggtaattgctctagcagatgcagtggaggaaaaccaaggcaatctgttccagtcattcaccaggctgaagagtgccacccatttggtgattctgctgatcgcgctgtggcagaagcttagtgctgaccaggttgctattctggaagcggcatttctgccgctacaagaagacactcaagaattggtaaggacctgaaagcctgtggtgggaacagccagcattattgaagtttcggctttaggaagatatcacatggctatcaggttttctaagggctgggaagaaacggtggatgccgccatttcccacctgttgaagacttgcctgtcgaagagttctaaggagcaggctttgaacctcaacagccagctgaacatacccaaagacacaagccaactgaagaaacatatcaccttgctctgcgatagattatccaaaggtggccgtctctgcctaagtaccgatgcagcagccccacagaccatggtcatgccaggtggttgtactacaatcccagagtcagacctagaagaaagatcagtagaacaagactctacagaactgtttaccaaccacagacatctcactgcagagacacccaggcctgaagtttcacccctccaaggagtctcggaataattcaagtagagttgtttggttgagaggaacatccccatctcaaggccgaacctgtgtgaacctcatgccaagcacagatatagggctggcgcaggtgcttcctaaagctcaccttcctggagatgacatgcatagaaagaggggttgggactttttacttcactaggagaacttgtaacaccatggggaagtcagctgaaacttgtcttgttttgccaggaaaggaagtagttgcctttggtcatccatctgctaatagtcacagaatacagtgaaatgacatagttttgggttagattttataatgcaaagattcagatccaaaataatttcataccccattttttcacagaattcttatatagtaaatgtatcaagtttaataaagcatctcattgtcaaataatatcttggattttatttataattagagggatttatgagtgattgctctacattatttcttcaaaggaaaggaaaggaattgaagactttgctactctctggtaagacttgaatgtgattattttataaataaaagaaccactatgaaactttaaaaaaaaaaagtcgacgcggccgcgaatttagtagtagta

SEQ ID NO: 451036 - DNA, 1398 bp, Homo sapiens
aacgattaaagtcctacgtgatctgagttcagaccggagtaatccaggtcggtttctatctacttcaaattcctccctgcaaaaggacaagagaaataaggcctacttcacaaagcgcccttcccccgtaaatgatatcatcttaacaaaccctgttcttgggtgggtgtgggattttgagttgattgatcatcattttgagctacggataaatggtgaaaaattagaagaactcttatctgagagagctgtacaatttcgggccattcaacgccggctactagcaagattcaaagataaaactcctgcccctcttcaacacctggacaccttgttagatggaacctacaagcaggtaattgctctagcagatgcagtggaggaaaaccaaggcaatctgttccagtcattcaccaggctgaagagtgccacccatttggtgattctgctgatcgcgctgtggcagaagcttagtgctgaccaggttgctattctggaagcggcatttctgccgctacaagaagacactcaagaattgggctgggaagaaacggtggatgccgccatttcccacctgttgaagacttgcctgtcgaagagttctaaggagcaggctttgaacctcaacagccagctgaacatacccaaagacacaagccaactgaagaaacatatcaccttgctctgcgatagattatccaaaggtggccgtctctgcctaagtaccgatgcagcagccccacagaccatggtcatgccaggtggttgtactacaatcccagagtcagacctagaagaaagatcatagagttgtttggttgagaggaacatccccatctcaaggccgaacctgtgtgaacctcatgccaagcacagatatagggctggcgcaggtgcttcctaaagctcaccttcctggagatgacatgcatagaaagaggggttgggactttttacttcactaggagaacttgtaacaccatggggaagtcagctgaaacttgtcttgttttgccaggaaaggaagtagttgcctttggtcatccatctgctaatagtcacagaatacagtgaaatgacatagttttgggttagattttataatgcaaagattcagatccaaaataatttcataccccattttttcacagaattcttatatagtaaatgtatcaagtttaataaagcatctcattgtcaaataatatcttggattttatttataattagagggatttatgagtgattgctctacattatttcttcaaaggaaaggaaaggaattgaagactttgctactctctggtaagacttgaatgtgattattttataaataaaagaaccactatgaaactttaaaaaaaaaaagtcgacgcggccgcgaatttagtagtagta

SEQ ID NO: 451037 - DNA, 3293 bp, Homo sapiens
gggggcgtggcctgcccccggagcccaggcaggaggagggtcttccttaaggaactgctgccaggacagggcagaggattgcagtaattatcactctctgctaatgaggaccaggccgtggttcactcgagccccgccccagtagcaatctaattccaaccgcggccctctcagaagtcggtccccgcctttgcgcctcagcctctctggactccagcccccagaagtcggcgcggcacggcgtgacctgcgcagtggcgtccgttgtaagtgctatgacaacagggcgaagatggctcagagttaggctggagaggggaggtgtcccttccgctgcggccgtcgggtttctgctacatcccattcaccgcctcctccatcctttcctcctcggtgtgagcagcaggacttgcatttgttctcgcctgcctagtgtcttccaagggatagatgccgtttcctctgctggtctctgggggtgacggggggcgcaggggagcttcttgggggaatcactccaactctgtggagctggtggtgctgcctggtggggctctctctttgcccgggacgtggaacaactttcagctggaggacgagagggaatagtgaagctaaaggttgcttttctctgcaccgtccgttcttgctccctctgctccatcactgggaccttgtcaggcgttcataaagcaaaatttgccgaacgagggttcgcagaaaggtggggcagagctcatctgacgtggcatcagtgtgaaagaaaatgtctttatttaaagcccgtgattggtggtctactattctgggagataaagaagaatttgatcaaggctgtttgtgtctggctaatgttgacaatagtggaaatggacaagataaaataattgtgggtagctttatgggatacctaaggatctttagcccccatcctgcaaaaacaggagatggagctcaagccgaagatttgcttctagaagtggatctacgagatccagtacttcaagtggaagtaggaaagtttgtttcaggtaccgaaatgctacatttggctgtgttacattctagaaaactttgtgtctactctgtctcaggaaccttgggtaatgtggaacatgggaaccaatgtcagatgaaattgatgtatgaacataatcttcagagaacagcctgcaatatgacctatggatcatttggtggtgtaaaaggtcgagatttaatttgcatccagtctatggatgggatgctgatggtatttgagcaggagagctatgcttttggaagatttctccctggctttcttctgcctggtcctcttgcctacagttcccgtacagattccttccttactgtctcttcctgccaacaagtggaaagttataagtaccaggtacttgcttttgcaacagatgcagataaaaggcaggagactgaacagcaaaaacttggttctggaaaaagactagttgtggattggactctaaatattggagagcaagcccttgacatatgtattgtctctttcaatcagtcggcatcctctgtttttgttcttggtgagagaaactttttttgccttaaggataatggacaaattcgattcatgaagaggcttgattggagcccaagttgttttctgccatattgctcagtttctgaaggaacaataaatactttgattggaaatcataataacatgctgcatatttatcaagatgtgacactgaagtgggccacccaacttccccacattcctgtagcagtaagagtgggctgtttgcatgatttaaagggagtgatagtcactctgagtgatgatggtcacttgcagtgttcatacctggggacagatccttctctgttccaagctccaaacgttcaatctcgagaactaaactatgatgaacttgatgtagaaatgaaagaacttcagaaaatcatcaaagatgttaacaaatcacaaggtgtttggcccatgactgagagagaagatgacttgaacgtttctgtcgtggtttctcctaactttgattcagtttctcaagcgaccgatgttgaggtgggaactgaccttgtcccttctgtcacggtgaaggtcacactgcagaacagagtgatattgcaaaaagccaaattatcagtctacgtgcaaccaccattagaattgacttgtgatcagttcacctttgaatttatgacaccagatttgactagaacagtaagcttttctgtttatctgaaaagaagttatacaccatcagaattggaaggaaatgctgttgtttcttattccagaccaacagatcgaaatcctgatggcattccgcgagttatccaatgtaaatttagacttcccctaaagttaatttgcctaccaggtcagccttcaaaaactgcaagccacaaaattactattgataccaacaaatctccagtcagtcttcttagtctcttcccaggttttgccagtcagtcagatgatgatcaggtgaatgtaatgggttttcacttcttaggaggtgctcgaattactgttcttgcttccaaaacttctcaacgatatcgcattcagagtgaacaatttgaagatctttggctcataaccaatgagcttattcttcgccttcaagaatattttgaaaaacagggagtcaaagattttgcatgttctttttcgggatctataccccttcaagaatattttgagttgattgatcatcattttgagctacggataaatggtgaaaaattagaagaactcttatctgagagagctgtacaatttcgggccattcaacgccggctactagcaagattcaaagataaaactcctgcccctcttcaacacctggacaccttgttagatggaacctacaagcagacacaatggtggaagggcatttaaaggaacttgaagaggatgcttgatttaatgctttccagattttctatatagtaagacttcgtcttttatacatttaaagtgcagaggtttttatttttttctgcttagcctcaaggttgaggttttccatgatttgtaatattacagacaagacgatcaaaaccatggcttttcacttgaatgtatattgttaagtcccattccttttagattaatgaaaagaatgaataaacatttgaaggaaaaatatgagtactataaggattttgacttaatttttatgtaccttgccattcaattttattatatgtatatatttgtaataaatgagggtgaggtgttgattgttcaataagtttcatgagcataataaagtctattttaattc

SEQ ID NO: 451038 - DNA, 1119 bp, Homo sapiens
  misc_feature (10)..(10): n is a, c, g, or t
  misc_feature (12)..(12): n is a, c, g, or t
  misc_feature (38)..(38): n is a, c, g, or t
  misc_feature (49)..(49): n is a, c, g, or t
  misc_feature (56)..(56): n is a, c, g, or t
  misc_feature (69)..(69): n is a, c, g, or t
  misc_feature (75)..(75): n is a, c, g, or t
cgcagagggnangtagggagagagtttggtttggaaangaactccgttnatatccnacctcggggaggnagcagncggagccccagttatgtggaatgggcacagagcaaggctgctggattccagtatccagtgataagggctcctgtccccaggtaatggagcgaagctttcatatgccctcctatgggacacagacccttgaagggggtgtcgagaagccccattctctcctatcagctaacccattatggcaacaaagggccctggacccaccacaccaaatggagctgactcagtgaaaactggaattaaaaggaaagtcaagaagaatgaactatgtcgatgcacagtatcttttctttcaaaagtagagcaaaactataggttttggttccacaatctctacgactaatcacctactcaatgcctggagacagatacgtagttgtgcttttgtttgctcttttaagcagtctcactgcagtcttatttccaagtaagagtactgggagaatcactaggtaacttattagaaacccaaattgggacaacagtgctttgtaaattgtgttgtcttcagcagtcaatacaaatagatttttgtttttgttgttcctgcagccccagaagaaattaggggttaaagcagacagtcacactggtttggtcagttacaaagtaatttctttgatctggacagaacatttatatcagtttcatgaaatgattggaatattacaataccgttaagatacagtgtaggcatttaactcctcattggcgtggtccatgctgatgattttgcaaaatgagttgtgatgaatcaatgaaaaatgtaatttagaaactgatttcttcagaattagatggcttattttttaaaatatttgaatgaaaacattttatttttaaaatattacacaggaggcttcggagtttcttagtcattactgtccttttcccctacagaattttccctcttggtgtgattgcacagaatttgtatgtattttcagttacaagattgtaagtaaattgcctgatttgttttcattatagacaacgatgaatttcttctaattatttaaataaaatcaccaaaaacataaacatttt

SEQ ID NO: 451039 - DNA, 862 bp, Homo sapiens
  misc_feature (38)..(38): n is a, c, g, or t
  misc_feature (794)..(794): n is a, c, g, or t
gggtgttgcgaatagttattgtgctaaatttttggctnacagcgttgtggcctagggtcaatgcaaccaacttcatggaggcaggagccccagttatgtggaatgggcacagagcaaggctgctggattccagtatccagtgataagggctcctgtccccaggtaatggagcgaagctttcatatgccctcctatgggacacagacccttgaagggggtgtcgagaagccccattctctcctatcagctaacccattatggcaacaaagggccctggacccaccacaccaaatggagctgactcagtgaaaactggaattaaaaggaaagtcaagaagaatgaactatgtcgatgcacagtatcttttctttcaaaagtagagcaaaactataggttttggttccacaatctctacgactaatcacctactcaatgcctggagacagatacgtagttgtgcttttgtttgctcttttaagcagtctcactgcagtcttatttccaagtaagagtactgggagaatcactaggtaacttattagaaacccaaattgggacaacagtgctttgtaaattgtgttgttccgtggctctatgggccactacaaaaattatttgggttttagtcggttctagggcccacagaacatattaggtggttaagccctacatgtcccactggttttgatcagtgtcacacgtacttcttatgatcttgccctaacatttctgcttagcggaatggaattgattggcttattacaaaagagctatgaataaatggatggatgtnaaatctggtttgtcggggtcctgttgagtacatttggagaagacgggtaagtatttatgaatattaat

SEQ ID NO: 451040 - DNA, 930 bp, Homo sapiens
agtatccatctccccctcccgcattgcgagcccactggcaaccgacccgcgactcgccaccgtatccccggcgcaacttataaaacttcccggtggtcattagccaaccagggcccgctaaggctttaggcaaaattttatgtccccaaccgccccaagacgcgccacaggcacctacgttatcacgcctgccccatctccagaggaacgaactcccatgcgggggttgttgcctccatcccgcgagctatgtcagttcccgaccctctaactggtgggaactgcgccacgctggccacgggcagcagcagaaggtcatcgtggtggctgtctgcgtggtggtgcttgtcatgctgctcctcctgagcctgtggggggcccactactacaggactcagaagctgctatcgaaaaacccaaagaatccttatgaggagtcgagcagagatgtgaggagtcgcaggcctgctgacactgaggatgggatgtcctcttgccctcaaccttggtttgtggttataaaagaacaccaagacctcaagaatgggggtcaaccagtggctggtgaggatggccaggcagcagatgggtcaatgcaaccaacttcatggaggcaggagccccagttatgtggaatgggcacagagcaaggctgctggattccagtatccagtgataagggctcctgtccccaggtaatggagcgaagctttcatatgccctcctatgggacacagacccttgaagggggtgtcgagaagccccattctctcctatcagctaacccattatggcaacaaagggccctggacccaccacaccaaatggagctgactcagtgaaaactggaattaaaaggaaagtcaagaagaatgaacctcgatgcggtcagccccccatctatcttccccattcttcatttacgcgtgt

SEQ ID NO: 451041 - DNA, 4484 bp, Homo sapiens
gtgtgaatatctacaggaactctttattgtctataaatagactttattttaaacagaaaaccagtaattaaaaattatttctgcttgtgttggttgtcattgggaagtattttgtttaaatgagataaaatattaaaagtatacagtttggtctctttcttcccacccaggtcctgcacccttcttaattttctcccatggaaatagtatctttaggattgacacagaaggaaccaattatgagcaattggtggtggatgctggtgtctcagtgatcatggattttcattataatgagaaaagaatctattgggtggatttagaaagacaacttttgcaaagagtttttctgaatgggtcaaggcaagagagagtatgtaatatagagaaaaatgtttctggaatggcaataaattggataaatgaagaagttatttggtcaaatcaacaggaaggaatcattacagtaacagatatgaaaggaaataattcccacattcttttaagtgctttaaaatatcctgcaaatgtagcagttgatccagtagaaaggtttatattttggtcttcagaggtggctggaagcctttatagagcagatctcgatggtgtgggagtgaaggctctgttggagacatcagagaaaataacagctgtgtcattggatgtgcttgataagcggctgttttggattcagtacaacagagaaggaagcaattctcttatttgctcctgtgattatgatggaggttctgtccacattagtaaacatccaacacagcataatttgtttgcaatgtccctttttggtgaccgtatcttctattcaacatggaaaatgaagacaatttggatagccaacaaacacactggaaaggacatggttagaattaacctccattcatcatttgtaccacttggtgaactgaaagtagtgcatccacttgcacaacccaaggcagaagatgacacttgggagcctgagcagaaactttgcaaattgaggaaaggaaactgcagcagcactgtgtgtgggcaagacctccagtcacacttgtgcatgtgtgcagagggatacgccctaagtcgagaccggaagtactgtgaagatgttaatgaatgtgctttttggaatcatggctgtactcttgggtgtaaaaacacccctggatcctattactgcacgtgccctgtaggatttgttctgcttcctgatgggaaacgatgtcatcaacttgtttcctgtccacgcaatgtgtctgaatgcagccatgactgtgttctgacatcagaaggtcccttatgtttctgtcctgaaggctcagtgcttgagagagatgggaaaacatgtagcggttgttcctcacccgataatggtggatgtagccagctctgcgttcctcttagcccagtatcctgggaatgtgattgctttcctgggtatgacctacaactggatgaaaaaagctgtgcagcttcaggaccacaaccatttttgctgtttgccaattctcaagatattcgacacatgcattttgatggaacagactatggaactctgctcagccagcagatgggaatggtttatgccctagatcatgaccctgtggaaaataagatatactttgcccatacagccctgaagtggatagagagagctaatatggatggttcccagcgagaaaggcttattgaggaaggagtagatgtgccagaaggtcttgctgtggactggattggccgtagattctattggacagacagagggaaatctctgattggaaggagtgatttaaatgggaaacgttccaaaataatcactaaggagaacatctctcaaccacgaggaattgctgttcatccaatggccaagagattattctggactgatacagggattaatccacgaattgaaagttcttccctccaaggccttggccgtctggttatagccagctctgatctaatctggcccagtggaataacgattgacttcttaactgacaagttgtactggtgcgatgccaagcagtctgtgattgaaatggccaatctggatggttcaaaacgccgaagacttacccagaatgatgtaggtcacccatttgctgtagcagtgtttgaggattatgtgtggttctcagattgggctatgccatcagtaataagagtaaacaagaggactggcaaagatagagtacgtctccaaggcagcatgctgaagccctcatcactggttgtggttcatccattggcaaaaccaggagcagatccctgcttatatcaaaacggaggctgtgaacatatttgcaaaaagaggcttggaactgcttggtgttcgtgtcgtgaaggttttatgaaagcctcagatgggaaaacgtgtctggctctggatggtcatcagctgttggcaggtggtgaagttgatctaaagaaccaagtaacaccattggacatcttgtccaagactagagtgtcagaagataacattacagaatctcaacacatgctagtggctgaaatcatggtgtcagatcaagatgactgtgctcctgtgggatgcagcatgtatgctcggtgtatttcagagggagaggatgccacatgtcagtgtttgaaaggatttgctggggatggaaaactatgttctgatatagatgaatgtgagatgggtgtcccagtgtgcccccctgcctcctccaagtgcatcaacaccgaaggtggttatgtctgccggtgctcagaaggctaccaaggagatgggattcactgtcttgatattgatgagtgccaactgggggtgcacagctgtggagagaatgccagctgcacaaatacagagggaggctatacctgcatgtgtgctggacgcctgtctgaaccaggactgatttgccctgactctactccaccccctcacctcagggaagatgaccaccactattccgtaagaaatagtgactctgaatgtcccctgtcccacgatgggtactgcctccatgatggtgtgtgcatgtatattgaagcattggacaagtatgcatgcaactgtgttgttggctacatcggggagcgatgtcagtaccgagacctgaagtggtgggaactgcgccacgctggccacgggcagcagcagaaggtcatcgtggtggctgtctgcgtggtggtgcttgtcatgctgctcctcctgagcctgtggggggcccactactacaggactcagaagctgctatcgaaaaacccaaagaatccttatgaggagtcgagcagagatgtgaggagtcgcaggcctgctgacactgaggatgggatgtcctcttgccctcaaccttggtttgtggttataaaagaacaccaagacctcaagaatgggggtcaaccagtggctggtgaggatggccaggcagcagatgggtcaatgcaaccaacttcatggaggcaggagccccagttatgtggaatgggcacagagcaaggctgctggattccagtatccagtgataagggctcctgtccccaggtaatggagcgaagctttcatatgccctcctatgggacacagacccttgaagggggtgtcgagaagccccattctctcctatcagctaacccattatggcaacaaagggccctggacccaccacaccaaatggagctgactcagtgaaaactggaattaaaaggaaagtcaagaagaatgaactatgtcgatgcacagtatcttttctttcaaaagtagagcaaaactataggttttggttccacaatctctacgactaatcacctactcaatgcctggagacagatacgtagttgtgcttttgtttgctcttttaagcagtctcactgcagtcttatttccaagtaagagtactgggagaatcactaggtaacttattagaaacccaaattgggacaacagtgctttgtaaattgtgttgtcttcagcagtcaatacaaatagatttttgtttttgttgttcctgcagccccagaagaaattaggggttaaagcagacagtcacactggtttggtcagttacaaagtaatttctttgatctggacagaacatttatatcagtttcatgaaatgattggaatattacaataccgttaagatacagtgtaggcatttaactcctcattggcgtggtccatgctgatgattttgcaaaatgagttgtgatgaatcaatgaaaaatgtaatttagaaactgatttcttcagaattagatggcttattttttaaaatatttgaatgaaaacattttatttttaaaatattacacaggaggcttcggagtttcttagtcattactgtccttttcccctacagaattttccctcttggtgtgattgcacagaatttgtatgtattttcagttacaagattgtaagtaaattgcctgatttgttttcattatagacaacgatgaatttcttctaattatttaaataaaatcaccaaaaacataaacatttt

SEQ ID NO: 451042 - DNA, 1447 bp, Homo sapiens
cacacaaacacacacacaccctctacctcacagaaccttggaaagagtgaaacactgtctggaaagcattttgagttctgcagaaaagactgccttaaacatctaaagttatgttcctagttatcttcatatttcttctctcccacacaagtacttaaattttagtagcaaaagcagttagttgtccctgatcatcactgagtgggctgagtattttgttttgttgtgagattgtctcaaattttggctttatcacaggactcagaagctgctatcgaaaaacccaaagaatccttatgaggagtcgagcagagatgtgaggagtcgcaggcctgctgacactgaggatgggatgtcctcttgccctcaaccttggggtcaatgcaaccaacttcatggaggcaggagccccagttatgtggaatgggcacagagcaaggctgctggattccagtatccagtgataagggctcctgtccccaggtaatggagcgaagctttcatatgccctcctatgggacacagacccttgaagggggtgtcgagaagccccattctctcctatcagctaacccattatggcaacaaagggccctggacccaccacaccaaatggagctgactcagtgaaaactggaattaaaaggaaagtcaagaagaatgaactatgtcgatgcacagtatcttttctttcaaaagtagagcaaaactataggttttggttccacaatctctacgactaatcacctactcaatgcctggagacagatacgtagttgtgcttttgtttgctcttttaagcagtctcactgcagtcttatttccaagtaagagtactgggagaatcactaggtaacttattagaaacccaaattgggacaacagtgctttgtaaattgtgttgtcttcagcagtcaatacaaatagatttttgtttttgttgttcctgcagccccagaagaaattaggggttaaagcagacagtcacactggtttggtcagttacaaagtaatttctttgatctggacagaacatttatatcagtttcatgaaatgattggaatattacaataccgttaagatacagtgtaggcatttaactcctcattggcgtggtccatgctgatgattttgcaaaatgagttgtgatgaatcaatgaaaaatgtaatttagaaactgatttcttcagaattagatggcttattttttaaaatatttgaatgaaaacattttatttttaaaatattacacaggaggcttcggagtttcttagtcattactgtccttttcccctacagaattttccctcttggtgtgattgcacagaatttgtatgtattttcagttacaagattgtaagtaaattgcctgatttgttttcattatagacaacgatgaatttcttctaattatttaaataaaatcaccaaaaacataaacatttt

SEQ ID NO: 451043 - DNA, 4042 bp, Homo sapiens
agagaaactgttgggagaggaatcgtatctccatatttcttctttcagccccaatccaagggttgtagctggaactttccatcagttcttcctttctttttcctctctaagcctttgccttgctctgtcacagtgaagtcagccagagcagggctgttaaactctgtgaaatttgtcataagggtgtcaggtatttcttactggcttccaaagaaacatagataaagaaatctttcctgtggcttcccttggcaggctgcattcagaaggtctctcagttgaagaaagagcttggaggacaacagcacaacaggagagtaaaagatgccccagggctgaggcctccgctcaggcagccgcatctggggtcaatcatactcaccttgcccgggccatgctccagcaaaatcaagctgttttcttttgaaagttcaaactcatcaagattatgctgctcactcttatcattctgttgccagtagtttcaaaatttagttttgttagtctctcagcaccgcagcactggagctgtcctgaaggtactctcgcaggaaatgggaattctacttgtgtgggtcctgcacccttcttaattttctcccatggaaatagtatctttaggattgacacagaaggaaccaattatgagcaattggtggtggatgctggtgtctcagtgatcatggattttcattataatgagaaaagaatctattgggtggatttagaaagacaacttttgcaaagagtttttctgaatgggtcaaggcaagagagagtatgtaatatagagaaaaatgtttctggaatggcaataaattggataaatgaagaagttatttggtcaaatcaacaggaaggaatcattacagtaacagatatgaaaggaaataattcccacattcttttaagtgctttaaaatatcctgcaaatgtagcagttgatccagtagaaaggtttatattttggtcttcagaggtggctggaagcctttatagagcagatctcgatggtgtgggagtgaaggctctgttggagacatcagagaaaataacagctgtgtcattggatgtgcttgataagcggctgttttggattcagtacaacagagaaggaagcaattctcttatttgctcctgtgattatgatggaggttctgtccacattagtaaacatccaacacagcataatttgtttgcaatgtccctttttggtgaccgtatcttctattcaacatggaaaatgaagacaatttggatagccaacaaacacactggaaaggacatggttagaattaacctccattcatcatttgtaccacttggtgaactgaaagtagtgcatccacttgcacaacccaaggcagaagatgacacttgggagcctgagcagaaactttgcaaattgaggaaaggaaactgcagcagcactgtgtgtgggcaagacctccagtcacacttgtgcatgtgtgcagagggatacgccctaagtcgagaccggaagtactgtgaagatgttaatgaatgtgctttttggaatcatggctgtactcttgggtgtaaaaacacccctggatcctattactgcacgtgccctgtaggatttgttctgcttcctgatgggaaacgatgtcatcaacttgtttcctgtccacgcaatgtgtctgaatgcagccatgactgtgttctgacatcagaaggtcccttatgtttctgtcctgaaggctcagtgcttgagagagatgggaaaacatgtagcggttgttcctcacccgataatggtggatgtagccagctctgcgttcctcttagcccagtatcctgggaatgtgattgctttcctgggtatgacctacaactggatgaaaaaagctgtgcagcttcaggaccacaaccatttttgctgtttgccaattctcaagatattcgacacatgcattttgatggaacagactatggaactctgctcagccagcagatgggaatggtttatgccctagatcatgaccctgtggaaaataagatatactttgcccatacagccctgaagtggatagagagagctaatatggatggttcccagcgagaaaggcttattgaggaaggagtagatgtgccagaaggtcttgctgtggactggattggccgtagattctattggacagacagagggaaatctctgattggaaggagtgatttaaatgggaaacgttccaaaataatcactaaggagaacatctctcaaccacgaggaattgctgttcatccaatggccaagagattattctggactgatacagggattaatccacgaattgaaagttcttccctccaaggccttggccgtctggttatagccagctctgatctaatctggcccagtggaataacgattgacttcttaactgacaagttgtactggtgcgatgccaagcagtctgtgattgaaatggccaatctggatggttcaaaacgccgaagacttacccagaatgatgtaggtcacccatttgctgtagcagtgtttgaggattatgtgtggttctcagattgggctatgccatcagtaataagagtaaacaagaggactggcaaagatagagtacgtctccaaggcagcatgctgaagccctcatcactggttgtggttcatccattggcaaaaccaggagcagatccctgcttatatcaaaacggaggctgtgaacatatttgcaaaaagaggcttggaactgcttggtgttcgtgtcgtgaaggttttatgaaagcctcagatgggaaaacgtgtctggctctggatggtcatcagctgttggcaggtggtgaagttgatctaaagaaccaagtaacaccattggacatcttgtccaagactagagtgtcagaagataacattacagaatctcaacacatgctagtggctgaaatcatggtgtcagatcaagatgactgtgctcctgtgggatgcagcatgtatgctcggtgtatttcagagggagaggatgccacatgtcagtgtttgaaaggatttgctggggatggaaaactatgttctgtgataagggctcctgtccccaggtaatggagcgaagctttcatatgccctcctatgggacacagacccttgaagggggtgtcgagaagccccattctctcctatcagctaacccattatggcaacaaagggccctggacccaccacaccaaatggagctgactcagtgaaaactggaattaaaaggaaagtcaagaagaatgaactatgtcgatgcacagtatcttttctttcaaaagtagagcaaaactataggttttggttccacaatctctacgactaatcacctactcaatgcctggagacagatacgtagttgtgcttttgtttgctcttttaagcagtctcactgcagtcttatttccaagtaagagtactgggagaatcactaggtaacttattagaaacccaaattgggacaacagtgctttgtaaattgtgttgtcttcagcagtcaatacaaatagatttttgtttttgttgttcctgcagccccagaagaaattaggggttaaagcagacagtcacactggtttggtcagttacaaagtaatttctttgatctggacagaacatttatatcagtttcatgaaatgattggaatattacaataccgttaagatacagtgtaggcatttaactcctcattggcgtggtccatgctgatgattttgcaaaatgagttgtgatgaatcaatgaaaaatgtaatttagaaactgatttcttcagaattagatggcttattttttaaaatatttgaatgaaaacattttatttttaaaatattacacaggaggcttcggagtttcttagtcattactgtccttttcccctacagaattttccctcttggtgtgattgcacagaatttgtatgtattttcagttacaagattgtaagtaaattgcctgatttgttttcattatagacaacgatgaatttcttctaattatttaaataaaatcaccaaaaacataaacatttt

SEQ ID NO: 451044 - DNA, 4644 bp, Homo sapiens
  misc_feature (4370)..(4370): n is a, c, g, or t
agagaaactgttgggagaggaatcgtatctccatatttcttctttcagccccaatccaagggttgtagctggaactttccatcagttcttcctttctttttcctctctaagcctttgccttgctctgtcacagtgaagtcagccagagcagggctgttaaactctgtgaaatttgtcataagggtgtcaggtatttcttactggcttccaaagaaacatagataaagaaatctttcctgtggcttcccttggcaggctgcattcagaaggtctctcagttgaagaaagagcttggaggacaacagcacaacaggagagtaaaagatgccccagggctgaggcctccgctcaggcagccgcatctggggtcaatcatactcaccttgcccgggccatgctccagcaaaatcaagctgttttcttttgaaagttcaaactcatcaagattatgctgctcactcttatcattctgttgccagtagtttcaaaatttagttttgttagtctctcagcaccgcagcactggagctgtcctgaaggtactctcgcaggaaatgggaattctacttgtgtgggtcctgcacccttcttaattttctcccatggaaatagtatctttaggattgacacagaaggaaccaattatgagcaattggtggtggatgctggtgtctcagtgatcatggattttcattataatgagaaaagaatctattgggtggatttagaaagacaacttttgcaaagagtttttctgaatgggtcaaggcaagagagagtatgtaatatagagaaaaatgtttctggaatggcaataaattggataaatgaagaagttatttggtcaaatcaacaggaaggaatcattacagtaacagatatgaaaggaaataattcccacattcttttaagtgctttaaaatatcctgcaaatgtagcagttgatccagtagaaaggtttatattttggtcttcagaggtggctggaagcctttatagagcagatctcgatggtgtgggagtgaaggctctgttggagacatcagagaaaataacagctgtgtcattggatgtgcttgataagcggctgttttggattcagtacaacagagaaggaagcaattctcttatttgctcctgtgattatgatggaggttctgtccacattagtaaacatccaacacagcataatttgtttgcaatgtccctttttggtgaccgtatcttctattcaacatggaaaatgaagacaatttggatagccaacaaacacactggaaaggacatggttagaattaacctccattcatcatttgtaccacttggtgaactgaaagtagtgcatccacttgcacaacccaaggcagaagatgacacttgggagcctgagcagaaactttgcaaattgaggaaaggaaactgcagcagcactgtgtgtgggcaagacctccagtcacacttgtgcatgtgtgcagagggatacgccctaagtcgagaccggaagtactgtgaagatgttaatgaatgtgctttttggaatcatggctgtactcttgggtgtaaaaacacccctggatcctattactgcacgtgccctgtaggatttgttctgcttcctgatgggaaacgatgtcatcaacttgtttcctgtccacgcaatgtgtctgaatgcagccatgactgtgttctgacatcagaaggtcccttatgtttctgtcctgaaggctcagtgcttgagagagatgggaaaacatgtagcggttgttcctcacccgataatggtggatgtagccagctctgcgttcctcttagcccagtatcctgggaatgtgattgctttcctgggtatgacctacaactggatgaaaaaagctgtgcagcttcaggaccacaaccatttttgctgtttgccaattctcaagatattcgacacatgcattttgatggaacagactatggaactctgctcagccagcagatgggaatggtttatgccctagatcatgaccctgtggaaaataagatatactttgcccatacagccctgaagtggatagagagagctaatatggatggttcccagcgagaaaggcttattgaggaaggagtagatgtgccagaaggtcttgctgtggactggattggccgtagattctattggacagacagagggaaatctctgattggaaggagtgatttaaatgggaaacgttccaaaataatcactaaggagaacatctctcaaccacgaggaattgctgttcatccaatggccaagagattattctggactgatacagggattaatccacgaattgaaagttcttccctccaaggccttggccgtctggttatagccagctctgatctaatctggcccagtggaataacgattgacttcttaactgacaagttgtactggtgcgatgccaagcagtctgtgattgaaatggccaatctggatggttcaaaacgccgaagacttacccagaatgatgtaggtcacccatttgctgtagcagtgtttgaggattatgtgtggttctcagattgggctatgccatcagtaataagagtaaacaagaggactggcaaagatagagtacgtctccaaggcagcatgctgaagccctcatcactggttgtggttcatccattggcaaaaccaggagcagatccctgcttatatcaaaacggaggctgtgaacatatttgcaaaaagaggcttggaactgcttggtgttcgtgtcgtgaaggttttatgaaagcctcagatgggaaaacgtgtctggctctggatggtcatcagctgttggcaggtggtgaagttgatctaaagaaccaagtaacaccattggacatcttgtccaagactagagtgtcagaagataacattacagaatctcaacacatgctagtggctgaaatcatggtgtcagatcaagatgactgtgctcctgtgggatgcagcatgtatgctcggtgtatttcagagggagaggatgccacatgtcagtgtttgaaaggatttgctggggatggaaaactatgttctgatatagatgaatgtgagatgggtgtcccagtgtgcccccctgcctcctccaagtgcatcaacaccgaaggtggttatgtctgccggtgctcagaaggctaccaaggagatgggattcactgtcttgatattgatgagtgccaactgggggtgcacagctgtggagagaatgccagctgcacaaatacagagggaggctatacctgcatgtgtgctggacgcctgtctgaaccaggactgatttgccctgactctactccaccccctcacctcagggaagatgaccaccactattccgtaagaaatagtgactctgaatgtcccctgtcccacgatgggtactgcctccatgatggtgtgtgcatgtatattgaagcattggacaagtatgcatgcaactgtgttgttggctacatcggggagcgatgtcagtaccgagacctgaagtggtgggaactgcgccacgctggccacgggcagcagcagaaggtcatcgtggtggctgtctgcgtggtggtgcttgtcatgctgctcctcctgagcctgtggggggcccactactacaggactcagaagctgctatcgaaaaacccaaagaatccttatgaggagtcgagcagagatgtgaggagtcgcaggcctgctgacactgaggatgggatgtcctcttgccctcaaccttggggtcaatgcaaccaacttcatggaggcaggagccccagttatgtggaatgggcacagagcaaggctgctggattccagtatccagtgataagggctcctgtccccaggtaatggagcgaagctttcatatgccctcctatgggacacagacccttgaagggggtgtcgagaagccccattctctcctatcagctaacccattatggcaacaaagggccctggacccaccacaccaaatggagctgactcagtgaaaactggaattaaaaggaaagtcaagaagaatgaactatgtcgatgcacagtatcttttctttcaaaagtagagcaaaactataggttttggttccacaatctctacgactaatcacctactcaatgcctggagacagatacgtagttgtgcttttgtttgctcttttaagcagtctcactgcagtcttatttccaagtaagagtactgggagaatcactaggtaacttattagaaacccaaattgggacaacagtgctttgtaaattgtgttcacaccactacaacccgacggtcgctcttgctcgcccctacaccctccgcacaatcgacgggctacagacacacagttccactggcgtgggacgcccacccaancaattctctttgctcccgcacctaacctctatatatacggcactgctagggactccaatcgcccgcccgccgtccagaacccggggacgcccctcacccgcctcttcccccacgtcacctcttgccgcccgcgctcaccggcctcgtgaggaccatccgccggcgccgtgcctctcgtccctgccgccggacctccttgctctctcgatctcacgccagccaaccgacttcgctgtcctagttcccccgcgccgagactgcactgcccgtccgc

SEQ ID NO: 451045 - DNA, 4527 bp, Homo sapiens
agagaaactgttgggagaggaatcgtatctccatatttcttctttcagccccaatccaagggttgtagctggaactttccatcagttcttcctttctttttcctctctaagcctttgccttgctctgtcacagtgaagtcagccagagcagggctgttaaactctgtgaaatttgtcataagggtgtcaggtatttcttactggcttccaaagaaacatagataaagaaatctttcctgtggcttcccttggcaggctgcattcagaaggtctctcagttgaagaaagagcttggaggacaacagcacaacaggagagtaaaagatgccccagggctgaggcctccgctcaggcagccgcatctggggtcaatcatactcaccttgcccgggccatgctccagcaaaatcaagctgttttcttttgaaagttcaaactcatcaagattatgctgctcactcttatcattctgttgccagtagtttcaaaatttagttttgttagtctctcagcaccgcagcactggagctgtcctgaaggtactctcgcaggaaatgggaattctacttgtgtgggtcctgcacccttcttaattttctcccatggaaatagtatctttaggattgacacagaaggaaccaattatgagcaattggtggtggatgctggtgtctcagtgatcatggattttcattataatgagaaaagaatctattgggtggatttagaaagacaacttttgcaaagagtttttctgaatgggtcaaggcaagagagagtatgtaatatagagaaaaatgtttctggaatggcaataaattggataaatgaagaagttatttggtcaaatcaacaggaaggaatcattacagtaacagatatgaaaggaaataattcccacattcttttaagtgctttaaaatatcctgcaaatgtagcagttgatccagtagaaaggtttatattttggtcttcagaggtggctggaagcctttatagagcagatctcgatggtgtgggagtgaaggctctgttggagacatcagagaaaataacagctgtgtcattggatgtgcttgataagcggctgttttggattcagtacaacagagaaggaagcaattctcttatttgctcctgtgattatgatggaggttctgtccacattagtaaacatccaacacagcataatttgtttgcaatgtccctttttggtgaccgtatcttctattcaacatggaaaatgaagacaatttggatagccaacaaacacactggaaaggacatggttagaattaacctccattcatcatttgtaccacttggtgaactgaaagtagtgcatccacttgcacaacccaaggcagaagatgacacttgggagcctgagcagaaactttgcaaattgaggaaaggaaactgcagcagcactgtgtgtgggcaagacctccagtcacacttgtgcatgtgtgcagagggatacgccctaagtcgagaccggaagtactgtgaagatgttaatgaatgtgctttttggaatcatggctgtactcttgggtgtaaaaacacccctggatcctattactgcacgtgccctgtaggatttgttctgcttcctgatgggaaacgatgtcatcaacttgtttcctgtccacgcaatgtgtctgaatgcagccatgactgtgttctgacatcagaaggtcccttatgtttctgtcctgaaggctcagtgcttgagagagatgggaaaacatgtagcggttgttcctcacccgataatggtggatgtagccagctctgcgttcctcttagcccagtatcctgggaatgtgattgctttcctgggtatgacctacaactggatgaaaaaagctgtgcagcttcaggaccacaaccatttttgctgtttgccaattctcaagatattcgacacatgcattttgatggaacagactatggaactctgctcagccagcagatgggaatggtttatgccctagatcatgaccctgtggaaaataagatatactttgcccatacagccctgaagtggatagagagagctaatatggatggttcccagcgagaaaggcttattgaggaaggagtagatgtgccagaaggtcttgctgtggactggattggccgtagattctattggacagacagagggaaatctctgattggaaggagtgatttaaatgggaaacgttccaaaataatcactaaggagaacatctctcaaccacgaggaattgctgttcatccaatggccaagagattattctggactgatacagggattaatccacgaattgaaagttcttccctccaaggccttggccgtctggttatagccagctctgatctaatctggcccagtggaataacgattgacttcttaactgacaagttgtactggtgcgatgccaagcagtctgtgattgaaatggccaatctggatggttcaaaacgccgaagacttacccagaatgatgtaggtcacccatttgctgtagcagtgtttgaggattatgtgtggttctcagattgggctatgccatcagtaataagagtaaacaagaggactggcaaagatagagtacgtctccaaggcagcatgctgaagccctcatcactggttgtggttcatccattggcaaaaccaggagcagatccctgcttatatcaaaacggaggctgtgaacatatttgcaaaaagaggcttggaactgcttggtgttcgtgtcgtgaaggttttatgaaagcctcagatgggaaaacgtgtctggctctggatggtcatcagctgttggcaggtggtgaagttgatctaaagaaccaagtaacaccattggacatcttgtccaagactagagtgtcagaagataacattacagaatctcaacacatgctagtggctgaaatcatggtgtcagatcaagatgactgtgctcctgtgggatgcagcatgtatgctcggtgtatttcagagggagaggatgccacatgtcagtgtttgaaaggatttgctggggatggaaaactatgttctgatatagatgaatgtgagatgggtgtcccagtgtgcccccctgcctcctccaagtgcatcaacaccgaaggtggttatgtctgccggtgctcagaaggctaccaaggagatgggattcactgtcttgatattgatgagtgccaactgggggtgcacagctgtggagagaatgccagctgcacaaatacagagggaggctatacctgcatgtgtgctggacgcctgtctgaaccaggactgatttgccctgactctactccaccccctcacctcagggaagatgaccaccactattccgtaagaaatagtgactctgaatgtcccctgtcccacgatgggtactgcctccatgatggtgtgtgcatgtatattgaagcattggacaagtatgcatgcaactgtgttgttggctacatcggggagcgatgtcagtaccgagacctgaagtggtgggaactgcgccacgctggccacgggcagcagcagaaggtcatcgtggtggctgtctgcgtggtggtgcttgtcatgctgctcctcctgagcctgtggggggcccactactacaggactcagaagctgctatcgaaaaacccaaagaatccttatgaggagtcgagcagagatgtgaggagtcgcaggcctgctgacactgaggatgggatgtcctcttgccctcaaccttggggtcaatgcaaccaacttcatggaggcaggagccccagttatgtggaatgggcacagagcaaggctgctggattccagtatccagtgataagggctcctgtccccaggtaatggagcgaagctttcatatgccctcctatgggacacagacccttgaagggggtgtcgagaagccccattctctcctatcagctaacccattatggcaacaaagggccctggacccaccacaccaaatggagctgactcagtgaaaactggaattaaaaggaaagtcaagaagaatgaactatgtcgatgcacagtatcttttctttcaaaagtagagcaaaactataggttttggttccacaatctctacgactaatcacctactcaatgcctggagacagatacgtagttgtgcttttgtttgctcttccaaccactcctactgtactgttatccgcacgctccagttctgcgacaaccactcacgtacctatcacaaacccacatccggacaacagtcctttgctatttgtgctgtttttcttacatcttctaccccactttcgtccccgccgcttccgccctcccttattaacctcatgcccaccagtccaccattccactgagtcggctcccccctatatatccctctttgtttttggctccactattcatccgccgtttcccctctcgattgtctcatttatgtctccgtcgcccatctccattccccccttcacaatctttcgttcgcgcccctgtctctccttattccccccccctttcctgatccctct

SEQ ID NO: 451046 - DNA, 3993 bp, Homo sapiens
agagaaactgttgggagaggaatcgtatctccatatttcttctttcagccccaatccaagggttgtagctggaactttccatcagttcttcctttctttttcctctctaagcctttgccttgctctgtcacagtgaagtcagccagagcagggctgttaaactctgtgaaatttgtcataagggtgtcaggtatttcttactggcttccaaagaaacatagataaagaaatctttcctgtggcttcccttggcaggctgcattcagaaggtctctcagttgaagaaagagcttggaggacaacagcacaacaggagagtaaaagatgccccagggctgaggcctccgctcaggcagccgcatctggggtcaatcatactcaccttgcccgggccatgctccagcaaaatcaagctgttttcttttgaaagttcaaactcatcaagattatgctgctcactcttatcattctgttgccagtagtttcaaaatttagttttgttagtctctcagcaccgcagcactggagctgtcctgaaggtactctcgcaggaaatgggaattctacttgtgtgggtcctgcacccttcttaattttctcccatggaaatagtatctttaggattgacacagaaggaaccaattatgagcaattggtggtggatgctggtgtctcagtgatcatggattttcattataatgagaaaagaatctattgggtggatttagaaagacaacttttgcaaagagtttttctgaatgggtcaaggcaagagagagtatgtaatatagagaaaaatgtttctggaatggcaataaattggataaatgaagaagttatttggtcaaatcaacaggaaggaatcattacagtaacagatatgaaaggaaataattcccacattcttttaagtgctttaaaatatcctgcaaatgtagcagttgatccagtagaaaggtttatattttggtcttcagaggtggctggaagcctttatagagcagatctcgatggtgtgggagtgaaggctctgttggagacatcagagaaaataacagctgtgtcattggatgtgcttgataagcggctgttttggattcagtacaacagagaaggaagcaattctcttatttgctcctgtgattatgatggaggttctgtccacattagtaaacatccaacacagcataatttgtttgcaatgtccctttttggtgaccgtatcttctattcaacatggaaaatgaagacaatttggatagccaacaaacacactggaaaggacatggttagaattaacctccattcatcatttgtaccacttggtgaactgaaagtagtgcatccacttgcacaacccaaggcagaagatgacacttgggagcctgagcagaaactttgcaaattgaggaaaggaaactgcagcagcactgtgtgtgggcaagacctccagtcacacttgtgcatgtgtgcagagggatacgccctaagtcgagaccggaagtactgtgaagatgttaatgaatgtgctttttggaatcatggctgtactcttgggtgtaaaaacacccctggatcctattactgcacgtgccctgtaggatttgttctgcttcctgatgggaaacgatgtcatcaacttgtttcctgtccacgcaatgtgtctgaatgcagccatgactgtgttctgacatcagaaggtcccttatgtttctgtcctgaaggctcagtgcttgagagagatgggaaaacatgtagcggttgttcctcacccgataatggtggatgtagccagctctgcgttcctcttagcccagtatcctgggaatgtgattgctttcctgggtatgacctacaactggatgaaaaaagctgtgcagcttcaggaccacaaccatttttgctgtttgccaattctcaagatattcgacacatgcattttgatggaacagactatggaactctgctcagccagcagatgggaatggtttatgccctagatcatgaccctgtggaaaataagatatactttgcccatacagccctgaagtggatagagagagctaatatggatggttcccagcgagaaaggcttattgaggaaggagtagatgtgccagaaggtcttgctgtggactggattggccgtagattctattggacagacagagggaaatctctgattggaaggagtgatttaaatgggaaacgttccaaaataatcactaaggagaacatctctcaaccacgaggaattgctgttcatccaatggccaagagattattctggactgatacagggattaatccacgaattgaaagttcttccctccaaggccttggccgtctggttatagccagctctgatctaatctggcccagtggaataacgattgacttcttaactgacaagttgtactggtgcgatgccaagcagtctgtgattgaaatggccaatctggatggttcaaaacgccgaagacttacccagaatgatgtaggtcacccatttgctgtagcagtgtttgaggattatgtgtggttctcagattgggctatgccatcagtaataagagtaaacaagaggactggcaaagatagagtacgtctccaaggcagcatgctgaagccctcatcactggttgtggttcatccattggcaaaaccaggagcagatccctgcttatatcaaaacggaggctgtgaacatatttgcaaaaagaggcttggaactgcttggtgttcgtgtcgtgaaggttttatgaaagcctcagatgggaaaacgtgtctggctctggatggtcatcagctgttggcaggtggtgaagttgatctaaagaaccaagtaacaccattggacatcttgtccaagactagagtgtcagaagataacattacagaatctcaacacatgctagtggctgaaatcatggtgtcagatcaagatgactgtgctcctgtgggatgcagcatgtatgctcggtgtatttcagagggagaggatgccacatgtcagtgtttgaaaggatttgctggggatggaaaactatgttctgatatagatgaatgtgagatgggtgtcccagtgtgcccccctgcctcctccaagtgcatcaacaccgaaggtggttatgtctgccggtgctcagaaggctaccaaggagatgggattcactgtcttgatattgatgagtgccaactgggggtgcacagctgtggagagaatgccagctgcacaaatacagagggaggctatacctgcatgtgtgctggacgcctgtctgaaccaggactgatttgccctgactctactccaccccctcacctcagggaagatgaccaccactattccgtaagaaatagtgactctgaatgtcccctgtcccacgatgggtactgcctccatgatggtgtgtgcatgtatattgaagcattggacaagtatgcatgcaactgtgttgttggctacatcggggagcgatgtcagtaccgagacctgaagtggtgggaactgcgccacgctggccacgggcagcagcagaaggtcatcgtggtggctgtctgcgtggtggtgcttgtcatgctgctcctcctgagcctgtggggggcccactactacaggactcagaagctgctatcgaaaaacccaaagaatccttatgaggagtcgagcagagatgtgaggagtcgcaggcctgctgacactgaggatgggatgtcctcttgccctcaaccttggggtcaatgcaaccaacttcatggaggcaggagccccagttatgtggaatgggcacagagcaaggctgctggattccagtatccagtgataagggctcctgtccccagaattttccctcttggtgtgattgcacagaatttgtatgtattttcagttacaagattgtaagtaaattgcctgatttgttttcattatagacaacgatgaatttcttctaattatttaaataaaatcaccaaaaacataaacatttt

SEQ ID NO: 451047 - DNA, 2784 bp, Homo sapiens
agagaaactgttgggagaggaatcgtatctccatatttcttctttcagccccaatccaagggttgtagctggaactttccatcagttcttcctttctttttcctctctaagcctttgccttgctctgtcacagtgaagtcagccagagcagggctgttaaactctgtgaaatttgtcataagggtgtcaggtatttcttactggcttccaaagaaacatagataaagaaatctttcctgtggcttcccttggcaggctgcattcagaaggtctctcagttgaagaaagagcttggaggacaacagcacaacaggagagtaaaagatgccccagggctgaggcctccgctcaggcagccgcatctggggtcaatcatactcaccttgcccgggccatgctccagcaaaatcaagctgttttcttttgaaagttcaaactcatcaagattatgctgctcactcttatcattctgttgccagtagtttcaaaatttagttttgttagtctctcagcaccgcagcactggagctgtcctgaaggtactctcgcaggaaatgggaattctacttgtgtgggtcctgcacccttcttaattttctcccatggaaatagtatctttaggattgacacagaaggaaccaattatgagcaattggtggtggatgctggtgtctcagtgatcatggattttcattataatgagaaaagaatctattgggtggatttagaaagacaacttttgcaaagagtttttctgaatgggtcaaggcaagagagagtatgtaatatagagaaaaatgtttctggaatggcaataaattggataaatgaagaagttatttggtcaaatcaacaggaaggaatcattacagtaacagatatgaaaggaaataattcccacattcttttaagtgctttaaaatatcctgcaaatgtagcagttgatccagtagaaaggtttatattttggtcttcagaggtggctggaagcctttatagagcagatctcgatggtgtgggagtgaaggctctgttggagacatcagagaaaataacagctgtgtcattggatgtgcttgataagcggctgttttggattcagtacaacagagaaggaagcaattctcttatttgctcctgtgattatgatggaggttctgtccacattagtaaacatccaacacagcataatttgtttgcaatgtccctttttggtgaccgtatcttctattcaacatggaaaatgaagacaatttggatagccaacaaacacactggaaaggacatggttagaattaacctccattcatcatttgtaccacttggtgaactgaaagtagtgcatccacttgcacaacccaaggcagaagatgacacttgggagcctgagcagaaactttgcaaattgaggaaaggaaactgcagcagcactgtgtgtgggcaagacctccagtcacacttgtgcatgtgtgcagagggatacgccctaagtcgagaccggaagtactgtgaagatgttaatgaatgtgctttttggaatcatggctgtactcttgggtgtaaaaacacccctggatcctattactgcacgtgccctgtaggatttgttctgcttcctgatgggaaacgatgtcatcaacttgtttcctgtccacgcaatgtgtctgaatgcagccatgactgtgttctgacatcagaaggtcccttatgtttctgtcctgaaggctcagtgcttgagagagatgggaaaacatgtagcggttgttcctcacccgataatggtggatgtagccagctctgcgttcctcttagcccagtatcctgggaatgtgattgctttcctgggtatgacctacaactggatgaaaaaagctgtgcagcttcaggaccacaaccatttttgctgtttgccaattctcaagatattcgacacatgcattttgatggaacagactatggaactctgctcagccagcagatgggaatggtttatgccctagatcatgaccctgtggaaaataagatatactttgcccatacagccctgaagtggatagagagagctaatatggatggttcccagcgagaaaggcttattgaggaaggagtagatgtgccagaaggtcttgctgtggactggattggccgtagattctattggacagacagagggaaatctctgattggaaggagtgatttaaatgggaaacgttccaaaataatcactaaggagaacatctctcaaccacgaggaattgctgttcatccaatggccaagagattattctggactgatacagggattaatccacgaattgaaagttcttccctccaaggccttggccgtctggttatagccagctctgatctaatctggcccagtggaataacgattgacttcttaactgacaagttgtactggtgcgatgccaagcagtctgtgattgaaatggccaatctggatggttcaaaacgccgaagacttacccagaatgatgtaggaagaagctaaccaactaataatctgtataagatacctattttgcccattctctttggcttaagataagtataatttaaaattttatgtatttataagattctctaaaaattaaagatatacttcacaataagtgatatgcttatgcacaaccttagactttatcatccttttacttcaggggtatttattgacacattacaggaactgaagatacagtggagggtaaaacaaatatgatatctgcaaagccaaggaatctagtgcagaacacatacattact

SEQ ID NO: 451048 - DNA, 422 bp, Homo sapiens
tttttttttttaccccagaagcttaggtcataagttttagtcaaatgaatagattaatggatgggttcctattttatattaatagcctcaaaattataatttaacgattgctggaaagatctcagtccttatggtctgaaactctggcagaaagtgatttatttacatatttgcctaatcggataggtgggaactctgtaaagactaattcagcagtaacttgtgaactttatgtccaagatgcagggcgtgcctgatgttggcaacagcacctgtaaaggactgaataagaattgaatatacgattatgcttattctttccaactagtcccatttatatcaggattgcctaaatattgcactagttcataattttgcccacagatatagatgaatgtgagatgggtgtcccagtgtgcccc

SEQ ID NO: 451049 - DNA, 449 bp, Homo sapiens
ctgtgttgttggctacatcggggagcgatgtcagtaccgagacctgaagtggtgggaactgcgccacgctggccacgggcagcagcagaaggtcatcgtggtggctgtctgcgtggtggtgcttgtcatgctgctcctcctgagcctgtggggggcccactactacaggtgaccctgtctttcctttggtactggaaacctctttctaagacctcccaggggaatgcctgtctccttgagatgagatgtatgaaatagtacctctacatactacatttaaaacgtgaaataggctgggtgcagtgacccatgcctgcaatcccagcactttgggaggccgaggcaggcagatcacttgaggtcagaagttcgagaccagcctggccaacatggtgaaaccccgtctccactaaaaaggcaaaaagtaacaggcgtagtgatgcacacca

SEQ ID NO: 451050 - DNA, 4889 bp, Homo sapiens
agagaaactgttgggagaggaatcgtatctccatatttcttctttcagccccaatccaagggttgtagctggaactttccatcagttcttcctttctttttcctctctaagcctttgccttgctctgtcacagtgaagtcagccagagcagggctgttaaactctgtgaaatttgtcataagggtgtcaggtatttcttactggcttccaaagaaacatagataaagaaatctttcctgtggcttcccttggcaggctgcattcagaaggtctctcagttgaagaaagagcttggaggacaacagcacaacaggagagtaaaagatgccccagggctgaggcctccgctcaggcagccgcatctggggtcaatcatactcaccttgcccgggccatgctccagcaaaatcaagctgttttcttttgaaagttcaaactcatcaagattatgctgctcactcttatcattctgttgccagtagtttcaaaatttagttttgttagtctctcagcaccgcagcactggagctgtcctgaaggtactctcgcaggaaatgggaattctacttgtgtgggtcctgcacccttcttaattttctcccatggaaatagtatctttaggattgacacagaaggaaccaattatgagcaattggtggtggatgctggtgtctcagtgatcatggattttcattataatgagaaaagaatctattgggtggatttagaaagacaacttttgcaaagagtttttctgaatgggtcaaggcaagagagagtatgtaatatagagaaaaatgtttctggaatggcaataaattggataaatgaagaagttatttggtcaaatcaacaggaaggaatcattacagtaacagatatgaaaggaaataattcccacattcttttaagtgctttaaaatatcctgcaaatgtagcagttgatccagtagaaaggtttatattttggtcttcagaggtggctggaagcctttatagagcagatctcgatggtgtgggagtgaaggctctgttggagacatcagagaaaataacagctgtgtcattggatgtgcttgataagcggctgttttggattcagtacaacagagaaggaagcaattctcttatttgctcctgtgattatgatggaggttctgtccacattagtaaacatccaacacagcataatttgtttgcaatgtccctttttggtgaccgtatcttctattcaacatggaaaatgaagacaatttggatagccaacaaacacactggaaaggacatggttagaattaacctccattcatcatttgtaccacttggtgaactgaaagtagtgcatccacttgcacaacccaaggcagaagatgacacttgggagcctgagcagaaactttgcaaattgaggaaaggaaactgcagcagcactgtgtgtgggcaagacctccagtcacacttgtgcatgtgtgcagagggatacgccctaagtcgagaccggaagtactgtgaagatgttaatgaatgtgctttttggaatcatggctgtactcttgggtgtaaaaacacccctggatcctattactgcacgtgccctgtaggatttgttctgcttcctgatgggaaacgatgtcatcaacttgtttcctgtccacgcaatgtgtctgaatgcagccatgactgtgttctgacatcagaaggtcccttatgtttctgtcctgaaggctcagtgcttgagagagatgggaaaacatgtagcggttgttcctcacccgataatggtggatgtagccagctctgcgttcctcttagcccagtatcctgggaatgtgattgctttcctgggtatgacctacaactggatgaaaaaagctgtgcagcttcaggaccacaaccatttttgctgtttgccaattctcaagatattcgacacatgcattttgatggaacagactatggaactctgctcagccagcagatgggaatggtttatgccctagatcatgaccctgtggaaaataagatatactttgcccatacagccctgaagtggatagagagagctaatatggatggttcccagcgagaaaggcttattgaggaaggagtagatgtgccagaaggtcttgctgtggactggattggccgtagattctattggacagacagagggaaatctctgattggaaggagtgatttaaatgggaaacgttccaaaataatcactaaggagaacatctctcaaccacgaggaattgctgttcatccaatggccaagagattattctggactgatacagggattaatccacgaattgaaagttcttccctccaaggccttggccgtctggttatagccagctctgatctaatctggcccagtggaataacgattgacttcttaactgacaagttgtactggtgcgatgccaagcagtctgtgattgaaatggccaatctggatggttcaaaacgccgaagacttacccagaatgatgtaggtcacccatttgctgtagcagtgtttgaggattatgtgtggttctcagattgggctatgccatcagtaataagagtaaacaagaggactggcaaagatagagtacgtctccaaggcagcatgctgaagccctcatcactggttgtggttcatccattggcaaaaccaggagcagatccctgcttatatcaaaacggaggctgtgaacatatttgcaaaaagaggcttggaactgcttggtgttcgtgtcgtgaaggttttatgaaagcctcagatgggaaaacgtgtctggctctggatggtcatcagctgttggcaggtggtgaagttgatctaaagaaccaagtaacaccattggacatcttgtccaagactagagtgtcagaagataacattacagaatctcaacacatgctagtggctgaaatcatggtgtcagatcaagatgactgtgctcctgtgggatgcagcatgtatgctcggtgtatttcagagggagaggatgccacatgtcagtgtttgaaaggatttgctggggatggaaaactatgttctgatatagatgaatgtgagatgggtgtcccagtgtgcccccctgcctcctccaagtgcatcaacaccgaaggtggttatgtctgccggtgctcagaaggctaccaaggagatgggattcactgtcttgatattgatgagtgccaactgggggtgcacagctgtggagagaatgccagctgcacaaatacagagggaggctatacctgcatgtgtgctggacgcctgtctgaaccaggactgatttgccctgactctactccaccccctcacctcagggaagatgaccaccactattccgtaagaaatagtgactctgaatgtcccctgtcccacgatgggtactgcctccatgatggtgtgtgcatgtatattgaagcattggacaagtatgcatgcaactgtgttgttggctacatcggggagcgatgtcagtaccgagacctgaagtggtgggaactgcgccacgctggccacgggcagcagcagaaggtcatcgtggtggctgtctgcgtggtggtgcttgtcatgctgctcctcctgagcctgtggggggcccactactacaggactcagaagctgctatcgaaaaacccaaagaatccttatgaggagtcgagcagagatgtgaggagtcgcaggcctgctgacactgaggatgggatgtcctcttgccctcaaccttggtttgtggttataaaagaacaccaagacctcaagaatgggggtcaaccagtggctggtgaggatggccaggcagcagatgggtcaatgcaaccaacttcatggaggcaggagccccagttatgtggaatgggcacagagcaaggctgctggattccagtatccagtgataagggctcctgtccccaggtaatggagcgaagctttcatatgccctcctatgggacacagacccttgaagggggtgtcgagaagccccattctctcctatcagctaacccattatggcaacaaagggccctggacccaccacaccaaatggagctgactcagtgaaaactggaattaaaaggaaagtcaagaagaatgaactatgtcgatgcacagtatcttttctttcaaaagtagagcaaaactataggttttggttccacaatctctacgactaatcacctactcaatgcctggagacagatacgtagttgtgcttttgtttgctcttttaagcagtctcactgcagtcttatttccaagtaagagtactgggagaatcactaggtaacttattagaaacccaaattgggacaacagtgctttgtaaattgtgttgtcttcagcagtcaatacaaatagatttttgtttttgttgttcctgcagccccagaagaaattaggggttaaagcagacagtcacactggtttggtcagttacaaagtaatttctttgatctggacagaacatttatatcagtttcatgaaatgattggaatattacaataccgttaagatacagtgtaggcatttaactcctcattggcgtggtccatgctgatgattttgcaaaatgagttgtgatgaatcaatgaaaaatgtaatttagaaactgatttcttcagaattagatggcttattttttaaaatatttgaatgaaaacattttatttttaaaatattacacaggaggcttcggagtttcttagtcattactgtccttttcccctacagaattttccctcttggtgtgattgcacagaatttgtatgtattttcagttacaagattgtaagtaaattgcctgatttgttttcattatagacaacgatgaatttcttctaattatttaaataaaatcaccaaaaacataaacatttt

SEQ ID NO: 451051 - DNA, 1104 bp, Homo sapiens
  misc_feature (60)..(60): n is a, c, g, or t
gcagggggtgttaggggaaagttagtttggaaggcctcgaggtcaaccacctttgctggnaggagccccagttatgtggaatgggcacagagcaaggctgctggattccagtatccagtgataagggctcctgtccccaggtaatggagcgaagctttcatatgccctcctatgggacacagacccttgaagggggtgtcgagaagccccattctctcctatcagctaacccattatggcaacaaagggccctggacccaccacaccaaatggagctgactcagtgaaaactggaattaaaaggaaagtcaagaagaatgaactatgtcgatgcacagtatcttttctttcaaaagtagagcaaaactataggttttggttccacaatctctacgactaatcacctactcaatgcctggagacagatacgtagttgtgcttttgtttgctcttttaagcagtctcactgcagtcttatttccaagtaagagtactgggagaatcactaggtaacttattagaaacccaaattgggacaacagtgctttgtaaattgtgttgtcttcagcagtcaatacaaatagatttttgtttttgttgttcctgcagccccagaagaaattaggggttaaagcagacagtcacactggtttggtcagttacaaagtaatttctttgatctggacagaacatttatatcagtttcatgaaatgattggaatattacaataccgttaagatacagtgtaggcatttaactcctcattggcgtggtccatgctgatgattttgcaaaatgagttgtgatgaatcaatgaaaaatgtaatttagaaactgatttcttcagaattagatggcttattttttaaaatatttgaatgaaaacattttatttttaaaatattacacaggaggcttcggagtttcttagtcattactgtccttttcccctacagaattttccctcttggtgtgattgcacagaatttgtatgtattttcagttacaagattgtaagtaaattgcctgatttgttttcattatagacaacgatgaatttcttctaattatttaaataaaatcaccaaaaacataaacatttt

SEQ ID NO: 451052 - DNA, 4810 bp, Homo sapiens
agagaaactgttgggagaggaatcgtatctccatatttcttctttcagccccaatccaagggttgtagctggaactttccatcagttcttcctttctttttcctctctaagcctttgccttgctctgtcacagtgaagtcagccagagcagggctgttaaactctgtgaaatttgtcataagggtgtcaggtatttcttactggcttccaaagaaacatagataaagaaatctttcctgtggcttcccttggcaggctgcattcagaaggtctctcagttgaagaaagagcttggaggacaacagcacaacaggagagtaaaagatgccccagggctgaggcctccgctcaggcagccgcatctggggtcaatcatactcaccttgcccgggccatgctccagcaaaatcaagctgttttcttttgaaagttcaaactcatcaagattatgctgctcactcttatcattctgttgccagtagtttcaaaatttagttttgttagtctctcagcaccgcagcactggagctgtcctgaaggtactctcgcaggaaatgggaattctacttgtgtgggtcctgcacccttcttaattttctcccatggaaatagtatctttaggattgacacagaaggaaccaattatgagcaattggtggtggatgctggtgtctcagtgatcatggattttcattataatgagaaaagaatctattgggtggatttagaaagacaacttttgcaaagagtttttctgaatgggtcaaggcaagagagagtatgtaatatagagaaaaatgtttctggaatggcaataaattggataaatgaagaagttatttggtcaaatcaacaggaaggaatcattacagtaacagatatgaaaggaaataattcccacattcttttaagtgctttaaaatatcctgcaaatgtagcagttgatccagtagaaaggtttatattttggtcttcagaggtggctggaagcctttatagagcagatctcgatggtgtgggagtgaaggctctgttggagacatcagagaaaataacagctgtgtcattggatgtgcttgataagcggctgttttggattcagtacaacagagaaggaagcaattctcttatttgctcctgtgattatgatggaggttctgtccacattagtaaacatccaacacagcataatttgtttgcaatgtccctttttggtgaccgtatcttctattcaacatggaaaatgaagacaatttggatagccaacaaacacactggaaaggacatggttagaattaacctccattcatcatttgtaccacttggtgaactgaaagtagtgcatccacttgcacaacccaaggcagaagatgacacttgggagcctgagcagaaactttgcaaattgaggaaaggaaactgcagcagcactgtgtgtgggcaagacctccagtcacacttgtgcatgtgtgcagagggatacgccctaagtcgagaccggaagtactgtgaagatgttaatgaatgtgctttttggaatcatggctgtactcttgggtgtaaaaacacccctggatcctattactgcacgtgccctgtaggatttgttctgcttcctgatgggaaacgatgtcatcaacttgtttcctgtccacgcaatgtgtctgaatgcagccatgactgtgttctgacatcagaaggtcccttatgtttctgtcctgaaggctcagtgcttgagagagatgggaaaacatgtagcggttgttcctcacccgataatggtggatgtagccagctctgcgttcctcttagcccagtatcctgggaatgtgattgctttcctgggtatgacctacaactggatgaaaaaagctgtgcagcttcaggaccacaaccatttttgctgtttgccaattctcaagatattcgacacatgcattttgatggaacagactatggaactctgctcagccagcagatgggaatggtttatgccctagatcatgaccctgtggaaaataagatatactttgcccatacagccctgaagtggatagagagagctaatatggatggttcccagcgagaaaggcttattgaggaaggagtagatgtgccagaaggtcttgctgtggactggattggccgtagattctattggacagacagagggaaatctctgattggaaggagtgatttaaatgggaaacgttccaaaataatcactaaggagaacatctctcaaccacgaggaattgctgttcatccaatggccaagagattattctggactgatacagggattaatccacgaattgaaagttcttccctccaaggccttggccgtctggttatagccagctctgatctaatctggcccagtggaataacgattgacttcttaactgacaagttgtactggtgcgatgccaagcagtctgtgattgaaatggccaatctggatggttcaaaacgccgaagacttacccagaatgatgtaggtcacccatttgctgtagcagtgtttgaggattatgtgtggttctcagattgggctatgccatcagtaataagagtaaacaagaggactggcaaagatagagtacgtctccaaggcagcatgctgaagccctcatcactggttgtggttcatccattggcaaaaccaggagcagatccctgcttatatcaaaacggaggctgtgaacatatttgcaaaaagaggcttggaactgcttggtgttcgtgtcgtgaaggttttatgaaagcctcagatgggaaaacgtgtctggctctggatggtcatcagctgttggcaggtggtgaagttgatctaaagaaccaagtaacaccattggacatcttgtccaagactagagtgtcagaagataacattacagaatctcaacacatgctagtggctgaaatcatggtgtcagatcaagatgactgtgctcctgtgggatgcagcatgtatgctcggtgtatttcagagggagaggatgccacatgtcagtgtttgaaaggatttgctggggatggaaaactatgttctgatatagatgaatgtgagatgggtgtcccagtgtgcccccctgcctcctccaagtgcatcaacaccgaaggtggttatgtctgccggtgctcagaaggctaccaaggagatgggattcactgtcttgatattgatgagtgccaactgggggtgcacagctgtggagagaatgccagctgcacaaatacagagggaggctatacctgcatgtgtgctggacgcctgtctgaaccaggactgatttgccctgactctactccaccccctcacctcagggaagatgaccaccactattccgtaagaaatagtgactctgaatgtcccctgtcccacgatgggtactgcctccatgatggtgtgtgcatgtatattgaagcattggacaagtatgcatgcaactgtgttgttggctacatcggggagcgatgtcagtaccgagacctgaagtggtgggaactgcgccacgctggccacgggcagcagcagaaggtcatcgtggtggctgtctgcgtggtggtgcttgtcatgctgctcctcctgagcctgtggggggcccactactacaggactcagaagctgctatcgaaaaacccaaagaatccttatgaggagtcgagcagagatgtgaggagtcgcaggcctgctgacactgaggatgggatgtcctcttgccctcaaccttggggtcaatgcaaccaacttcatggaggcaggagccccagttatgtggaatgggcacagagcaaggctgctggattccagtatccagtgataagggctcctgtccccaggtaatggagcgaagctttcatatgccctcctatgggacacagacccttgaagggggtgtcgagaagccccattctctcctatcagctaacccattatggcaacaaagggccctggacccaccacaccaaatggagctgactcagtgaaaactggaattaaaaggaaagtcaagaagaatgaactatgtcgatgcacagtatcttttctttcaaaagtagagcaaaactataggttttggttccacaatctctacgactaatcacctactcaatgcctggagacagatacgtagttgtgcttttgtttgctcttttaagcagtctcactgcagtcttatttccaagtaagagtactgggagaatcactaggtaacttattagaaacccaaattgggacaacagtgctttgtaaattgtgttgtcttcagcagtcaatacaaatagatttttgtttttgttgttcctgcagccccagaagaaattaggggttaaagcagacagtcacactggtttggtcagttacaaagtaatttctttgatctggacagaacatttatatcagtttcatgaaatgattggaatattacaataccgttaagatacagtgtaggcatttaactcctcattggcgtggtccatgctgatgattttgcaaaatgagttgtgatgaatcaatgaaaaatgtaatttagaaactgatttcttcagaattagatggcttattttttaaaatatttgaatgaaaacattttatttttaaaatattacacaggaggcttcggagtttcttagtcattactgtccttttcccctacagaattttccctcttggtgtgattgcacagaatttgtatgtattttcagttacaagattgtaagtaaattgcctgatttgttttcattatagacaacgatgaatttcttctaattatttaaataaaatcaccaaaaacataaacatttt

SEQ ID NO: 451053 - DNA, 4726 bp, Homo sapiens
agagaaactgttgggagaggaatcgtatctccatatttcttctttcagccccaatccaagggttgtagctggaactttccatcagttcttcctttctttttcctctctaagcctttgccttgctctgtcacagtgaagtcagccagagcagggctgttaaactctgtgaaatttgtcataagggtgtcaggtatttcttactggcttccaaagaaacatagataaagaaatctttcctgtggcttcccttggcaggctgcattcagaaggtctctcagttgaagaaagagcttggaggacaacagcacaacaggagagtaaaagatgccccagggctgaggcctccgctcaggcagccgcatctggggtcaatcatactcaccttgcccgggccatgctccagcaaaatcaagctgttttcttttgaaagttcaaactcatcaagattatgctgctcactcttatcattctgttgccagtagtttcaaaatttagttttgttagtctctcagcaccgcagcactggagctgtcctgaaggtactctcgcaggaaatgggaattctacttgtgtgggtcctgcacccttcttaattttctcccatggaaatagtatctttaggattgacacagaaggaaccaattatgagcaattggtggtggatgctggtgtctcagtgatcatggattttcattataatgagaaaagaatctattgggtggatttagaaagacaacttttgcaaagagtttttctgaatgggtcaaggcaagagagagtatgtaatatagagaaaaatgtttctggaatggcaataaattggataaatgaagaagttatttggtcaaatcaacaggaaggaatcattacagtaacagatatgaaaggaaataattcccacattcttttaagtgctttaaaatatcctgcaaatgtagcagttgatccagtagaaaggtttatattttggtcttcagaggtggctggaagcctttatagagcagatctcgatggtgtgggagtgaaggctctgttggagacatcagagaaaataacagctgtgtcattggatgtgcttgataagcggctgttttggattcagtacaacagagaaggaagcaattctcttatttgctcctgtgattatgatggaggttctgtccacattagtaaacatccaacacagcataatttgtttgcaatgtccctttttggtgaccgtatcttctattcaacatggaaaatgaagacaatttggatagccaacaaacacactggaaaggacatggttagaattaacctccattcatcatttgtaccacttggtgaactgaaagtagtgcatccacttgcacaacccaaggcagaagatgacacttgggagcctgagcagaaactttgcaaattgaggaaaggaaactgcagcagcactgtgtgtgggcaagacctccagtcacacttgtgcatgtgtgcagagggatacgccctaagtcgagaccggaagtactgtgaagatgttaatgaatgtgctttttggaatcatggctgtactcttgggtgtaaaaacacccctggatcctattactgcacgtgccctgtaggatttgttctgcttcctgatgggaaacgatgtcatcaacttgtttcctgtccacgcaatgtgtctgaatgcagccatgactgtgttctgacatcagaaggtcccttatgtttctgtcctgaaggctcagtgcttgagagagatgggaaaacatgtagcggttgttcctcacccgataatggtggatgtagccagctctgcgttcctcttagcccagtatcctgggaatgtgattgctttcctgggtatgacctacaactggatgaaaaaagctgtgcagcttcaggaccacaaccatttttgctgtttgccaattctcaagatattcgacacatgcattttgatggaacagactatggaactctgctcagccagcagatgggaatggtttatgccctagatcatgaccctgtggaaaataagatatactttgcccatacagccctgaagtggatagagagagctaatatggatggttcccagcgagaaaggcttattgaggaaggagtagatgtgccagaaggtcttgctgtggactggattggccgtagattctattggacagacagagggaaatctctgattggaaggagtgatttaaatgggaaacgttccaaaataatcactaaggagaacatctctcaaccacgaggaattgctgttcatccaatggccaagagattattctggactgatacagggattaatccacgaattgaaagttcttccctccaaggccttggccgtctggttatagccagctctgatctaatctggcccagtggaataacgattgacttcttaactgacaagttgtactggtgcgatgccaagcagtctgtgattgaaatggccaatctggatggttcaaaacgccgaagacttacccagaatgatgtaggtcacccatttgctgtagcagtgtttgaggattatgtgtggttctcagattgggctatgccatcagtaataagagtaaacaagaggactggcaaagatagagtacgtctccaaggcagcatgctgaagccctcatcactggttgtggttcatccattggcaaaaccaggagcagatccctgcttatatcaaaacggaggctgtgaacatatttgcaaaaagaggcttggaactgcttggtgttcgtgtcgtgaaggttttatgaaagcctcagatgggaaaacgtgtctggctctggatggtcatcagctgttggcaggtggtgaagttgatctaaagaaccaagtaacaccattggacatcttgtccaagactagagtgtcagaagataacattacagaatctcaacacatgctagtggctgaaatcatggtgtcagatcaagatgactgtgctcctgtgggatgcagcatgtatgctcggtgtatttcagagggagaggatgccacatgtcagtgtttgaaaggatttgctggggatggaaaactatgttctgatatagatgaatgtgagatgggtgtcccagtgtgcccccctgcctcctccaagtgcatcaacaccgaaggtggttatgtctgccggtgctcagaaggctaccaaggagatgggattcactgtcttgatattgatgagtgccaactgggggtgcacagctgtggagagaatgccagctgcacaaatacagagggaggctatacctgcatgtgtgctggacgcctgtctgaaccaggactgatttgccctgactctactccaccccctcacctcagggaagatgaccaccactattccgtaagaaatagtgactctgaatgtcccctgtcccacgatgggtactgcctccatgatggtgtgtgcatgtatattgaagcattggacaagtatgcatgcaactgtgttgttggctacatcggggagcgatgtcagtaccgagacctgaagtggtgggaactgcgccacgctggccacgggcagcagcagaaggtcatcgtggtggctgtctgcgtggtggtgcttgtcatgctgctcctcctgagcctgtggggggcccactactacaggactcagaagctgctatcgaaaaacccaaagaatccttatgaggagtcgagcagagatgtgaggagtcgcaggcctgctgacactgaggatgggatgtcctcttgccctcaaccttggtttgtggttataaaagaacaccaagacctcaagaatgggggtcaaccagtggctggtgaggatggccaggcagcagatgggtcaatgcaaccaacttcatggaggcaggagccccagttatgtggaatgggcacagagcaaggctgctggattccagtatccagtgataagggctcctgtccccaggtaatggagcgaagctttcatatgccctcctatgggacacagacccttgaagggggtgtcgagaagccccattctctcctatcagctaacccattatggcaacaaagggccctggacccaccacaccaaatggagctgactcagtgaaaactggaattaaaaggaaagtcaagaagaatgaactatgtcgatgcacagtatcttttctttcaaaagtagagcaaaactataggttttggttccacaatctctacgactaatcacctactcaatgcctggagacagatacgtagttgtgcttttgtttgctcttttaagcagtctcactgcagtcttatttccaagtaagagtactgggagaatcactaggtaacttattagaaacccaaattgggacaacagtgctttgtaaattgtgttgtcttcagcagtcaatacaaatagatttttgtttttgttgttcctgcagccccagaagaaattaggggttaagcaaaccgccccctggctccggcaatgacaaagtcgtaagtttgatctcgaccatccatcgattcgactccatgaaacgcgggcctattacataccgataaaaaacagaggatgaatacgccccctcatagtagcgcgccccgctagtaattgcataaccgaccccgcctgcccccatcgacgacggcttcagcatctgccacttaacacttactggccatctgtccagataccctgcgcagactttctttcttgaaacaagctccgtggccttgatccatcgttagcttgcgtgccctttcaccaaat

SEQ ID NO: 451054 - DNA, 4529 bp, Homo sapiens
  misc_feature (4295)..(4295): n is a, c, g, or t
agagaaactgttgggagaggaatcgtatctccatatttcttctttcagccccaatccaagggttgtagctggaactttccatcagttcttcctttctttttcctctctaagcctttgccttgctctgtcacagtgaagtcagccagagcagggctgttaaactctgtgaaatttgtcataagggtgtcaggtatttcttactggcttccaaagaaacatagataaagaaatctttcctgtggcttcccttggcaggctgcattcagaaggtctctcagttgaagaaagagcttggaggacaacagcacaacaggagagtaaaagatgccccagggctgaggcctccgctcaggcagccgcatctggggtcaatcatactcaccttgcccgggccatgctccagcaaaatcaagctgttttcttttgaaagttcaaactcatcaagattatgctgctcactcttatcattctgttgccagtagtttcaaaatttagttttgttagtctctcagcaccgcagcactggagctgtcctgaaggtactctcgcaggaaatgggaattctacttgtgtgggtcctgcacccttcttaattttctcccatggaaatagtatctttaggattgacacagaaggaaccaattatgagcaattggtggtggatgctggtgtctcagtgatcatggattttcattataatgagaaaagaatctattgggtggatttagaaagacaacttttgcaaagagtttttctgaatgggtcaaggcaagagagagtatgtaatatagagaaaaatgtttctggaatggcaataaattggataaatgaagaagttatttggtcaaatcaacaggaaggaatcattacagtaacagatatgaaaggaaataattcccacattcttttaagtgctttaaaatatcctgcaaatgtagcagttgatccagtagaaaggtttatattttggtcttcagaggtggctggaagcctttatagagcagatctcgatggtgtgggagtgaaggctctgttggagacatcagagaaaataacagctgtgtcattggatgtgcttgataagcggctgttttggattcagtacaacagagaaggaagcaattctcttatttgctcctgtgattatgatggaggttctgtccacattagtaaacatccaacacagcataatttgtttgcaatgtccctttttggtgaccgtatcttctattcaacatggaaaatgaagacaatttggatagccaacaaacacactggaaaggacatggttagaattaacctccattcatcatttgtaccacttggtgaactgaaagtagtgcatccacttgcacaacccaaggcagaagatgacacttgggagcctgagcagaaactttgcaaattgaggaaaggaaactgcagcagcactgtgtgtgggcaagacctccagtcacacttgtgcatgtgtgcagagggatacgccctaagtcgagaccggaagtactgtgaagatgttaatgaatgtgctttttggaatcatggctgtactcttgggtgtaaaaacacccctggatcctattactgcacgtgccctgtaggatttgttctgcttcctgatgggaaacgatgtcatcaacttgtttcctgtccacgcaatgtgtctgaatgcagccatgactgtgttctgacatcagaaggtcccttatgtttctgtcctgaaggctcagtgcttgagagagatgggaaaacatgtagcggttgttcctcacccgataatggtggatgtagccagctctgcgttcctcttagcccagtatcctgggaatgtgattgctttcctgggtatgacctacaactggatgaaaaaagctgtgcagcttcaggaccacaaccatttttgctgtttgccaattctcaagatattcgacacatgcattttgatggaacagactatggaactctgctcagccagcagatgggaatggtttatgccctagatcatgaccctgtggaaaataagatatactttgcccatacagccctgaagtggatagagagagctaatatggatggttcccagcgagaaaggcttattgaggaaggagtagatgtgccagaaggtcttgctgtggactggattggccgtagattctattggacagacagagggaaatctctgattggaaggagtgatttaaatgggaaacgttccaaaataatcactaaggagaacatctctcaaccacgaggaattgctgttcatccaatggccaagagattattctggactgatacagggattaatccacgaattgaaagttcttccctccaaggccttggccgtctggttatagccagctctgatctaatctggcccagtggaataacgattgacttcttaactgacaagttgtactggtgcgatgccaagcagtctgtgattgaaatggccaatctggatggttcaaaacgccgaagacttacccagaatgatgtaggtcacccatttgctgtagcagtgtttgaggattatgtgtggttctcagattgggctatgccatcagtaataagagtaaacaagaggactggcaaagatagagtacgtctccaaggcagcatgctgaagccctcatcactggttgtggttcatccattggcaaaaccaggagcagatccctgcttatatcaaaacggaggctgtgaacatatttgcaaaaagaggcttggaactgcttggtgttcgtgtcgtgaaggttttatgaaagcctcagatgggaaaacgtgtctggctctggatggtcatcagctgttggcaggtggtgaagttgatctaaagaaccaagtaacaccattggacatcttgtccaagactagagtgtcagaagataacattacagaatctcaacacatgctagtggctgaaatcatggtgtcagatcaagatgactgtgctcctgtgggatgcagcatgtatgctcggtgtatttcagagggagaggatgccacatgtcagtgtttgaaaggatttgctggggatggaaaactatgttctgatatagatgaatgtgagatgggtgtcccagtgtgcccccctgcctcctccaagtgcatcaacaccgaaggtggttatgtctgccggtgctcagaaggctaccaaggagatgggattcactgtcttgatattgatgagtgccaactgggggtgcacagctgtggagagaatgccagctgcacaaatacagagggaggctatacctgcatgtgtgctggacgcctgtctgaaccaggactgatttgccctgactctactccaccccctcacctcagggaagatgaccaccactattccgtaagaaatagtgactctgaatgtcccctgtcccacgatgggtactgcctccatgatggtgtgtgcatgtatattgaagcattggacaagtatgcatgcaactgtgttgttggctacatcggggagcgatgtcagtaccgagacctgaagtggtgggaactgcgccacgctggccacgggcagcagcagaaggtcatcgtggtggctgtctgcgtggtggtgcttgtcatgctgctcctcctgagcctgtggggggcccactactacaggactcagaagctgctatcgaaaaacccaaagaatccttatgaggagtcgagcagagatgtgaggagtcgcaggcctgctgacactgaggatgggatgtcctcttgccctcaaccttggggtcaatgcaaccaacttcatggaggcaggagccccagttatgtggaatgggcacagagcaaggctgctggattccagtatccagtgataagggctcctgtccccaggtaatggagcgaagctttcatatgccctcctatgggacacagacccttgaagggggtgtcgagaagccccattctctcctatcagctaacccattatggcaacaaagggccctggacccaccacaccaaatggagctgactcagtgaaaactggaattaaaaggaaagtcaagaagaatgaactatgtcgatgcacagtatcttttctttcaaaagtagagcaaaactataggttttggttccacaatctctacgactaatcacctactcaatgcctggagacagagaccgcccctgtgcccccgtcccatctttaagcagactcacttgaaatttatttccacccaacattcctgggaacacccattaggccaacttttttatcacgcccaaatggtgaccatcccactcttggaattggggccccttacccactccctcccacattnaatgtgtttcgttgcttgtgtttctgtgccatgataatctcagtgttttcggtgtaagtttcttatcattgtatagatacactcttattaggtcccctgggcccaaccctccttgtccccttcttcattactgcaaatctcactatatcctacgcctgtggtgcgtcttctctccctagtggtcttacgtccccacgtgttctgatcatgatgtattggatcagagaggagtgt

SEQ ID NO: 451055 - DNA, 3123 bp, Homo sapiens
agagaaactgttgggagaggaatcgtatctccatatttcttctttcagccccaatccaagggttgtagctggaactttccatcagttcttcctttctttttcctctctaagcctttgccttgctctgtcacagtgaagtcagccagagcagggctgttaaactctgtgaaatttgtcataagggtgtcaggtatttcttactggcttccaaagaaacatagataaagaaatctttcctgtggcttcccttggcaggctgcattcagaaggtctctcagttgaagaaagagcttggaggacaacagcacaacaggagagtaaaagatgccccagggctgaggcctccgctcaggcagccgcatctggggtcaatcatactcaccttgcccgggccatgctccagcaaaatcaagctgttttcttttgaaagttcaaactcatcaagattatgctgctcactcttatcattctgttgccagtagtttcaaaatttagttttgttagtctctcagcaccgcagcactggagctgtcctgaaggtactctcgcaggaaatgggaattctacttgtgtgggtcctgcacccttcttaattttctcccatggaaatagtatctttaggattgacacagaaggaaccaattatgagcaattggtggtggatgctggtgtctcagtgatcatggattttcattataatgagaaaagaatctattgggtggatttagaaagacaacttttgcaaagagtttttctgaatgggtcaaggcaagagagagtatgtaatatagagaaaaatgtttctggaatggcaataaattggataaatgaagaagttatttggtcaaatcaacaggaaggaatcattacagtaacagatatgaaaggaaataattcccacattcttttaagtgctttaaaatatcctgcaaatgtagcagttgatccagtagaaaggtttatattttggtcttcagaggtggctggaagcctttatagagcagatctcgatggtgtgggagtgaaggctctgttggagacatcagagaaaataacagctgtgtcattggatgtgcttgataagcggctgttttggattcagtacaacagagaaggaagcaattctcttatttgctcctgtgattatgatggaggttctgtccacattagtaaacatccaacacagcataatttgtttgcaatgtccctttttggtgaccgtatcttctattcaacatggaaaatgaagacaatttggatagccaacaaacacactggaaaggacatggttagaattaacctccattcatcatttgtaccacttggtgaactgaaagtagtgcatccacttgcacaacccaaggcagaagatgacacttgggagcctgagcagaaactttgcaaattgaggaaaggaaactgcagcagcactgtgtgtgggcaagacctccagtcacacttgtgcatgtgtgcagagggatacgccctaagtcgagaccggaagtactgtgaagatgttaatgaatgtgctttttggaatcatggctgtactcttgggtgtaaaaacacccctggatcctattactgcacgtgccctgtaggatttgttctgcttcctgatgggaaacgatgtcatcaacttgtttcctgtccacgcaatgtgtctgaatgcagccatgactgtgttctgacatcagaaggtcccttatgtttctgtcctgaaggctcagtgcttgagagagatgggaaaacatgtagcggttgttcctcacccgataatggtggatgtagccagctctgcgttcctcttagcccagtatcctgggaatgtgattgctttcctgggtatgacctacaactggatgaaaaaagctgtgcagcttcaggaccacaaccatttttgctgtttgccaattctcaagatattcgacacatgcattttgatggaacagactatggaactctgctcagccagcagatgggaatggtttatgccctagatcatgaccctgtggaaaataagatatactttgcccatacagccctgaagtggatagagagagctaatatggatggttcccagcgagaaaggcttattgaggaaggagtagatgtgccagaaggtcttgctgtggactggattggccgtagattctattggacagacagagggaaatctctgattggaaggagtgatttaaatgggaaacgttccaaaataatcactaaggagaacatctctcaaccacgaggaattgctgttcatccaatggccaagagattattctggactgatacagggattaatccacgaattgaaagttcttccctccaaggccttggccgtctggttatagccagctctgatctaatctggcccagtggaataacgattgacttcttaactgacaagttgtactggtgcgatgccaagcagtctgtgattgaaatggccaatctggatggttcaaaacgccgaagacttacccagaatgatgtaggtcacccatttgctgtagcagtgtttgaggattatgtgtggttctcagattgggctatgccatcagtaataagagtaaacaagaggactggcaaagatagagtacgtctccaaggcagcatgctgaagccctcatcactggttgtggttcatccattggcaaaaccaggagcagatccctgcttatatcaaaacggaggctgtgaacatatttgcaaaaagaggcttggaactgcttggtgttcgtgtcgtgaaggttttatgaaagcctcagatgggaaaacgtgtctggctctggatggtcatcagctgttggcaggtggtgaagttgatctaaagaaccaagtaacaccattggacatcttgtccaagactagagtgtcagaagataacattacagaatctcaacacatgctagtggctgaaatcatggtgtcagatcaagatgactgtgctcctgtgggatgcagcatgtatgctcggtgtatttcagagggagaggatgccacatgtcagtgtttgaaaggatttgctggggatggaaaactatgttctgatatagatgaatgtgagatgggcgtcagacttgcatacgcagccgatcagcatccttcgctgcccct

SEQ ID NO: 451056 - DNA, 4061 bp, Homo sapiens
gaggagagatagaaggaaaaatacctctttaaacaaaaaatctaaagcagcaactaaggtttctgactatcatccctagcaaactttccagatttctttttaaaatctcattccaagtttctttcctcagctctatcctcaccacttccctgtaattttatctccccttgccatcttcatcttaaatgaataacagattttaacatcaatgtaactagaacagctttttgaaatttccaactgaaaattattctattatttatacttgcatttgaattccatctctgccacatagctctggccttgggcagttcgtctaccttctctaagctatactttccccatcagcaaagtgtagctatacctaatttgcatagcatccgcaggaatttgcagctagagataattttcataaagtgtttagtataattttcatgaagtgcctgacacgcagtgttctcgaaaagagagcttttattgttaaggtgattatagttggtgaataaactatctatttgctaaggtaccatctccagggagagcaaggttggagcctaaggggaaagatgggacgcaggacaccagctaatcttttcctctgtacaattaatgacagctttgaagatactgctataatttgaaaatttgaaattagtgtttcagctgaaccatccgttcatcttcaagccatcatgagctgtaagaagcagaggtcacggaagcactcagtcaatgaaaaatgtaatatgaaaatcgagcactatttttctccggtctctaaagagcaacagaataattgcagtacttctctaatgaggatggagtctagaggagacccaagagccacaactaatacccaggctcaaagattccattcacctaagaaaaatccagaagaccagaccatgccccaaaataggacaatatatgttaccttgaaggtaaaccacaggagaaaccaagatatgaaacttaagctcacacatagtgagaatagtagcttatatatggctctcaacactctccaggctgtcagaaaagagatagaaactcaccaaggccaagaaatgcttgtgcgtggcacagaaggaatcaaagagtacataaaccttggaatgcccctcagttgtttccctgaaggtggccaggtggtcattacattttcccaaagtaaaagtaagcagaaggaagataaccacatatttggcaggcaggacaaagcatcgactgaatgtgtcaaattttacattcatgcaattggaattgggaagtgtaaaagaaggattgttaaatgtgggaagcttcacaaaaaggggcgcaaactctgtgtttatgctttcaaaggagaaaccatcaaggatgcactgtgcaaggatggcagatttctttcctttctggagaatgatgattggaaactcattgaaaacaatgacaccattttagaaagcacccagccagttgatgaattagaaggcagatactttcaggttgaggttgagaaaagaatggtccccagtgcagcagcttctcagaatcctgagtcagagaaaagaaacacctgtgtgttgagagaacaaatcgtggctcagtaccccagtttgaaaagagaaagtgaaaaaatcattgaaaacttcaagaaaaaaatgaaagtaaaaaatggggaaacattatttgaattgcatagaacaacgtttgggaaagtaacaaaaaattcttcttcgattaaagtagtgaaacttcttgtacgtctcagtgactcagttgggtacttattctgggacagtgcaactacgggttacgccacctgctttgtttttaaaggattgttcattttaacttgtcggcatgtaatagatagcattgtgggagacggaatagagccaagtaagtgggcaaccataattggtcaatgtgtaagggtgacatttggttatgaagagctaaaagacaaggaaacaaactacttttttgttgaaccttggtttgagatacataatgaagagcttgactatgctgtcctgaaactgaaggaaaatggacaacaagtacctatggaactatataatggaattactcctgtgccacttagtgggttgatacatattattggccatccatatggagaaaaaaagcagattgatgcttgtgctgtgatccctcagggtcagcgagcaaagaaatgtcaggaacgtgttcagtctaaaaaagcagaaagtccagagtatgtccatatgtatactcaaagaagtttccagaaaatagttcacaaccctgatgtgattacctatgacactgaatttttctttggggcttccggctcccctgtgtttgattcaaaaggttcattggtggccatgcatgctgctggctttgcttatacttaccaaaatgagactcgtagtatcattgagtttggctctaccatggaatccatcctccttgatattaagcaaagacataaaccatggtatgaagaagtatttgtaaatcagcaggatgtagaaatgatgagtgatgaggacttgtgagaattcagtctactggatttaagggaatggcttatggagttgttatttcataggcattgaaaatggttttctaaactccaaaatggtcatcttatcaataataataatattgaccatttcctatctgccaggcatttttctaagcacatgaagaaattagtcctaacaacactatgagatggactataacttgcccaaatttttttttttttttgagactgagtctcactctgtcgcctgggctggagtacagtggtgcgatctcagctcactgcaacttccacctcccaggttcaagcgattcttatgcctcagtctcctgagcagctgggattacaggcaaacgccaccacacccagctaaattttttttttttttttgtatttttagtagagacagggtttcaccatgttggtcaggcgggtctcgaactcctgacctcgtgatccacctgcctcggccttccaaagtgctgggattacaagtttgagccactgcacctggctaacttgccctattttaaagtcaagcaatgggaagaataacaagattatatagtaatcagtttcatgacactaaaagtcatatagtcatagggttttttcatctttcatatctttgcctaaattcatttgctacagtgcaggaaccaaaacttgttcatctcatgattccctacatctgacataaggaaagtaagtgctcagaaaaatgtgcaggtcaataagttgcaaaagttggggctgcaattaatgctaacataagagctaaatgcttgattagaaatgatctcaaaaccttttagaatttccaaaatcttcatattactgaaactgtcggaatatatgggtcttgaaattcagaagatgatagtcactcttcccatatttataggctattaaggcaagggatatcttaaacatcatattactttatttagatttctactactccaattattaatgttatgtatttctcattgttttacttcttcatggtattatgaagactatatagatgattcaaccaagcctgcaaatctccctcttgtggaattccactggacccaatctgttttccatttccattgcaatactactaaagccatacaatatcaagcaccctccctctaggtccagggactatcacagaagaagcaggcatgtaagattttaaggactggtttcgaggggtcgagtgtaggaaaacagcctgttgcattgtaagagtgatgtcatcttgaagagcagctggcatgatgactgctgtttgactcctgcataccaagatattctgcagcaatgtctttaaacagtgccggtagtacagataacccctcataaagatgcttatctaacctccccagtgttcaggtgtttcacaagaaagtctgagatatgactagctacacgttttgccaaaaatgcttgttatataaagggtacttttgggagggtgagtgccgccatttagtggctgctagaaacattgcttctgtttgtaagttcctattaaatgtttctttctgagaaa

SEQ ID NO: 451057 - DNA, 3623 bp, Homo sapiens
tgctgtaggaagtcaagcaagttctttaggttctctgctgtttaaaaagtatccctgtgtgtttcagctgaaccatccgttcatcttcaagccatcatgagctgtaagaagcagaggtcacggaagcactcagtcaatgaaaaatgtaatatgaaaatcgagcactatttttctccggtctctaaagagcaacagaataattgcagtacttctctaatgaggatggagtctagaggagacccaagagccacaactaatacccaggctcaaagattccattcacctaagaaaaatccagaagaccagaccatgccccaaaataggacaatatatgttaccttgaaggtaaaccacaggagaaaccaagatatgaaacttaagctcacacatagtgagaatagtagcttatatatggctctcaacactctccaggctgtcagaaaagagatagaaactcaccaaggccaagaaatgcttgtgcgtggcacagaaggaatcaaagagtacataaaccttggaatgcccctcagttgtttccctgaaggtggccaggtggtcattacattttcccaaagtaaaagtaagcagaaggaagataaccacatatttggcaggcaggacaaagcatcgactgaatgtgtcaaattttacattcatgcaattggaattgggaagtgtaaaagaaggattgttaaatgtgggaagcttcacaaaaaggggcgcaaactctgtgtttatgctttcaaaggagaaaccatcaaggatgcactgtgcaaggatggcagatttctttcctttctggagaatgatgattggaaactcattgaaaacaatgacaccattttagaaagcacccagccagttgatgaattagaaggcagatactttcaggttgaggttgagaaaagaatggtccccagtgcagcagcttctcagaatcctgagtcagagaaaagaaacacctgtgtgttgagagaacaaatcgtggctcagtaccccagtttgaaaagagaaagtgaaaaaatcattgaaaacttcaagaaaaaaatgaaagtaaaaaatggggaaacattatttgaattgcatagaacaacgtttgggaaagtaacaaaaaattcttcttcgattaaagtagtgaaacttcttgtacgtctcagtgactcagttgggtacttattctgggacagtgcaactacgggttacgccacctgctttgtttttaaaggattgttcattttaacttgtcggcatgtaatagatagcattgtgggagacggaatagagccaagtaagtgggcaaccataattggtcaatgtgtaagggtgacatttggttatgaagagctaaaagacaaggaaacaaactacttttttgttgaaccttggtttgagatacataatgaagagcttgactatgctgtcctgaaactgaaggaaaatggacaacaagtacctatggaactatataatggaattactcctgtgccacttagtgggttgatacatattattggccatccatatggagaaaaaaagcagattgatgcttgtgctgtgatccctcagggtcagcgagcaaagaaatgtcaggaacgtgttcagtctaaaaaagcagaaagtccagagtatgtccatatgtatactcaaagaagtttccagaaaatagttcacaaccctgatgtgattacctatgacactgaatttttctttggggcttccggctcccctgtgtttgattcaaaaggttcattggtggccatgcatgctgctggctttgcttatacttaccaaaatgagactcgtagtatcattgagtttggctctaccatggaatccatcctccttgatattaagcaaagacataaaccatggtatgaagaagtatttgtaaatcagcaggatgtagaaatgatgagtgatgaggacttgtgagaattcagtctactggatttaagggaatggcttatggagttgttatttcataggcattgaaaatggttttctaaactccaaaatggtcatcttatcaataataataatattgaccatttcctatctgccaggcatttttctaagcacatgaagaaattagtcctaacaacactatgagatggactataacttgcccaaatttttttttttttttgagactgagtctcactctgtcgcctgggctggagtacagtggtgcgatctcagctcactgcaacttccacctcccaggttcaagcgattcttatgcctcagtctcctgagcagctgggattacaggcaaacgccaccacacccagctaaattttttttttttttttgtatttttagtagagacagggtttcaccatgttggtcaggcgggtctcgaactcctgacctcgtgatccacctgcctcggccttccaaagtgctgggattacaagtttgagccactgcacctggctaacttgccctattttaaagtcaagcaatgggaagaataacaagattatatagtaatcagtttcatgacactaaaagtcatatagtcatagggttttttcatctttcatatctttgcctaaattcatttgctacagtgcaggaaccaaaacttgttcatctcatgattccctacatctgacataaggaaagtaagtgctcagaaaaatgtgcaggtcaataagttgcaaaagttggggctgcaattaatgctaacataagagctaaatgcttgattagaaatgatctcaaaaccttttagaatttccaaaatcttcatattactgaaactgtcggaatatatgggtcttgaaattcagaagatgatagtcactcttcccatatttataggctattaaggcaagggatatcttaaacatcatattactttatttagatttctactactccaattattaatgttatgtatttctcattgttttacttcttcatggtattatgaagactatatagatgattcaaccaagcctgcaaatctccctcttgtggaattccactggacccaatctgttttccatttccattgcaatactactaaagccatacaatatcaagcaccctccctctaggtccagggactatcacagaagaagcaggcatgtaagattttaaggactggtttcgaggggtcgagtgtaggaaaacagcctgttgcattgtaagagtgatgtcatcttgaagagcagctggcatgatgactgctgtttgactcctgcataccaagatattctgcagcaatgtctttaaacagtgccggtagtacagataacccctcataaagatgcttatctaacctccccagtgttcaggtgtttcacaagaaagtctgagatatgactagctacacgttttgccaaaaatgcttgttatataaagggtacttttgggagggtgagtgccgccatttagtggctgctagaaacattgcttctgtttgtaagttcctattaaatgtttctttctgagaaaaaaaaaaaagggggggttaaaattcctgaaggggcagttacgtaccgtttttgtaaggggccaaaggggtaagagagggggttaaggtgggaacggtggttggagaaccttgggggatggacccaaacgaaaaagtgttgattggatggtaaaaacgg

SEQ ID NO: 451058 - DNA, 3484 bp, Homo sapiens
tggtgatctagaggatcctctggagctggttttctccggtctctaaagagcaacagaataattgcagtacttctctaatgaggatggagtctagaggagacccaagagccacaactaatacccaggctcaaagattccattcacctaagaaaaatccagaagaccagaccatgccccaaaataggacaatatatgttaccttgaaggtaaaccacaggagaaaccaagatatgaaacttaagctcacacatagtgagaatagtagcttatatatggctctcaacactctccaggctgtcagaaaagagatagaaactcaccaaggccaagaaatgcttgtgcgtggcacagaaggaatcaaagagtacataaaccttggaatgcccctcagttgtttccctgaaggtggccaggtggtcattacattttcccaaagtaaaagtaagcagaaggaagataaccacatatttggcaggcaggacaaagcatcgactgaatgtgtcaaattttacattcatgcaattggaattgggaagtgtaaaagaaggattgttaaatgtgggaagcttcacaaaaaggggcgcaaactctgtgtttatgctttcaaaggagaaaccatcaaggatgcactgtgcaaggatggcagatttctttcctttctggagaatgatgattggaaactcattgaaaacaatgacaccattttagaaagcacccagccagttgatgaattagaaggcagatactttcaggttgaggttgagaaaagaatggtccccagtgcagcagcttctcagaatcctgagtcagagaaaagaaacacctgtgtgttgagagaacaaatcgtggctcagtaccccagtttgaaaagagaaagtgaaaaaatcattgaaaacttcaagaaaaaaatgaaagtaaaaaatggggaaacattatttgaattgcatagaacaacgtttgggaaagtaacaaaaaattcttcttcgattaaagtagtgaaacttcttgtacgtctcagtgactcagttgggtacttattctgggacagtgcaactacgggttacgccacctgctttgtttttaaaggattgttcattttaacttgtcggcatgtaatagatagcattgtgggagacggaatagagccaagtaagtgggcaaccataattggtcaatgtgtaagggtgacatttggttatgaagagctaaaagacaaggaaacaaactacttttttgttgaaccttggtttgagatacataatgaagagcttgactatgctgtcctgaaactgaaggaaaatggacaacaagtacctatggaactatataatggaattactcctgtgccacttagtgggttgatacatattattggccatccatatggagaaaaaaagcagattgatgcttgtgctgtgatccctcagggtcagcgagcaaagaaatgtcaggaacgtgttcagtctaaaaaagcagaaagtccagagtatgtccatatgtatactcaaagaagtttccagaaaatagttcacaaccctgatgtgattacctatgacactgaatttttctttggggcttccggctcccctgtgtttgattcaaaaggttcattggtggccatgcatgctgctggctttgcttatacttaccaaaatgagactcgtagtatcattgagtttggctctaccatggaatccatcctccttgatattaagcaaagacataaaccatggtatgaagaagtatttgtaaatcagcaggatgtagaaatgatgagtgatgaggacttgtgagaattcagtctactggatttaagggaatggcttatggagttgttatttcataggcattgaaaatggttttctaaactccaaaatggtcatcttatcaataataataatattgaccatttcctatctgccaggcatttttctaagcacatgaagaaattagtcctaacaacactatgagatggactataacttgcccaaatttttttttttttttgagactgagtctcactctgtcgcctgggctggagtacagtggtgcgatctcagctcactgcaacttccacctcccaggttcaagcgattcttatgcctcagtctcctgagcagctgggattacaggcaaacgccaccacacccagctaaattttttttttttttttgtatttttagtagagacagggtttcaccatgttggtcaggcgggtctcgaactcctgacctcgtgatccacctgcctcggccttccaaagtgctgggattacaagtttgagccactgcacctggctaacttgccctattttaaagtcaagcaatgggaagaataacaagattatatagtaatcagtttcatgacactaaaagtcatatagtcatagggttttttcatctttcatatctttgcctaaattcatttgctacagtgcaggaaccaaaacttgttcatctcatgattccctacatctgacataaggaaagtaagtgctcagaaaaatgtgcaggtcaataagttgcaaaagttggggctgcaattaatgctaacataagagctaaatgcttgattagaaatgatctcaaaaccttttagaatttccaaaatcttcatattactgaaactgtcggaatatatgggtcttgaaattcagaagatgatagtcactcttcccatatttataggctattaaggcaagggatatcttaaacatcatattactttatttagatttctactactccaattattaatgttatgtatttctcattgttttacttcttcatggtattatgaagactatatagatgattcaaccaagcctgcaaatctccctcttgtggaattccactggacccaatctgttttccatttccattgcaatactactaaagccatacaatatcaagcaccctccctctaggtccagggactatcacagaagaagcaggcatgtaagattttaaggactggtttcgaggggtcgagtgtaggaaaacagcctgttgcattgtaagagtgatgtcatcttgaagagcagctggcatgatgactgctgtttgactcctgcataccaagatattctgcagcaatgtctttaaacagtgccggtagtacagataacccctcataaagatgcttatctaacctccccagtgttcaggtgtttcacaagaaagtctgagatatgactagctacacgttttgccaaaaatgcttgttatataaagggtacttttgggagggtgagtgccgccatttagtggctgctagaaacattgcttctgtttgtaagttcctattaaatgtttctttctgagaaaaaaaaaaaagggggggttaaaattcctgaaggggcagttacgtaccgtttttgtaaggggccaaaggggtaagagagggggttaaggtgggaacggtggttggagaaccttgggggatggacccaaacgaaaaagtgttgattggatggtaaaaacgg

SEQ ID NO: 451059 - DNA, 3058 bp, Homo sapiens
  misc_feature (13)..(13): n is a, c, g, or t
cgctgactaaggnctggcacttcttggccagcaccacccccagcatgtccactgggctgctgaacttggtcttccacttctcaaagtccttcttgaggctctccctgatctcaaaggtggagaaagtagatcttgcatcaggttgaactccagtttctttttgctcagtttttcaagcgctgagtttattttgtccctaggcataaagaaatctttctaggaacccctttggttatgggaccagatttttaaaagctttttaggcttggtgaaaaatctgccttatcactagcaacactacgacttgtctctgttcttgttttttgttgtactcgtgtaaaagaaaagttcaagggaagagaacaggctcaagtctacttctcacgctggctctggggattaggaaattcagaaagttttgtttcagactggcagtgctgtctgatataaacacagcgtcaagtactgcacgctgtagctacctgaggtttaggccggaagaggcacggctgatttaaaagtgaaagaaagtaaccaattggttcgcagacaaccttttcccaaaaggcgggcgattcaaacccctagccccacctgctccgtttcccgcccagctggagctctggagcctttgcttcctcaaatacgagcgggaactgcgttgagcgctggattccaggccgagtgctggcgaggcgcgcagttctctgctgtttaaaaagtatccctgtgctttgaagatactgctataatttgaaaatttgaaattagtgtttcagctgaaccatccgttcatcttcaagccatcatgagctgtaagaagcagaggtcacggaagcactcagtcaatgaaaaatgtaatatgaaaatcgagcactatttttctccggtctctaaagagcaacagaataattgcagtacttctctaatgaggatggagtctagaggagacccaagagccacaactaatacccaggctcaaagattccattcacctaagaaaaatccagaagaccagaccatgccccaaaataggacaatatatgttaccttgaaggtaaaccacaggagaaaccaagatatgaaacttaagctcacacatagtgagaatagtagcttatatatggctctcaacactctccaggctgtcagaaaagagatagaaactcaccaaggccaagaaatgcttgtgcgtggcacagaaggaatcaaagagtacataaaccttggaatgcccctcagttgtttccctgaaggtggccaggtggtcattacattttcccaaagtaaaagtaagcagaaggaagataaccacatatttggcaggcaggacaaagcatcgactgaatgtgtcaaattttacattcatgcaattggaattgggaagtgtaaaagaaggattgttaaatgtgggaagcttcacaaaaaggggcgcaaactctgtgtttatgctttcaaaggagaaaccatcaaggatgcactgtgcaaggatggcagatttctttcctttctggagaatgatgattggaaactcattgaaaacaatgacaccattttagaaagcacccagccagttgatgaattagaaggcagatactttcaggttgaggttgagaaaagaatggtccccagtgcagcagcttctcagaatcctgagtcagagaaaagaaacacctgtgtgttgagagaacaaatcgtggctcagtaccccagtttgaaaagagaaagtgaaaaaatcattgaaaacttcaagaaaaaaatgaaagtaaaaaatggggaaacattatttgaattgcatagaacaacgtttgggaaagtaacaaaaaattcttcttcgattaaagtagtgaaacttcttgtacgtctcagtgactcagttgggtacttattctgggacagtgcaactacgggttacgccacctgctttgtttttaaaggattgttcattttaacttgtcggcatgtaatagatagcattgtgggagacggaatagagccaagtaagtgggcaaccataattggtcaatgtgtaagggtgacatttggttatgaagagctaaaagacaaggaaacaaactacttttttgttgaaccttggtttgagatatcatatagtcatagggttttttcatctttcatatctttgcctaaattcatttgctacagtgcaggaaccaaaacttgttcatctcatgattccctacatctgacataaggaaagtaagtgctcagaaaaatgtgcaggtcaataagttgcaaaagttggggctgcaattaatgctaacataagagctaaatgcttgattagaaatgatctcaaaaccttttagaatttccaaaatcttcatattactgaaactgtcggaatatatgggtcttgaaattcagaagatgatagtcactcttcccatatttataggctattaaggcaagggatatcttaaacatcatattactttatttagatttctactactccaattattaatgttatgtatttctcattgttttacttcttcatggtattatgaagactatatagatgattcaaccaagcctgcaaatctccctcttgtggaattccactggacccaatctgttttccatttccattgcaatactactaaagccatacaatatcaagcaccctccctctaggtccagggactatcacagaagaagcaggcatgtaagattttaaggactggtttcgaggggtcgagtgtaggaaaacagcctgttgcattgtaagagtgatgtcatcttgaagagcagctggcatgatgactgctgtttgactcctgcataccaagatattctgcagcaatgtctttaaacagtgccggtagtacagataacccctcataaagatgcttatctaacctccccagtgttcaggtgtttcacaagaaagtctgagatatgactagctacacgttttgccaaaaatgcttgttatataaagggtacttttgggagggtgagtgccgccatttagtggctgctagaaacattgcttctgtttgtaagttcctattaaatgtttctttctgagaaa

SEQ ID NO: 451060 - DNA, 1088 bp, Homo sapiens
  misc_feature (13)..(13): n is a, c, g, or t
cgctgactaaggnctggcacttcttggccagcaccacccccagcatgtccactgggctgctgaacttggtcttccacttctcaaagtccttcttgaggctctccctgatctcaaaggtggagaaagtagatcttgcatcaggttgaactccagtttctttttgctcagtttttcaagcgctgagtttattttgtccctaggcataaagaaatctttctaggaacccctttggttatgggaccagatttttaaaagctttttaggcttggtgaaaaatctgccttatcactagcaacactacgacttgtctctgttcttgttttttgttgtactcgtgtaaaagaaaagttcaagggaagagaacaggctcaagtctacttctcacgctggctctggggattaggaaattcagaaagttttgtttcagactggcagtgctgtctgatataaacacagcgtcaagtactgcacgctgtagctacctgaggtttaggccggaagaggcacggctgatttaaaagtgaaagaaagtaaccaattggttcgcagacaaccttttcccaaaaggcgggcgattcaaacccctagccccacctgctccgtttcccgcccagctggagctctggagcctttgcttcctcaaatacgagcgggaactgcgttgagcgctggattccaggccgagtgctggcgaggcgcgcagtgagtgagcacacagggcgctggggtgctccgcggggcgcggtcacgggcgcggccgcggcgggctcgagtcccggctgggaggagaaggagctgggtgtcaggaagccggggactgacagcgccacccatctggggagccgggaggacacaggttttattttggtagtgctgcaagtccccttgtgtgctggggggagcggggcggcgtggtaggattggaagaggcttagagttggcctcgacccctgcccttgcccctggaaaggcagaaagtgggggttggggtgcggagaagcaggaagagagggagagtgaaggaggggaggaaagggagagaggaagagggagagtgaaggaggggaggaaagggagagaggcagaga

SEQ ID NO: 451061 - DNA, 4335 bp, Homo sapiens
  misc_feature (13)..(13): n is a, c, g, or t
cgctgactaaggnctggcacttcttggccagcaccacccccagcatgtccactgggctgctgaacttggtcttccacttctcaaagtccttcttgaggctctccctgatctcaaaggtggagaaagtagatcttgcatcaggttgaactccagtttctttttgctcagtttttcaagcgctgagtttattttgtccctaggcataaagaaatctttctaggaacccctttggttatgggaccagatttttaaaagctttttaggcttggtgaaaaatctgccttatcactagcaacactacgacttgtctctgttcttgttttttgttgtactcgtgtaaaagaaaagttcaagggaagagaacaggctcaagtctacttctcacgctggctctggggattaggaaattcagaaagttttgtttcagactggcagtgctgtctgatataaacacagcgtcaagtactgcacgctgtagctacctgaggtttaggccggaagaggcacggctgatttaaaagtgaaagaaagtaaccaattggttcgcagacaaccttttcccaaaaggcgggcgattcaaacccctagccccacctgctccgtttcccgcccagctggagctctggagcctttgcttcctcaaatacgagcgggaactgcgttgagcgctggattccaggccgagtgctggcgaggcgcgcagttctctgctgtttaaaaagtatccctgtgctttgaagatactgctataatttgaaaatttgaaattagtgtttcagctgaaccatccgttcatcttcaagccatcatgagctgtaagaagcagaggtcacggaagcactcagtcaatgaaaaatgtaatatgaaaatcgagcactatttttctccggtctctaaagagcaacagaataattgcagtacttctctaatgaggatggagtctagaggagacccaagagccacaactaatacccaggctcaaagattccattcacctaagaaaaatccagaagaccagaccatgccccaaaataggacaatatatgttaccttgaaggtaaaccacaggagaaaccaagatatgaaacttaagctcacacatagtgagaatagtagcttatatatggctctcaacactctccaggctgtcagaaaagagatagaaactcaccaaggccaagaaatgcttgtgcgtggcacagaaggaatcaaagagtacataaaccttggaatgcccctcagttgtttccctgaaggtggccaggtggtcattacattttcccaaagtaaaagtaagcagaaggaagataaccacatatttggcaggcaggacaaagcatcgactgaatgtgtcaaattttacattcatgcaattggaattgggaagtgtaaaagaaggattgttaaatgtgggaagcttcacaaaaaggggcgcaaactctgtgtttatgctttcaaaggagaaaccatcaaggatgcactgtgcaaggatggcagatttctttcctttctggagaatgatgattggaaactcattgaaaacaatgacaccattttagaaagcacccagccagttgatgaattagaaggcagatactttcaggttgaggttgagaaaagaatggtccccagtgcagcagcttctcagaatcctgagtcagagaaaagaaacacctgtgtgttgagagaacaaatcgtggctcagtaccccagtttgaaaagagaaagtgaaaaaatcattgaaaacttcaagaaaaaaatgaaagtaaaaaatggggaaacattatttgaattgcatagaacaacgtttgggaaagtaacaaaaaattcttcttcgattaaagtagtgaaacttcttgtacgtctcagtgactcagttgggtacttattctgggacagtgcaactacgggttacgccacctgctttgtttttaaaggattgttcattttaacttgtcggcatgtaatagatagcattgtgggagacggaatagagccaagtaagtgggcaaccataattggtcaatgtgtaagggtgacatttggttatgaagagctaaaagacaaggaaacaaactacttttttgttgaaccttggtttgagatacataatgaagagcttgactatgctgtcctgaaactgaaggaaaatggacaacaagtacctatggaactatataatggaattactcctgtgccacttagtgggttgatacatattattggccatccatatggagaaaaaaagcagattgatgcttgtgctgtgatccctcagggtcagcgagcaaagaaatgtcaggaacgtgttcagtctaaaaaagcagaaagtccagagtatgtccatatgtatactcaaagaagtttccagaaaatagttcacaaccctgatgtgattacctatgacactgaatttttctttggggcttccggctcccctgtgtttgattcaaaaggttcattggtggccatgcatgctgctggctttgcttatacttaccaaaatgagactcgtagtatcattgagtttggctctaccatggaatccatcctccttgatattaagcaaagacataaaccatggtatgaagaagtatttgtaaatcagcaggatgtagaaatgatgagtgatgaggacttgtgagaattcagtctactggatttaagggaatggcttatggagttgttatttcataggcattgaaaatggttttctaaactccaaaatggtcatcttatcaataataataatattgaccatttcctatctgccaggcatttttctaagcacatgaagaaattagtcctaacaacactatgagatggactataacttgcccaaatttttttttttttttgagactgagtctcactctgtcgcctgggctggagtacagtggtgcgatctcagctcactgcaacttccacctcccaggttcaagcgattcttatgcctcagtctcctgagcagctgggattacaggcaaacgccaccacacccagctaaattttttttttttttttgtatttttagtagagacagggtttcaccatgttggtcaggcgggtctcgaactcctgacctcgtgatccacctgcctcggccttccaaagtgctgggattacaagtttgagccactgcacctggctaacttgccctattttaaagtcaagcaatgggaagaataacaagattatatagtaatcagtttcatgacactaaaagtcatatagtcatagggttttttcatctttcatatctttgcctaaattcatttgctacagtgcaggaaccaaaacttgttcatctcatgattccctacatctgacataaggaaagtaagtgctcagaaaaatgtgcaggtcaataagttgcaaaagttggggctgcaattaatgctaacataagagctaaatgcttgattagaaatgatctcaaaaccttttagaatttccaaaatcttcatattactgaaactgtcggaatatatgggtcttgaaattcagaagatgatagtcactcttcccatatttataggctattaaggcaagggatatcttaaacatcatattactttatttagatttctactactccaattattaatgttatgtatttctcattgttttacttcttcatggtattatgaagactatatagatgattcaaccaagcctgcaaatctccctcttgtggaattccactggacccaatctgttttccatttccattgcaatactactaaagccatacaatatcaagcaccctccctctaggtccagggactatcacagaagaagcaggcatgtaagattttaaggactggtttcgaggggtcgagtgtaggaaaacagcctgttgcattgtaagagtgatgtcatcttgaagagcagctggcatgatgactgctgtttgactcctgcataccaagatattctgcagcaatgtctttaaacagtgccggtagtacagataacccctcataaagatgcttatctaacctccccagtgttcaggtgtttcacaagaaagtctgagatatgactagctacacgttttgccaaaaatgcttgttatataaagggtacttttgggagggtgagtgccgccatttagtggctgctagaaacattgcttctgtttgtaagttcctattaaatgtttctttctgagaaaaaaaaaaaagggggggttaaaattcctgaaggggcagttacgtaccgtttttgtaaggggccaaaggggtaagagagggggttaaggtgggaacggtggttggagaaccttgggggatggacccaaacgaaaaagtgttgattggatggtaaaaacgg

SEQ ID NO: 451062 - DNA, 3663 bp, Homo sapiens
aatagaagcaggcaaggaccgccgtgggcacggggtgtccccagcgcagccaatcggtttccgaagtcgggtctctgctgtttaaaaagtatccctgtgtgtttcagctgaaccatccgttcatcttcaagccatcatgagctgtaagaagcagaggtcacggaagcactcagtcaatgaaaaatgtaatatgaaaatcgagcactatttttctccggtctctaaagagcaacagaataattgcagtacttctctaatgaggatggagtctagaggagacccaagagccacaactaatacccaggctcaaagattccattcacctaagaaaaatccagaagaccagaccatgccccaaaataggacaatatatgttaccttgaaggtaaaccacaggagaaaccaagatatgaaacttaagctcacacatagtgagaatagtagcttatatatggctctcaacactctccaggctgtcagaaaagagatagaaactcaccaaggccaagaaatgcttgtgcgtggcacagaaggaatcaaagagtacataaaccttggaatgcccctcagttgtttccctgaaggtggccaggtggtcattacattttcccaaagtaaaagtaagcagaaggaagataaccacatatttggcaggcaggacaaagcatcgactgaatgtgtcaaattttacattcatgcaattggaattgggaagtgtaaaagaaggattgttaaatgtgggaagcttcacaaaaaggggcgcaaactctgtgtttatgctttcaaaggagaaaccatcaaggatgcactgtgcaaggatggcagatttctttcctttctggagaatgatgattggaaactcattgaaaacaatgacaccattttagaaagcacccagccagttgatgaattagaaggcagatactttcaggttgaggttgagaaaagaatggtccccagtgcagcagcttctcagaatcctgagtcagagaaaagaaacacctgtgtgttgagagaacaaatcgtggctcagtaccccagtttgaaaagagaaagtgaaaaaatcattgaaaacttcaagaaaaaaatgaaagtaaaaaatggggaaacattatttgaattgcatagaacaacgtttgggaaagtaacaaaaaattcttcttcgattaaagtagtgaaacttcttgtacgtctcagtgactcagttgggtacttattctgggacagtgcaactacgggttacgccacctgctttgtttttaaaggattgttcattttaacttgtcggcatgtaatagatagcattgtgggagacggaatagagccaagtaagtgggcaaccataattggtcaatgtgtaagggtgacatttggttatgaagagctaaaagacaaggaaacaaactacttttttgttgaaccttggtttgagatacataatgaagagcttgactatgctgtcctgaaactgaaggaaaatggacaacaagtacctatggaactatataatggaattactcctgtgccacttagtgggttgatacatattattggccatccatatggagaaaaaaagcagattgatgcttgtgctgtgatccctcagggtcagcgagcaaagaaatgtcaggaacgtgttcagtctaaaaaagcagaaagtccagagtatgtccatatgtatactcaaagaagtttccagaaaatagttcacaaccctgatgtgattacctatgacactgaatttttctttggggcttccggctcccctgtgtttgattcaaaaggttcattggtggccatgcatgctgctggctttgcttatacttaccaaaatgagactcgtagtatcattgagtttggctctaccatggaatccatcctccttgatattaagcaaagacataaaccatggtatgaagaagtatttgtaaatcagcaggatgtagaaatgatgagtgatgaggacttgtgagaattcagtctactggatttaagggaatggcttatggagttgttatttcataggcattgaaaatggttttctaaactccaaaatggtcatcttatcaataataataatattgaccatttcctatctgccaggcatttttctaagcacatgaagaaattagtcctaacaacactatgagatggactataacttgcccaaatttttttttttttttgagactgagtctcactctgtcgcctgggctggagtacagtggtgcgatctcagctcactgcaacttccacctcccaggttcaagcgattcttatgcctcagtctcctgagcagctgggattacaggcaaacgccaccacacccagctaaattttttttttttttttgtatttttagtagagacagggtttcaccatgttggtcaggcgggtctcgaactcctgacctcgtgatccacctgcctcggccttccaaagtgctgggattacaagtttgagccactgcacctggctaacttgccctattttaaagtcaagcaatgggaagaataacaagattatatagtaatcagtttcatgacactaaaagtcatatagtcatagggttttttcatctttcatatctttgcctaaattcatttgctacagtgcaggaaccaaaacttgttcatctcatgattccctacatctgacataaggaaagtaagtgctcagaaaaatgtgcaggtcaataagttgcaaaagttggggctgcaattaatgctaacataagagctaaatgcttgattagaaatgatctcaaaaccttttagaatttccaaaatcttcatattactgaaactgtcggaatatatgggtcttgaaattcagaagatgatagtcactcttcccatatttataggctattaaggcaagggatatcttaaacatcatattactttatttagatttctactactccaattattaatgttatgtatttctcattgttttacttcttcatggtattatgaagactatatagatgattcaaccaagcctgcaaatctccctcttgtggaattccactggacccaatctgttttccatttccattgcaatactactaaagccatacaatatcaagcaccctccctctaggtccagggactatcacagaagaagcaggcatgtaagattttaaggactggtttcgaggggtcgagtgtaggaaaacagcctgttgcattgtaagagtgatgtcatcttgaagagcagctggcatgatgactgctgtttgactcctgcataccaagatattctgcagcaatgtctttaaacagtgccggtagtacagataacccctcataaagatgcttatctaacctccccagtgttcaggtgtttcacaagaaagtctgagatatgactagctacacgttttgccaaaaatgcttgttatataaagggtacttttgggagggtgagtgccgccatttagtggctgctagaaacattgcttctgtttgtaagttcctattaaatgtttctttctgagaaaaaaaaaaaagggggggttaaaattcctgaaggggcagttacgtaccgtttttgtaaggggccaaaggggtaagagagggggttaaggtgggaacggtggttggagaaccttgggggatggacccaaacgaaaaagtgttgattggatggtaaaaacgg

SEQ ID NO: 451063 - DNA, 1942 bp, Homo sapiens
tgcagggagactatagaatatccctcttgggggctttggttacagtgagagagcggagaagtgtacggaacgtgttcagtctaaaaaagcagaaagtccagagtatgtccatatgtatactcaaagaagtttccagaaaatagttcacaaccctgatgtgattacctatgacactgaatttttctttggggcttccggctcccctgtgtttgattcaaaaggttcattggtggccatgcatgctgctggctttgcttatacttaccaaaatgagactcgtagtatcattgagtttggctctaccatggaatccatcctccttgatattaagcaaagacataaaccatggtatgaagaagtatttgtaaatcagcaggatgtagaaatgatgagtgatgaggacttgtgagaattcagtctactggatttaagggaatggcttatggagttgttatttcataggcattgaaaatggttttctaaactccaaaatggtcatcttatcaataataataatattgaccatttcctatctgccaggcatttttctaagcacatgaagaaattagtcctaacaacactatgagatggactataacttgcccaaatttttttttttttttgagactgagtctcactctgtcgcctgggctggagtacagtggtgcgatctcagctcactgcaacttccacctcccaggttcaagcgattcttatgcctcagtctcctgagcagctgggattacaggcaaacgccaccacacccagctaaattttttttttttttttgtatttttagtagagacagggtttcaccatgttggtcaggcgggtctcgaactcctgacctcgtgatccacctgcctcggccttccaaagtgctgggattacaagtttgagccactgcacctggctaacttgccctattttaaagtcaagcaatgggaagaataacaagattatatagtaatcagtttcatgacactaaaagtcatatagtcatagggttttttcatctttcatatctttgcctaaattcatttgctacagtgcaggaaccaaaacttgttcatctcatgattccctacatctgacataaggaaagtaagtgctcagaaaaatgtgcaggtcaataagttgcaaaagttggggctgcaattaatgctaacataagagctaaatgcttgattagaaatgatctcaaaaccttttagaatttccaaaatcttcatattactgaaactgtcggaatatatgggtcttgaaattcagaagatgatagtcactcttcccatatttataggctattaaggcaagggatatcttaaacatcatattactttatttagatttctactactccaattattaatgttatgtatttctcattgttttacttcttcatggtattatgaagactatatagatgattcaaccaagcctgcaaatctccctcttgtggaattccactggacccaatctgttttccatttccattgcaatactactaaagccatacaatatcaagcaccctccctctaggtccagggactatcacagaagaagcaggcatgtaagattttaaggactggtttcgaggggtcgagtgtaggaaaacagcctgttgcattgtaagagtgatgtcatcttgaagagcagctggcatgatgactgctgtttgactcctgcataccaagatattctgcagcaatgtctttaaacagtgccggtagtacagataacccctcataaagatgcttatctaacctccccagtgttcaggtgtttcacaagaaagtctgagatatgactagctacacgttttgccaaaaatgcttgttatataaagggtacttttgggagggtgagtgccgccatttagtggctgctagaaacattgcttctgtttgtaagttcctattaaatgtttctttctgagaaa

SEQ ID NO: 451064 - DNA, 6646 bp, Homo sapiens
cgtgtacttccttgtttgtctttgtcgctggccgacttgtcttcattccaggtggccagagcgagtggggccgggcgttgtcacgggtatcatgatattagctggtttgacatcaagtcatttgtgagtcatcagatcttctcctgaaaatgggagacacagtagggcccctcccaggagctcttggctgttgctgatggcagaagccaagcttgtccaaggttcacttgtagcccctcagcgtcagctcagctggtgtcgtcctgaccatggacggcgcgtcggccgagcaagatggcctccaggaggacagatcccacagtggcccctcgtctctccccgaggccccactgaagcccccgggcccactggtgccacctgaccagcaggacaaagtccagtgtgccgaggtaaacagagcatccacggaaggggaaagcccggatggacctggccagggaggcctctgtcagaacgggccaacgccacccttcccagaccctccgtcgtctctcgatcccaccacaagcccagtgggccctgatgcctctccaggtgtggctggtttccatgacaacctaaggaagtctcagggaactagtgctgagggcagtgttagaaaagaagctttgcagtctctcagactcagtcttcctatgcaagaaacgcaactgtgctctacagattctcccctgcccctggagaaggaggagcaggtccgacttcaggctcggaagtggctggaagagcagctcaaacagtacagggtgaagcgccagcaggagaggtccagtcaacctgcaaccaaaacgagactttttagcacgcttgatcctgagctcatgttaaacccagaaaacttaccaagggccagtaccctggctatgacaaaagaatattccttcctgcgcaccagtgtccctcgggggcctaaggtgggcagcctggggcttccggcacatcctagggagaaaaaaacttccaaatcaagcaaaatccggtctctggccgattacagaactgaagattcaaatgcggggaattctgggggaaatgtcccggctcccgattctaccaagggttccctgaagcagaacagaagcagtgcggcgtccgttgtgtctgagatcagcctgtcccccgacactgacgaccgtctggagaacacctccctggctggagacagcgtgtctgaggtggatggaaatgacagcgacagctcatcgtacagcagcgcctccacccgagggacctatggcattctgtcgaagacagtgggcacgcaggacaccccctatatggtcaacggccaggagattcctgcggataccctgggccagttcccctccattaaggacgtcctccaggccgcagccgctgagcaccaagaccaggggcaggaggtcaacggggaggtgcggagtcggagagacagcatctgcagcagcgtgtccttggagagctctgcagcagaaacacaggaggagatgctgcaggtgctcaaagagaaaatgcgactcgaaggacagctggaagccttgtcactggaggcgagtcaggcacttaaagagaaggctgagctgcaggcccagctggccgccctcagcacgaagctgcaggcgcaggtggagtgcagccacagcagccagcagcggcaggattcgctgagctcggaggtggacaccctgaagcagtcgtgctgggacctggagcgagccatgactgacctgcagaacatgctggaggcaaaaaatgccagcctggcgtcgtccaacaacgacttgcaggtggccgaggagcagtaccagaggcttatggccaaggtagaggacatgcagaggagcatgctcagcaaggacaacacagtgcacgacctgcgacagcagatgacagccttgcagagccagcttcagcaggtgcagctggagcggacgacgctgaccagcaagctgaaggcgtcgcaggcggagatctcgtccctacagagtgtccggcagtggtaccagcagcagctcgccctggcacaggaggcccgcgtcaggctgcagggtgagatggcccacatccaggttggacagatgacccaggctggtatcctggagcacctgaaactcgagaatgtgtccctgtcccagcagctgacggaaactcagcacaggtccatgaaggagaaggggcgcatcgcggcacagctgcagggcattgaggctgacatgttggatcaggaagcagccttcatgcagattcaggaggcaaagacgatggtggaggaggaccttcagaggaggctggaagagtttgaaggtgagagggagcggctgcagaggatggcggactcggcggcatccctggagcagcagctggagcaggtgaagttgactttactccagcgagaccagcagcttgaggctttgcagcaggagcacctggacctgatgaaacagctcaccttgactcaggaggctctgcagagcagggagcagtccctcgatgccctgcagacacactacgatgagctgcaggccaggctgggggagctgcagggcgaggccgcctccagggaggacacgatctgcctcctgcagaacgagaagatcatcttggaggcggctttgcaggcggccaagagtggcaaggaggagcttgacagaggagcaagacgcttggaagaaggtaccgaggaaacgtcggaaactttagagaagttaagagaagaattagctatcaaatccggccaggtggaacacctgcagcaggagactgctgctctgaaaaagcaaatgcaaaaaataaaggaacagtttctccaacaaaaggtgatggtggaggcctaccggcgcgacgccacctccaaagaccagctcatcagtgagctgaaagccaccaggaagaggctggactcggagctgaaggagctgcggcaggagctgatgcaagtgcacggggagaagcggactgccgaggcggagctctcgcgcctgcacagagaggtggcccaggtccgtcagcacatggcggaccttgaagggcatctccagtcggcgcagaaggagcgagacgagatggaaacacacttgcagtcgttgcagttcgataaggagcagatggtcgcggtcacagaggccaatgaggcgctgaagaaacaaatcgaagagttgcagcaagaggcccggaaggccatcacggaacagaagcagaagatgaggcggctgggctcagacttgaccagcgcccagaaggagatgaagaccaaacataaggcctacgagaacgccgtgggcatcctcagccgccgcctgcaggaggccctcgcggccaaggaggctgcggacgcggagctgggccagctccgagcccagggtggcagcagtgacagcagcctggctctacatgaaaggatccaggccctggaggcggagctgcaggctgtcagtcatagcaagacgctgctggaaaaggaactgcaggaggtcatagcgctgaccagccaggagctggaggagtcccgggagaaggtgctggagctggaggacgagcttcaagaatccagaggctttaggaagaagataaaacgccttgaggagtcaaacaagaagttggctcttgaattagagcacgagaaagggaagcttacgggcctcggtcagtccaacgcagctctgcgggaacacaacagcatcctagaaacagctttggccaagagggaggcagacctagtccagttgaaccttcaggtgcaggcagttttgcagcgcaaagaagaggaggatcgccagatgaagcatcttgtccaggccctgcaggcctcactagagaaggagaaggagaaggtgaacagcctcaaggagcaggtggctgctgccaaggtggaagccgggcataaccgccgccacttcaaggcggcctccttggagctgagtgaggtgaagaaggagctgcaggccaaggaacacctggtgcagaagctgcaggccgaggccgacgaccttcagattcgggaggggaaacattcccaggagatagcacagttccaagcagagctggccgaggcccgggcacagctccagctcctgcagaagcagctggacgagcagctcagcaaacagcccgtgggaaaccaagagatggaaaatctcaaatgggaggtggatcagaaagaaagagaaatccagtccttgaagcagcagctggacttgacggagcagcagggcaggaaggaactggaagggctacagcagctgctgcagaacgtcaagtctgagttggagatggcccaggaagacctgtccatgacccagaaggataaatttatgctccaggcaaaagtgtcggagctgaagaacaacatgaagaccctgctccagcagaaccagcagctcaagctggacctacgccgcggcgcggccaagacgagaaaggagccgaaaggcgaggccagctcttccaaccctgccacgcccatcaagatcccggactgcccagttcccgcctcgctgctggaggagctgctgagaccaccgcccgccgtgagcaaggagcccctcaagaacctgaacagctgcctccagcagctcaagcaggagatggacagcctgcagcgccagatggaggagcacgccctgacggtgcacgagtctctgtcctcgtggacgccgctggagccagccactgccagccctgtgcccccggggggtcacgccggcccacgcggcgacccacagagacacagtcagagcagggcttccaaagaagggccgggagagtgactgctgtggactcgcctccgtgcgccgctgccccagaaggctcttatcaatgttatttatttgattgtgtggtcgatgtttttctaagacatgaaatttaagttttgttttgcctttaacaagaagtaaaatatatagcagaatgagagccaaggactagaaaaacattcgaagatcacaattagcttttcacatggaatgaccaactcttaaaagcctgataggctctcggcgaggagctttgaacgtgtctgaagggttacttgtaggtcgtggcttctgagcggccaccgatgctgctctctgcgggtgacagggagaggctgcgtaactgggagcagctgtgtgacagggtctgcggcaccgcgcctggccaggccggctgcagtttctcacttccctgttccattcagtaagagctttacttttccgcagaaatgaaattttatctgtacctttggctttttacttgttttttttgatagccatcccaccataggatgtgtacatagatactgaatatcataatccaatctttgtttttttttttttttttttttgagacagagtctcgctttgttgcccaggctggagtgcagtggcacactctccgctcactgcaagctccgcctcccaggttcatgcgattctcctgcctcagcctctcgagtagctgggattacaggtgcccgccaccacaccagcctaatttttgtatttttagaggggtggagttccaccatgttggccaggctggtcttgaactcttgacctcaggtgatcctgagcctcagcctcccaaagtgctggaattataggcgtgaaccaccgcccccggctgcagttggatttttaaattgcttttttttattgttgaggtttttttatctccaagggactctcccggcacttctaccttccagagttacttcagtgcataaagtttgaattattttgttcttgtgggcagaagtgggaatgatggaatatcctcacggaaaaggcagtgaagttgggagtactgcttacaaaacagggtcaccagtgcattatgtggcgtgttcatccccacgccgtgtgtcacgggctagggcggcgtgttcatccccacaccgtgtgtcacaacaggctagggcacttcacgatgtcactacttgtttttctgacgttccaaaaacaacgtaacttggttttcatgtgtttttccgtggtatatgtgagattgatgctacgggtcttacggactcacacccgttcccactctctgcaatatggatcaggcagtgtttctgataggatgtgaaatggactctcctcgggtgggtccagcaggggccctgcccaccagaacacagtccgtgctgtgctgcgctaaggagctggccctcaactctccttggtgcagggttcccacaaccgagttctagttccctgaggtctttaaaaacaaaaacagaatgttgtacgtgaagattctaggaggggagggaccagcaaatctgagagaaccgtcctggggcctcccttcgaggagccctctgatgtgaggagggacttgagttgagtgacgctgtggtgtgaggtgttctgagctcactgaccggaaggtccaggtgaatctcgtcataagtgatctcaggctctcacaggatccggagggaaatgtgttagagggtctggaaaattcagtgcttttgagttacttgtttttattaaaaatttcctcacaaaagagagtcctcaagttgtggctgttcttgggaaaggggtcaccgtgtctgacaaagtgtaactttaaaaagcacgttgattttttacaaatgtaagtgtgcttgggaattccttaaattttgtgcaataaactattttttggtaaagat

SEQ ID NO: 451065 - DNA, 555 bp, Homo sapiens
cttacattatggacgtggacaccagaggggctgtgggccttatcctggccaccccgcctgtgggacggggcccatgggctgctcctctcagagtgaagcctttgtgggatgagaaagtgccgtgctcatgagtctggatcctcttctctcctactccagctgcatgtctgaaaagcgacgtcaccttgttgttaaagccatggtggtccagcgtgctctgtctttccaggtgccgaggtaaacagagcatccacggaaggggaaagcccggatggacctggccagggaggcctctgtcagaacgggccaacgccacccttcccagaccctccgtcgtctctcgatcccaccacaagcccagtgggccctgatgcctctccaggtgtggctggtttccatgacaacctaaggaagtctcagggaactagtgctgagggcagtgttagaaaagaagctttgcagtctctcagactcagtcttcctatgcaagaaacgcaactgtgtaagcatccgttaccccgcttttcccaccctccacgtccgcgtcgctcagcc

SEQ ID NO: 451066 - DNA, 4070 bp, Homo sapiens
gagcaaggaagattcaggacaggggactccgcggctttgcaggcggccaagagtggcaaggaggagcttgacagaggagcaagacgcttggaagaaggtaccgaggaaacgtcggaaactttagagaagttaagagaagaattagctatcaaatccggccaggtggaacacctgcagcaggagactgctgctctgaaaaagcaaatgcaaaaaataaaggaacagtttctccaacaaaaggtgatggtggaggcctaccggcgcgacgccacctccaaagaccagctcatcagtgagctgaaagccaccaggaagaggctggactcggagctgaaggagctgcggcaggagctgatgcaagtgcacggggagaagcggactgccgaggcggagctctcgcgcctgcacagagaggtggcccaggtccgtcagcacatggcggaccttgaagggcatctccagtcggcgcagaaggagcgagacgagatggaaacacacttgcagtcgttgcagttcgataaggagcagatggtcgcggtcacagaggccaatgaggcgctgaagaaacaaatcgaagagttgcagcaagaggcccggaaggccatcacggaacagaagcagaagatgaggcggctgggctcagacttgaccagcgcccagaaggagatgaagaccaaacataaggcctacgagaacgccgtgggcatcctcagccgccgcctgcaggaggccctcgcggccaaggaggctgcggacgcggagctgggccagctccgagcccagggtggcagcagtgacagcagcctggctctacatgaaaggatccaggccctggaggcggagctgcaggctgtcagtcatagcaagacgctgctggaaaaggaactgcaggaggtcatagcgctgaccagccaggagctggaggagtcccgggagaaggtgctggagctggaggacgagcttcaagaatccagaggctttaggaagaagataaaacgccttgaggagtcaaacaagaagttggctcttgaattagagcacgagaaagggaagcttacgggcctcggtcagtccaacgcagctctgcgggaacacaacagcatcctagaaacagctttggccaagagggaggcagacctagtccagttgaaccttcaggtgcaggcagttttgcagcgcaaagaagaggaggatcgccagatgaagcatcttgtccaggccctgcaggcctcactagagaaggagaaggagaaggtgaacagcctcaaggagcaggtggctgctgccaaggtggaagccgggcataaccgccgccacttcaaggcggcctccttggagctgagtgaggtgaagaaggagctgcaggccaaggaacacctggtgcagaagctgcaggccgaggccgacgaccttcagattcgggaggggaaacattcccaggagatagcacagttccaagcagagctggccgaggcccgggcacagctccagctcctgcagaagcagctggacgagcagctcagcaaacagcccgtgggaaaccaagagatggaaaatctcaaatgggaggtggatcagaaagaaagagaaatccagtccttgaagcagcagctggacttgacggagcagcagggcaggaaggaactggaagggctacagcagctgctgcagaacgtcaagtctgagttggagatggcccaggaagacctgtccatgacccagaaggataaatttatgctccaggcaaaagtgtcggagctgaagaacaacatgaagaccctgctccagcagaaccagcagctcaagctggacctacgccgcggcgcggccaagacgagaaaggagccgaaaggcgaggccagctcttccaaccctgccacgcccatcaagatcccggactgcccagttcccgcctcgctgctggaggagctgctgagaccaccgcccgccgtgagcaaggagcccctcaagaacctgaacagctgcctccagcagctcaagcaggagatggacagcctgcagcgccagatggaggagcacgccctgacggtgcacgagtctctgtcctcgtggacgccgctggagccagccactgccagccctgtgcccccggggggtcacgccggcccacgcggcgacccacagagacacagtcagagcagggcttccaaagaagggccgggagagtgactgctgtggactcgcctccgtgcgccgctgccccagaaggctcttatcaatgttatttatttgattgtgtggtcgatgtttttctaagacatgaaatttaagttttgttttgcctttaacaagaagtaaaatatatagcagaatgagagccaaggactagaaaaacattcgaagatcacaattagcttttcacatggaatgaccaactcttaaaagcctgataggctctcggcgaggagctttgaacgtgtctgaagggttacttgtaggtcgtggcttctgagcggccaccgatgctgctctctgcgggtgacagggagaggctgcgtaactgggagcagctgtgtgacagggtctgcggcaccgcgcctggccaggccggctgcagtttctcacttccctgttccattcagtaagagctttacttttccgcagaaatgaaattttatctgtacctttggctttttacttgttttttttgatagccatcccaccataggatgtgtacatagatactgaatatcataatccaatctttgtttttttttttttttttttttgagacagagtctcgctttgttgcccaggctggagtgcagtggcacactctccgctcactgcaagctccgcctcccaggttcatgcgattctcctgcctcagcctctcgagtagctgggattacaggtgcccgccaccacaccagcctaatttttgtatttttagaggggtggagttccaccatgttggccaggctggtcttgaactcttgacctcaggtgatcctgagcctcagcctcccaaagtgctggaattataggcgtgaaccaccgcccccggctgcagttggatttttaaattgcttttttttattgttgaggtttttttatctccaagggactctcccggcacttctaccttccagagttacttcagtgcataaagtttgaattattttgttcttgtgggcagaagtgggaatgatggaatatcctcacggaaaaggcagtgaagttgggagtactgcttacaaaacagggtcaccagtgcattatgtggcgtgttcatccccacgccgtgtgtcacgggctagggcggcgtgttcatccccacaccgtgtgtcacaacaggctagggcacttcacgatgtcactacttgtttttctgacgttccaaaaacaacgtaacttggttttcatgtgtttttccgtggtatatgtgagattgatgctacgggtcttacggactcacacccgttcccactctctgcaatatggatcaggcagtgtttctgataggatgtgaaatggactctcctcgggtgggtccagcaggggccctgcccaccagaacacagtccgtgctgtgctgcgctaaggagctggccctcaactctccttggtgcagggttcccacaaccgagttctagttccctgaggtctttaaaaacaaaaacagaatgttgtacgtgaagattctaggaggggagggaccagcaaatctgagagaaccgtcctggggcctcccttcgaggagccctctgatgtgaggagggacttgagttgagtgacgctgtggtgtgaggtgttctgagctcactgaccggaaggtccaggtgaatctcgtcataagtgatctcaggctctcacaggatccggagggaaatgtgttagagggtctggaaaattcagtgcttttgagttacttgtttttattaaaaatttcctcacaaaagagagtcctcaagttgtggctgttcttgggaaaggggtcaccgtgtctgacaaagtgtaactttaaaaagcacgttgattttttacaaatgtaagtgtgcttgggaattccttaaattttgtgcaataaactattttttggtaaagat

SEQ ID NO: 451067 - DNA, 2552 bp, Homo sapiens
tggggtttcaccatgttggccaggatggtctcgatctcctgacctcaagtgatctgcccatctcagcctcccaaagtgctgggattacaggcgtgagcccctgcgcccggcctgtcacccagtctttaagaagcatatgctcatgttattgaagaagaacctacttattattgattgccttttgaaaatttgttgggaataatttacctgcaggatttagggatagtcagaaaattctaagaaatataattattttatttaccttctaaagccaaatattcttacacagaaaggtcctctgttgttctggttttactttgttgctgaggatctttccttcctgctggtctcttcctctcaggccactggccctgtgtgattccaccgtggctggccactgggaaggggcagcttggacccttggtcaggcctgacggccatcaggaggcacaaggacactgaggccccatatctgatctgacctttgggggggcacagggagaggccggtggaggaggaggaggagagcagaccaggggctccctgcagcgactcccgcggtttcccctggagtcaggccaggtgtaggtcgcaggcggtaacaaacctcacactcctgttccccaagtgaaaatctttaccattgtctgtgggagcgcctgtactcgtgtgtaggagcacctgtacttctgcagtcatcgagaagtcctggatcttttgtggttacaccagcatcatgtggcaagcagaggcgacttccggaagagacaggcaggcaccgtgaggaaggtggctgtgctctcccaggtgtctcagagacagatgccttatttaaaatcagcacgacatgtgtgagatcttctgtttcctaccccaaatcctgaaaccctgcagacactggctgactgggagaggtggggtctgtaagttgtcccctagtttgctaagaaaatctaaaataatatttattatatgagttaggagagagagaatgggtccgcgtggcctcctctgcagatgtactggtctgaaatgaggttctgagtcactggccaggccagatgtgctcatgtcggtgtctggtgtctgttttgtggagaaaacagtatggtgtgttttaagctatttgtgttctgttgtaatatacttttagaaggttaattggtaaggttaaggtagcattaaccacaaagatgtttggtatttaaaaaatattctctagcaaatattggaatttccaaaatatatcatttgtacagggttaattttgaaataatacttgaaaatttcattataaatatatcctactttttatcttaagttgaagatgttatttactaaattgttcttgtaccattagaaaaaaaaatacggcaatttacgttcttatttattttggctgtactacccctttgttttaattttaaaatcaagaaatcgggccgggcgcggtggctcatgcctgtaatcccaaagtgctggaattataggcgtgaaccaccgcccccggctgcagttggatttttaaattgcttttttttattgttgaggtttttttatctccaagggactctcccggcacttctaccttccagagttacttcagtgcataaagtttgaattattttgttcttgtgggcagaagtgggaatgatggaatatcctcacggaaaaggcagtgaagttgggagtactgcttacaaaacagggtcaccagtgcattatgtggcgtgttcatccccacgccgtgtgtcacgggctagggcggcgtgttcatccccacaccgtgtgtcacaacaggctagggcacttcacgatgtcactacttgtttttctgacgttccaaaaacaacgtaacttggttttcatgtgtttttccgtggtatatgtgagattgatgctacgggtcttacggactcacacccgttcccactctctgcaatatggatcaggcagtgtttctgataggatgtgaaatggactctcctcgggtgggtccagcaggggccctgcccaccagaacacagtccgtgctgtgctgcgctaaggagctggccctcaactctccttggtgcagggttcccacaaccgagttctagttccctgaggtctttaaaaacaaaaacagaatgttgtacgtgaagattctaggaggggagggaccagcaaatctgagagaaccgtcctggggcctcccttcgaggagccctctgatgtgaggagggacttgagttgagtgacgctgtggtgtgaggtgttctgagctcactgaccggaaggtccaggtgaatctcgtcataagtgatctcaggctctcacaggatccggagggaaatgtgttagagggtctggaaaattcagtgcttttgagttacttgtttttattaaaaatttcctcacaaaagagagtcctcaagttgtggctgttcttgggaaaggggtcaccgtgtctgacaaagtgtaactttaaaaagcacgttgattttttacaaatgtaagtgtgcttgggaattccttaaattttgtgcaataaactattttttggtaaagat

SEQ ID NO: 451068 - DNA, 6699 bp, Homo sapiens
cacgtctccgccggagcatccgggccgggcggcctccggggctgccagagcagcaggagactgggtgtgttgctgtattgcccaggctggtgtggaactcctggcctcaagcgatcctcccaccccagcctcccaaagtgctggtgttacaggcagtataccttaaatggcaagaaggaaataaatcatctgacatcactcagattgaagaggagctttttttcccccgattgccttaagaagtagcatactttcccaagtatcatgatattagctggtttgacatcaagtcatttgtgagtcatcagatcttctcctgaaaatgggagacacagtagggcccctcccaggagctcttggctgttgctgatggcagaagccaagcttgtccaaggttcacttgtagcccctcagcgtcagctcagctggtgtcgtcctgaccatggacggcgcgtcggccgagcaagatggcctccaggaggacagatcccacagtggcccctcgtctctccccgaggccccactgaagcccccgggcccactggtgccacctgaccagcaggacaaagtccagtgtgccgaggtaaacagagcatccacggaaggggaaagcccggatggacctggccagggaggcctctgtcagaacgggccaacgccacccttcccagaccctccgtcgtctctcgatcccaccacaagcccagtgggccctgatgcctctccaggctctacagattctcccctgcccctggagaaggaggagcaggtccgacttcaggctcggaagtggctggaagagcagctcaaacagtacagggtgaagcgccagcaggagaggtccagtcaacctgcaaccaaaacgagactttttagcacgcttgatcctgagctcatgttaaacccagaaaacttaccaagggccagtaccctggctatgacaaaagaatattccttcctgcgcaccagtgtccctcgggggcctaaggtgggcagcctggggcttccggcacatcctagggagaaaaaaacttccaaatcaagcaaaatccggtctctggccgattacagaactgaagattcaaatgcggggaattctgggggaaatgtcccggctcccgattctaccaagggttccctgaagcagaacagaagcagtgcggcgtccgttgtgtctgagatcagcctgtcccccgacactgacgaccgtctggagaacacctccctggctggagacagcgtgtctgaggtggatggaaatgacagcgacagctcatcgtacagcagcgcctccacccgagggacctatggcattctgtcgaagacagtgggcacgcaggacaccccctatatggtcaacggccaggagattcctgcggataccctgggccagttcccctccattaaggacgtcctccaggccgcagccgctgagcaccaagaccaggggcaggaggtcaacggggaggtgcggagtcggagagacagcatctgcagcagcgtgtccttggagagctctgcagcagaaacacaggaggagatgctgcaggtgctcaaagagaaaatgcgactcgaaggacagctggaagccttgtcactggaggcgagtcaggcacttaaagagaaggctgagctgcaggcccagctggccgccctcagcacgaagctgcaggcgcaggtggagtgcagccacagcagccagcagcggcaggattcgctgagctcggaggtggacaccctgaagcagtcgtgctgggacctggagcgagccatgactgacctgcagaacatgctggaggcaaaaaatgccagcctggcgtcgtccaacaacgacttgcaggtggccgaggagcagtaccagaggcttatggccaaggtagaggacatgcagaggagcatgctcagcaaggacaacacagtgcacgacctgcgacagcagatgacagccttgcagagccagcttcagcaggtgcagctggagcggacgacgctgaccagcaagctgaaggcgtcgcaggcggagatctcgtccctacagagtgtccggcagtggtaccagcagcagctcgccctggcacaggaggcccgcgtcaggctgcagggtgagatggcccacatccaggttggacagatgacccaggctggtatcctggagcacctgaaactcgagaatgtgtccctgtcccagcagctgacggaaactcagcacaggtccatgaaggagaaggggcgcatcgcggcacagctgcagggcattgaggctgacatgttggatcaggaagcagccttcatgcagattcaggaggcaaagacgatggtggaggaggaccttcagaggaggctggaagagtttgaaggtgagagggagcggctgcagaggatggcggactcggcggcatccctggagcagcagctggagcaggtgaagttgactttactccagcgagaccagcagcttgaggctttgcagcaggagcacctggacctgatgaaacagctcaccttgactcaggaggctctgcagagcagggagcagtccctcgatgccctgcagacacactacgatgagctgcaggccaggctgggggagctgcagggcgaggccgcctccagggaggacacgatctgcctcctgcagaacgagaagatcatcttggaggcggctttgcaggcggccaagagtggcaaggaggagcttgacagaggagcaagacgcttggaagaaggtaccgaggaaacgtcggaaactttagagaagttaagagaagaattagctatcaaatccggccaggtggaacacctgcagcaggagactgctgctctgaaaaagcaaatgcaaaaaataaaggaacagtttctccaacaaaaggtgatggtggaggcctaccggcgcgacgccacctccaaagaccagctcatcagtgagctgaaagccaccaggaagaggctggactcggagctgaaggagctgcggcaggagctgatgcaagtgcacggggagaagcggactgccgaggcggagctctcgcgcctgcacagagaggtggcccaggtccgtcagcacatggcggaccttgaagggcatctccagtcggcgcagaaggagcgagacgagatggaaacacacttgcagtcgttgcagttcgataaggagcagatggtcgcggtcacagaggccaatgaggcgctgaagaaacaaatcgaagagttgcagcaagaggcccggaaggccatcacggaacagaagcagaagatgaggcggctgggctcagacttgaccagcgcccagaaggagatgaagaccaaacataaggcctacgagaacgccgtgggcatcctcagccgccgcctgcaggaggccctcgcggccaaggaggctgcggacgcggagctgggccagctccgagcccagggtggcagcagtgacagcagcctggctctacatgaaaggatccaggccctggaggcggagctgcaggctgtcagtcatagcaagacgctgctggaaaaggaactgcaggaggtcatagcgctgaccagccaggagctggaggagtcccgggagaaggtgctggagctggaggacgagcttcaagaatccagaggctttaggaagaagataaaacgccttgaggagtcaaacaagaagttggctcttgaattagagcacgagaaagggaagcttacgggcctcggtcagtccaacgcagctctgcgggaacacaacagcatcctagaaacagctttggccaagagggaggcagacctagtccagttgaaccttcaggtgcaggcagttttgcagcgcaaagaagaggaggatcgccagatgaagcatcttgtccaggccctgcaggcctcactagagaaggagaaggagaaggtgaacagcctcaaggagcaggtggctgctgccaaggtggaagccgggcataaccgccgccacttcaaggcggcctccttggagctgagtgaggtgaagaaggagctgcaggccaaggaacacctggtgcagaagctgcaggccgaggccgacgaccttcagattcgggaggggaaacattcccaggagatagcacagttccaagcagagctggccgaggcccgggcacagctccagctcctgcagaagcagctggacgagcagctcagcaaacagcccgtgggaaaccaagagatggaaaatctcaaatgggaggtggatcagaaagaaagagaaatccagtccttgaagcagcagctggacttgacggagcagcagggcaggaaggaactggaagggctacagcagctgctgcagaacgtcaagtctgagttggagatggcccaggaagacctgtccatgacccagaaggataaatttatgctccaggcaaaagtgtcggagctgaagaacaacatgaagaccctgctccagcagaaccagcagctcaagctggacctacgccgcggcgcggccaagacgagaaaggagccgaaaggcgaggccagctcttccaaccctgccacgcccatcaagatcccggactgcccagttcccgcctcgctgctggaggagctgctgagaccaccgcccgccgtgagcaaggagcccctcaagaacctgaacagctgcctccagcagctcaagcaggagatggacagcctgcagcgccagatggaggagcacgccctgacggtgcacgagtctctgtcctcgtggacgccgctggagccagccactgccagccctgtgcccccggggggtcacgccggcccacgcggcgacccacagagacacagtcagagcagggcttccaaagaagggccgggagagtgactgctgtggactcgcctccgtgcgccgctgccccagaaggctcttatcaatgttatttatttgattgtgtggtcgatgtttttctaagacatgaaatttaagttttgttttgcctttaacaagaagtaaaatatatagcagaatgagagccaaggactagaaaaacattcgaagatcacaattagcttttcacatggaatgaccaactcttaaaagcctgataggctctcggcgaggagctttgaacgtgtctgaagggttacttgtaggtcgtggcttctgagcggccaccgatgctgctctctgcgggtgacagggagaggctgcgtaactgggagcagctgtgtgacagggtctgcggcaccgcgcctggccaggccggctgcagtttctcacttccctgttccattcagtaagagctttacttttccgcagaaatgaaattttatctgtacctttggctttttacttgttttttttgatagccatcccaccataggatgtgtacatagatactgaatatcataatccaatctttgtttttttttttttttttttttgagacagagtctcgctttgttgcccaggctggagtgcagtggcacactctccgctcactgcaagctccgcctcccaggttcatgcgattctcctgcctcagcctctcgagtagctgggattacaggtgcccgccaccacaccagcctaatttttgtatttttagaggggtggagttccaccatgttggccaggctggtcttgaactcttgacctcaggtgatcctgagcctcagcctcccaaagtgctggaattataggcgtgaaccaccgcccccggctgcagttggatttttaaattgcttttttttattgttgaggtttttttatctccaagggactctcccggcacttctaccttccagagttacttcagtgcataaagtttgaattattttgttcttgtgggcagaagtgggaatgatggaatatcctcacggaaaaggcagtgaagttgggagtactgcttacaaaacagggtcaccagtgcattatgtggcgtgttcatccccacgccgtgtgtcacgggctagggcggcgtgttcatccccacaccgtgtgtcacaacaggctagggcacttcacgatgtcactacttgtttttctgacgttccaaaaacaacgtaacttggttttcatgtgtttttccgtggtatatgtgagattgatgctacgggtcttacggactcacacccgttcccactctctgcaatatggatcaggcagtgtttctgataggatgtgaaatggactctcctcgggtgggtccagcaggggccctgcccaccagaacacagtccgtgctgtgctgcgctaaggagctggccctcaactctccttggtgcagggttcccacaaccgagttctagttccctgaggtctttaaaaacaaaaacagaatgttgtacgtgaagattctaggaggggagggaccagcaaatctgagagaaccgtcctggggcctcccttcgaggagccctctgatgtgaggagggacttgagttgagtgacgctgtggtgtgaggtgttctgagctcactgaccggaaggtccaggtgaatctcgtcataagtgatctcaggctctcacaggatccggagggaaatgtgttagagggtctggaaaattcagtgcttttgagttacttgtttttattaaaaatttcctcacaaaagagagtcctcaagttgtggctgttcttgggaaaggggtcaccgtgtctgacaaagtgtaactttaaaaagcacgttgattttttacaaatgtaagtgtgcttgggaattccttaaattttgtgcaataaactattttttggtaaagat

SEQ ID NO: 451069 - DNA, 6322 bp, Homo sapiens
gtccaaggggaccggaccacccagcttgagctgacgctgaggggctaacgagtgaaccttggacaagcttggcttctgccatcagcaacagccaagagctcctggaaggggaaagcccggatggacctggccagggaggcctctgtcagaacgggccaacgccacccttcccagaccctccgtcgtctctcgatcccaccacaagcccagtgggccctgatgcctctccaggtgtggctggtttccatgacaacctaaggaagtctcagggaactagtgctgagggcagtgttagaaaagaagctttgcagtctctcagactcagtcttcctatgcaagaaacgcaactgtgctctacagattctcccctgcccctggagaaggaggagcaggtccgacttcaggctcggaagtggctggaagagcagctcaaacagtacagggtgaagcgccagcaggagaggtccagtcaacctgcaaccaaaacgagactttttagcacgcttgatcctgagctcatgttaaacccagaaaacttaccaagggccagtaccctggctatgacaaaagaatattccttcctgcgcaccagtgtccctcgggggcctaaggtgggcagcctggggcttccggcacatcctagggagaaaaaaacttccaaatcaagcaaaatccggtctctggccgattacagaactgaagattcaaatgcggggaattctgggggaaatgtcccggctcccgattctaccaagggttccctgaagcagaacagaagcagtgcggcgtccgttgtgtctgagatcagcctgtcccccgacactgacgaccgtctggagaacacctccctggctggagacagcgtgtctgaggtggatggaaatgacagcgacagctcatcgtacagcagcgcctccacccgagggacctatggcattctgtcgaagacagtgggcacgcaggacaccccctatatggtcaacggccaggagattcctgcggataccctgggccagttcccctccattaaggacgtcctccaggccgcagccgctgagcaccaagaccaggggcaggaggtcaacggggaggtgcggagtcggagagacagcatctgcagcagcgtgtccttggagagctctgcagcagaaacacaggaggagatgctgcaggtgctcaaagagaaaatgcgactcgaaggacagctggaagccttgtcactggaggcgagtcaggcacttaaagagaaggctgagctgcaggcccagctggccgccctcagcacgaagctgcaggcgcaggtggagtgcagccacagcagccagcagcggcaggattcgctgagctcggaggtggacaccctgaagcagtcgtgctgggacctggagcgagccatgactgacctgcagaacatgctggaggcaaaaaatgccagcctggcgtcgtccaacaacgacttgcaggtggccgaggagcagtaccagaggcttatggccaaggtagaggacatgcagaggagcatgctcagcaaggacaacacagtgcacgacctgcgacagcagatgacagccttgcagagccagcttcagcaggtgcagctggagcggacgacgctgaccagcaagctgaaggcgtcgcaggcggagatctcgtccctacagagtgtccggcagtggtaccagcagcagctcgccctggcacaggaggcccgcgtcaggctgcagggtgagatggcccacatccaggttggacagatgacccaggctggtatcctggagcacctgaaactcgagaatgtgtccctgtcccagcagctgacggaaactcagcacaggtccatgaaggagaaggggcgcatcgcggcacagctgcagggcattgaggctgacatgttggatcaggaagcagccttcatgcagattcaggaggcaaagacgatggtggaggaggaccttcagaggaggctggaagagtttgaaggtgagagggagcggctgcagaggatggcggactcggcggcatccctggagcagcagctggagcaggtgaagttgactttactccagcgagaccagcagcttgaggctttgcagcaggagcacctggacctgatgaaacagctcaccttgactcaggaggctctgcagagcagggagcagtccctcgatgccctgcagacacactacgatgagctgcaggccaggctgggggagctgcagggcgaggccgcctccagggaggacacgatctgcctcctgcagaacgagaagatcatcttggaggcggctttgcaggcggccaagagtggcaaggaggagcttgacagaggagcaagacgcttggaagaaggtaccgaggaaacgtcggaaactttagagaagttaagagaagaattagctatcaaatccggccaggtggaacacctgcagcaggagactgctgctctgaaaaagcaaatgcaaaaaataaaggaacagtttctccaacaaaaggtgatggtggaggcctaccggcgcgacgccacctccaaagaccagctcatcagtgagctgaaagccaccaggaagaggctggactcggagctgaaggagctgcggcaggagctgatgcaagtgcacggggagaagcggactgccgaggcggagctctcgcgcctgcacagagaggtggcccaggtccgtcagcacatggcggaccttgaagggcatctccagtcggcgcagaaggagcgagacgagatggaaacacacttgcagtcgttgcagttcgataaggagcagatggtcgcggtcacagaggccaatgaggcgctgaagaaacaaatcgaagagttgcagcaagaggcccggaaggccatcacggaacagaagcagaagatgaggcggctgggctcagacttgaccagcgcccagaaggagatgaagaccaaacataaggcctacgagaacgccgtgggcatcctcagccgccgcctgcaggaggccctcgcggccaaggaggctgcggacgcggagctgggccagctccgagcccagggtggcagcagtgacagcagcctggctctacatgaaaggatccaggccctggaggcggagctgcaggctgtcagtcatagcaagacgctgctggaaaaggaactgcaggaggtcatagcgctgaccagccaggagctggaggagtcccgggagaaggtgctggagctggaggacgagcttcaagaatccagaggctttaggaagaagataaaacgccttgaggagtcaaacaagaagttggctcttgaattagagcacgagaaagggaagcttacgggcctcggtcagtccaacgcagctctgcgggaacacaacagcatcctagaaacagctttggccaagagggaggcagacctagtccagttgaaccttcaggtgcaggcagttttgcagcgcaaagaagaggaggatcgccagatgaagcatcttgtccaggccctgcaggcctcactagagaaggagaaggagaaggtgaacagcctcaaggagcaggtggctgctgccaaggtggaagccgggcataaccgccgccacttcaaggcggcctccttggagctgagtgaggtgaagaaggagctgcaggccaaggaacacctggtgcagaagctgcaggccgaggccgacgaccttcagattcgggaggggaaacattcccaggagatagcacagttccaagcagagctggccgaggcccgggcacagctccagctcctgcagaagcagctggacgagcagctcagcaaacagcccgtgggaaaccaagagatggaaaatctcaaatgggaggtggatcagaaagaaagagaaatccagtccttgaagcagcagctggacttgacggagcagcagggcaggaaggaactggaagggctacagcagctgctgcagaacgtcaagtctgagttggagatggcccaggaagacctgtccatgacccagaaggataaatttatgctccaggcaaaagtgtcggagctgaagaacaacatgaagaccctgctccagcagaaccagcagctcaagctggacctacgccgcggcgcggccaagacgagaaaggagccgaaaggcgaggccagctcttccaaccctgccacgcccatcaagatcccggactgcccagttcccgcctcgctgctggaggagctgctgagaccaccgcccgccgtgagcaaggagcccctcaagaacctgaacagctgcctccagcagctcaagcaggagatggacagcctgcagcgccagatggaggagcacgccctgacggtgcacgagtctctgtcctcgtggacgccgctggagccagccactgccagccctgtgcccccggggggtcacgccggcccacgcggcgacccacagagacacagtcagagcagggcttccaaagaagggccgggagagtgactgctgtggactcgcctccgtgcgccgctgccccagaaggctcttatcaatgttatttatttgattgtgtggtcgatgtttttctaagacatgaaatttaagttttgttttgcctttaacaagaagtaaaatatatagcagaatgagagccaaggactagaaaaacattcgaagatcacaattagcttttcacatggaatgaccaactcttaaaagcctgataggctctcggcgaggagctttgaacgtgtctgaagggttacttgtaggtcgtggcttctgagcggccaccgatgctgctctctgcgggtgacagggagaggctgcgtaactgggagcagctgtgtgacagggtctgcggcaccgcgcctggccaggccggctgcagtttctcacttccctgttccattcagtaagagctttacttttccgcagaaatgaaattttatctgtacctttggctttttacttgttttttttgatagccatcccaccataggatgtgtacatagatactgaatatcataatccaatctttgtttttttttttttttttttttgagacagagtctcgctttgttgcccaggctggagtgcagtggcacactctccgctcactgcaagctccgcctcccaggttcatgcgattctcctgcctcagcctctcgagtagctgggattacaggtgcccgccaccacaccagcctaatttttgtatttttagaggggtggagttccaccatgttggccaggctggtcttgaactcttgacctcaggtgatcctgagcctcagcctcccaaagtgctggaattataggcgtgaaccaccgcccccggctgcagttggatttttaaattgcttttttttattgttgaggtttttttatctccaagggactctcccggcacttctaccttccagagttacttcagtgcataaagtttgaattattttgttcttgtgggcagaagtgggaatgatggaatatcctcacggaaaaggcagtgaagttgggagtactgcttacaaaacagggtcaccagtgcattatgtggcgtgttcatccccacgccgtgtgtcacgggctagggcggcgtgttcatccccacaccgtgtgtcacaacaggctagggcacttcacgatgtcactacttgtttttctgacgttccaaaaacaacgtaacttggttttcatgtgtttttccgtggtatatgtgagattgatgctacgggtcttacggactcacacccgttcccactctctgcaatatggatcaggcagtgtttctgataggatgtgaaatggactctcctcgggtgggtccagcaggggccctgcccaccagaacacagtccgtgctgtgctgcgctaaggagctggccctcaactctccttggtgcagggttcccacaaccgagttctagttccctgaggtctttaaaaacaaaaacagaatgttgtacgtgaagattctaggaggggagggaccagcaaatctgagagaaccgtcctggggcctcccttcgaggagccctctgatgtgaggagggacttgagttgagtgacgctgtggtgtgaggtgttctgagctcactgaccggaaggtccaggtgaatctcgtcataagtgatctcaggctctcacaggatccggagggaaatgtgttagagggtctggaaaattcagtgcttttgagttacttgtttttattaaaaatttcctcacaaaagagagtcctcaagttgtggctgttcttgggaaaggggtcaccgtgtctgacaaagtgtaactttaaaaagcacgttgattttttacaaatgtaagtgtgcttgggaattccttaaattttgtgcaataaactattttttggtaaagat

SEQ ID NO: 451070 - DNA, 1999 bp, Homo sapiens
  misc_feature (16)..(16): n is a, c, g, or t
  misc_feature (38)..(38): n is a, c, g, or t
gcgacttctccttgcntatgggaagtcctcaagtgagngatgttcaccatgtatttttttttctcttaggacagactaattctgaaaataccgaagaaaagtagctctatgttctcaccccggttttcctgtacttctgcagtcatcgagaagtcctggatcttttgtggttacaccagcatcatgtggcaagcagaggcgacttccggaagagacaggcaggcaccgtgaggaaggtggctgtgctctcccaggtgtctcagagacagatgccttatttaaaatcagcacgacatgtgtgagatcttctgtttcctaccccaaatcctgaaaccctgcagacactggctgactgggagaggtggggtctgtaagttgtcccctagtttgctaagaaaatctaaaataatatttattatatgagttaggagagagagaatgggtccgcgtggcctcctctgcagatgtactggtctgaaatgaggttctgagtcactggccaggccagatgtgctcatgtcggtgtctggtgtctgttttgtggagaaaacagtatggtgtgttttaagctatttgtgttctgttgtaatatacttttagaaggttaattggtaaggttaaggtagcattaaccacaaagatgtttggtatttaaaaaatattctctagcaaatattggaatttccaaaatatatcatttgtacagggttaattttgaaataatacttgaaaatttcattataaatatatcctactttttatcttaagttgaagatgttatttactaaattgttcttgtaccattagaaaaaaaaatacggcaatttacgttcttatttattttggctgtactacccctttgttttaattttaaaatcaagaaatcgggccgggcgcggtggctcatgcctgtaatcccaaagtgctggaattataggcgtgaaccaccgcccccggctgcagttggatttttaaattgcttttttttattgttgaggtttttttatctccaagggactctcccggcacttctaccttccagagttacttcagtgcataaagtttgaattattttgttcttgtgggcagaagtgggaatgatggaatatcctcacggaaaaggcagtgaagttgggagtactgcttacaaaacagggtcaccagtgcattatgtggcgtgttcatccccacgccgtgtgtcacgggctagggcggcgtgttcatccccacaccgtgtgtcacaacaggctagggcacttcacgatgtcactacttgtttttctgacgttccaaaaacaacgtaacttggttttcatgtgtttttccgtggtatatgtgagattgatgctacgggtcttacggactcacacccgttcccactctctgcaatatggatcaggcagtgtttctgataggatgtgaaatggactctcctcgggtgggtccagcaggggccctgcccaccagaacacagtccgtgctgtgctgcgctaaggagctggccctcaactctccttggtgcagggttcccacaaccgagttctagttccctgaggtctttaaaaacaaaaacagaatgttgtacgtgaagattctaggaggggagggaccagcaaatctgagagaaccgtcctggggcctcccttcgaggagccctctgatgtgaggagggacttgagttgagtgacgctgtggtgtgaggtgttctgagctcactgaccggaaggtccaggtgaatctcgtcataagtgatctcaggctctcacaggatccggagggaaatgtgttagagggtctggaaaattcagtgcttttgagttacttgtttttattaaaaatttcctcacaaaagagagtcctcaagttgtggctgttcttgggaaaggggtcaccgtgtctgacaaagtgtaactttaaaaagcacgttgattttttacaaatgtaagtgtgcttgggaattccttaaattttgtgcaataaactattttttggtaaagat

SEQ ID NO: 451071 - DNA, 2823 bp, Homo sapiens
aactcaggggcgagctgcaactaactcagtggctgctgccaaggtggaagccgggcataaccgccgccacttcaaggcggcctccttggagctgagtgaggtgaagaaggagctgcaggccaaggaacacctggtgcagaagctgcaggccgaggccgacgaccttcagattcgggaggggaaacattcccaggagatagcacagttccaagcagagctggccgaggcccgggcacagctccagctcctgcagaagcagctggacgagcagctcagcaaacagcccgtgggaaaccaagagatggaaaatctcaaatgggaggtggatcagaaagaaagagaaatccagtccttgaagcagcagctggacttgacggagcagcagggcaggaaggaactggaagggctacagcagctgctgcagaacgtcaagtctgagttggagatggcccaggaagacctgtccatgacccagaaggataaatttatgctccaggcaaaagtgtcggagctgaagaacaacatgaagaccctgctccagcagaaccagcagctcaagctggacctacgccgcggcgcggccaagacgagaaaggagccgaaaggcgaggccagctcttccaaccctgccacgcccatcaagatcccggactgcccagttcccgcctcgctgctggaggagctgctgagaccaccgcccgccgtgagcaaggagcccctcaagaacctgaacagctgcctccagcagctcaagcaggagatggacagcctgcagcgccagatggaggagcacgccctgacggtgcacgagtctctgtcctcgtggacgccgctggagccagccactgccagccctgtgcccccggggggtcacgccggcccacgcggcgacccacagagacacagtcagagcagggcttccaaagaagggccgggagagtgactgctgtggactcgcctccgtgcgccgctgccccagaaggctcttatcaatgttatttatttgattgtgtggtcgatgtttttctaagacatgaaatttaagttttgttttgcctttaacaagaagtaaaatatatagcagaatgagagccaaggactagaaaaacattcgaagatcacaattagcttttcacatggaatgaccaactcttaaaagcctgataggctctcggcgaggagctttgaacgtgtctgaagggttacttgtaggtcgtggcttctgagcggccaccgatgctgctctctgcgggtgacagggagaggctgcgtaactgggagcagctgtgtgacagggtctgcggcaccgcgcctggccaggccggctgcagtttctcacttccctgttccattcagtaagagctttacttttccgcagaaatgaaattttatctgtacctttggctttttacttgttttttttgatagccatcccaccataggatgtgtacatagatactgaatatcataatccaatctttgtttttttttttttttttttttgagacagagtctcgctttgttgcccaggctggagtgcagtggcacactctccgctcactgcaagctccgcctcccaggttcatgcgattctcctgcctcagcctctcgagtagctgggattacaggtgcccgccaccacaccagcctaatttttgtatttttagaggggtggagttccaccatgttggccaggctggtcttgaactcttgacctcaggtgatcctgagcctcagcctcccaaagtgctggaattataggcgtgaaccaccgcccccggctgcagttggatttttaaattgcttttttttattgttgaggtttttttatctccaagggactctcccggcacttctaccttccagagttacttcagtgcataaagtttgaattattttgttcttgtgggcagaagtgggaatgatggaatatcctcacggaaaaggcagtgaagttgggagtactgcttacaaaacagggtcaccagtgcattatgtggcgtgttcatccccacgccgtgtgtcacgggctagggcggcgtgttcatccccacaccgtgtgtcacaacaggctagggcacttcacgatgtcactacttgtttttctgacgttccaaaaacaacgtaacttggttttcatgtgtttttccgtggtatatgtgagattgatgctacgggtcttacggactcacacccgttcccactctctgcaatatggatcaggcagtgtttctgataggatgtgaaatggactctcctcgggtgggtccagcaggggccctgcccaccagaacacagtccgtgctgtgctgcgctaaggagctggccctcaactctccttggtgcagggttcccacaaccgagttctagttccctgaggtctttaaaaacaaaaacagaatgttgtacgtgaagattctaggaggggagggaccagcaaatctgagagaaccgtcctggggcctcccttcgaggagccctctgatgtgaggagggacttgagttgagtgacgctgtggtgtgaggtgttctgagctcactgaccggaaggtccaggtgaatctcgtcataagtgatctcaggctctcacaggatccggagggaaatgtgttagagggtctggaaaattcagtgcttttgagttacttgtttttattaaaaatttcctcacaaaagagagtcctcaagttgtggctgttcttgggaaaggggtcaccgtgtctgacaaagtgtaactttaaaaagcacgttgattttttacaaatgtaagtgtgcttgggaattccttaaattttgtgcaataaactattttttggtaaagat

SEQ ID NO: 451072 - DNA, 2809 bp, Homo sapiens
cctttcctggagccctcagtgtaacatctgtgaggatgtgtcccctcctggagctctctgtaacatttgtgcagatgtgttcccctcctggaggcttcagtgtaacatctgtgcagacagattcccctctgcaggccgaggccgacgaccttcagattcgggaggggaaacattcccaggagatagcacagttccaagcagagctggccgaggcccgggcacagctccagctcctgcagaagcagctggacgagcagctcagcaaacagcccgtgggaaaccaagagatggaaaatctcaaatgggaggtggatcagaaagaaagagaaatccagtccttgaagcagcagctggacttgacggagcagcagggcaggaaggaactggaagggctacagcagctgctgcagaacgtcaagtctgagttggagatggcccaggaagacctgtccatgacccagaaggataaatttatgctccaggcaaaagtgtcggagctgaagaacaacatgaagaccctgctccagcagaaccagcagctcaagctggacctacgccgcggcgcggccaagacgagaaaggagccgaaaggcgaggccagctcttccaaccctgccacgcccatcaagatcccggactgcccagttcccgcctcgctgctggaggagctgctgagaccaccgcccgccgtgagcaaggagcccctcaagaacctgaacagctgcctccagcagctcaagcaggagatggacagcctgcagcgccagatggaggagcacgccctgacggtgcacgagtctctgtcctcgtggacgccgctggagccagccactgccagccctgtgcccccggggggtcacgccggcccacgcggcgacccacagagacacagtcagagcagggcttccaaagaagggccgggagagtgactgctgtggactcgcctccgtgcgccgctgccccagaaggctcttatcaatgttatttatttgattgtgtggtcgatgtttttctaagacatgaaatttaagttttgttttgcctttaacaagaagtaaaatatatagcagaatgagagccaaggactagaaaaacattcgaagatcacaattagcttttcacatggaatgaccaactcttaaaagcctgataggctctcggcgaggagctttgaacgtgtctgaagggttacttgtaggtcgtggcttctgagcggccaccgatgctgctctctgcgggtgacagggagaggctgcgtaactgggagcagctgtgtgacagggtctgcggcaccgcgcctggccaggccggctgcagtttctcacttccctgttccattcagtaagagctttacttttccgcagaaatgaaattttatctgtacctttggctttttacttgttttttttgatagccatcccaccataggatgtgtacatagatactgaatatcataatccaatctttgtttttttttttttttttttttgagacagagtctcgctttgttgcccaggctggagtgcagtggcacactctccgctcactgcaagctccgcctcccaggttcatgcgattctcctgcctcagcctctcgagtagctgggattacaggtgcccgccaccacaccagcctaatttttgtatttttagaggggtggagttccaccatgttggccaggctggtcttgaactcttgacctcaggtgatcctgagcctcagcctcccaaagtgctggaattataggcgtgaaccaccgcccccggctgcagttggatttttaaattgcttttttttattgttgaggtttttttatctccaagggactctcccggcacttctaccttccagagttacttcagtgcataaagtttgaattattttgttcttgtgggcagaagtgggaatgatggaatatcctcacggaaaaggcagtgaagttgggagtactgcttacaaaacagggtcaccagtgcattatgtggcgtgttcatccccacgccgtgtgtcacgggctagggcggcgtgttcatccccacaccgtgtgtcacaacaggctagggcacttcacgatgtcactacttgtttttctgacgttccaaaaacaacgtaacttggttttcatgtgtttttccgtggtatatgtgagattgatgctacgggtcttacggactcacacccgttcccactctctgcaatatggatcaggcagtgtttctgataggatgtgaaatggactctcctcgggtgggtccagcaggggccctgcccaccagaacacagtccgtgctgtgctgcgctaaggagctggccctcaactctccttggtgcagggttcccacaaccgagttctagttccctgaggtctttaaaaacaaaaacagaatgttgtacgtgaagattctaggaggggagggaccagcaaatctgagagaaccgtcctggggcctcccttcgaggagccctctgatgtgaggagggacttgagttgagtgacgctgtggtgtgaggtgttctgagctcactgaccggaaggtccaggtgaatctcgtcataagtgatctcaggctctcacaggatccggagggaaatgtgttagagggtctggaaaattcagtgcttttgagttacttgtttttattaaaaatttcctcacaaaagagagtcctcaagttgtggctgttcttgggaaaggggtcaccgtgtctgacaaagtgtaactttaaaaagcacgttgattttttacaaatgtaagtgtgcttgggaattccttaaattttgtgcaataaactattttttggtaaagat

SEQ ID NO: 451073 - DNA, 1744 bp, Homo sapiens
tccgtctcaaaaataaataaatgattttaaaaaatctaaaatcgagaaatcacacattcagtggggagcgacttcttgcttatgggaagtcctcaagtgagtgatgttcaccatgtatttttttttctcttaggacagactaattctgaaaataccgaaggaaaagtagctctatgttctcaccccggttttcctgcgtgtgtgcccttgggtgcgatgcctcccccagcgctctgtggtcgccggtgccagggccccctctggtttggcagggcctggctgcctttgctccctgcagtgagtcttttggtgttttcatgcacggcttgtgcttctggatctgaggcctctcgtgttcacgcggacacttccttccttaagaagacgcctaaaagaggaagttggaattttttttttttttttggagacagagtctcgctctgtcgcccaggctggagtgcagtggcgtgatctctgctcactgcaagctccgccatctgggttcaagcgattctcctgcctcattctccccagtagctgggattacaggtgcccgccaccacaccagcctaatttttgtatttttagaggggtggagttccaccatgttggccaggctggtcttgaactcttgacctcaggtgatcctgagcctcagcctcccaaagtgctggaattataggcgtgaaccaccgcccccggctgcagttggatttttaaattgcttttttttattgttgaggtttttttatctccaagggactctcccggcacttctaccttccagagttacttcagtgcataaagtttgaattattttgttcttgtgggcagaagtgggaatgatggaatatcctcacggaaaaggcagtgaagttgggagtactgcttacaaaacagggtcaccagtgcattatgtggcgtgttcatccccacgccgtgtgtcacgggctagggcggcgtgttcatccccacaccgtgtgtcacaacaggctagggcacttcacgatgtcactacttgtttttctgacgttccaaaaacaacgtaacttggttttcatgtgtttttccgtggtatatgtgagattgatgctacgggtcttacggactcacacccgttcccactctctgcaatatggatcaggcagtgtttctgataggatgtgaaatggactctcctcgggtgggtccagcaggggccctgcccaccagaacacagtccgtgctgtgctgcgctaaggagctggccctcaactctccttggtgcagggttcccacaaccgagttctagttccctgaggtctttaaaaacaaaaacagaatgttgtacgtgaagattctaggaggggagggaccagcaaatctgagagaaccgtcctggggcctcccttcgaggagccctctgatgtgaggagggacttgagttgagtgacgctgtggtgtgaggtgttctgagctcactgaccggaaggtccaggtgaatctcgtcataagtgatctcaggctctcacaggatccggagggaaatgtgttagagggtctggaaaattcagtgcttttgagttacttgtttttattaaaaatttcctcacaaaagagagtcctcaagttgtggctgttcttgggaaaggggtcaccgtgtctgacaaagtgtaactttaaaaagcacgttgattttttacaaatgtaagtgtgcttgggaattccttaaattttgtgcaataaactattttttggtaaagat

SEQ ID NO: 451074 - DNA, 980 bp, Homo sapiens
cttacattatggacgtggacaccagaggggctgtgggccttatcctggccaccccgcctgtgggacggggcccatgggctgctcctctcagagtgaagcctttgtgggatgagaaagtgccgtgctcatgagtctggatcctcttctctcctactccagctgcatgtctgaaaagcgacgtcaccttgttgttaaagccatggtggtccagcgtgctctgtctttccaggtgccgaggtaaacagagcatccacggaaggggaaagcccggatggacctggccagggaggcctctgtcagaacgggccaacgccacccttcccagaccctccgtcgtctctcgatcccaccacaagcccagtgggccctgatgcctctccaggtgtggctggtttccatgacaacctaaggaagtctcagggaactagtgctgagggcagtgttagaaaagaagctttgcagtctctcagactcagtcttcctatgcaagaaacgcaactgtgctctacagattctcccctgcccctggagaaggaggagcaggtccgacttcaggctcggaagtggctggaagagcagctcaaacagtacagggtgaagcgccagcaggagagggtgagtctccctctcccgaacaagctcatggaaagcttcctgtgccagagacaactgttggtcccacataacccggggacctgccattggcttctctgagctgccatgggctcaggggcaacaagcacattttatttctaaatctgccaattgaaaagcaaagaaagcaaacacgggtgacctcagaggtactgtgggttcagttctggaccaccacaaaaatgtaaacattgcaataaagcaagtcctacaatgtttttggtttcctagtgcataaagaagttatgtgtatacgctactgtagtttactaagtgtgcagtagcactgtgtctaaataaaactgatgtacccacattaaaatgaa

SEQ ID NO: 451075 - DNA, 4032 bp, Homo sapiens
cacgtctccgccggagcatccgggccgggcggcctccggggctgccagagcagcaggagactgggtgtgttgctgtattgcccaggctggtgtggaactcctggcctcaagcgatcctcccaccccagcctcccaaagtgctggtgttacaggcagtataccttaaatggcaagaaggaaataaatcatctgacatcactcagattgaagaggagctttttttcccccgattgccttaagaagtagcatactttcccaagtatcatgatattagctggtttgacatcaagtcatttgtgagtcatcagatcttctcctgaaaatgggagacacagtagggcccctcccaggagctcttggctgttgctgatggcagaagccaagcttgtccaaggttcacttgtagcccctcagcgtcagctcagctggtgtcgtcctgaccatggacggcgcgtcggccgagcaagatggcctccaggaggacagatcccacagtggcccctcgtctctccccgaggccccactgaagcccccgggcccactggtgccacctgaccagcaggacaaagtccagtgtgccgaggtaaacagagcatccacggaaggggaaagcccggatggacctggccagggaggcctctgtcagaacgggccaacgccacccttcccagaccctccgtcgtctctcgatcccaccacaagcccagtgggccctgatgcctctccaggctctacagattctcccctgcccctggagaaggaggagcaggtccgacttcaggctcggaagtggctggaagagcagctcaaacagtacagggtgaagcgccagcaggagaggtccagtcaacctgcaaccaaaacgagactttttagcacgcttgatcctgagctcatgttaaacccagaaaacttaccaagggccagtaccctggctatgacaaaagaatattccttcctgcgcaccagtgtccctcgggggcctaaggtgggcagcctggggcttccggcacatcctagggagaaaaaaacttccaaatcaagcaaaatccggtctctggccgattacagaactgaagattcaaatgcggggaattctgggggaaatgtcccggctcccgattctaccaagggttccctgaagcagaacagaagcagtgcggcgtccgttgtgtctgagatcagcctgtcccccgacactgacgaccgtctggagaacacctccctggctggagacagcgtgtctgaggtggatggaaatgacagcgacagctcatcgtacagcagcgcctccacccgagggacctatggcattctgtcgaagacagtgggcacgcaggacaccccctatatggtcaacggccaggagattcctgcggataccctgggccagttcccctccattaaggacgtcctccaggccgcagccgctgagcaccaagaccaggggcaggaggtcaacggggaggtgcggagtcggagagacagcatctgcagcagcgtgtccttggagagctctgcagcagaaacacaggaggagatgctgcaggtgctcaaagagaaaatgcgactcgaaggacagctggaagccttgtcactggaggcgagtcaggcacttaaagagaaggctgagctgcaggcccagctggccgccctcagcacgaagctgcaggcgcaggtggagtgcagccacagcagccagcagcggcaggattcgctgagctcggaggtggacaccctgaagcagtcgtgctgggacctggagcgagccatgactgacctgcagaacatgctggaggcaaaaaatgccagcctggcgtcgtccaacaacgacttgcaggtggccgaggagcagtaccagaggcttatggccaaggtagaggacatgcagaggagcatgctcagcaaggacaacacagtgcacgacctgcgacagcagatgacagccttgcagagccagcttcagcaggtgcagctggagcggacgacgctgaccagcaagctgaaggcgtcgcaggcggagatctcgtccctacagagtgtccggcagtggtaccagcagcagctcgccctggcacaggaggcccgcgtcaggctgcagggtgagatggcccacatccaggttggacagatgacccaggctggtatcctggagcacctgaaactcgagaatgtgtccctgtcccagcagctgacggaaactcagcacaggtccatgaaggagaaggggcgcatcgcggcacagctgcagggcattgaggctgacatgttggatcaggaagcagccttcatgcagattcaggaggcaaagacgatggtggaggaggaccttcagaggaggctggaagagtttgaaggtgagagggagcggctgcagaggatggcggactcggcggcatccctggagcagcagctggagcaggtgaagttgactttactccagcgagaccagcagcttgaggctttgcagcaggagcacctggacctgatgaaacagctcaccttgactcaggaggctctgcagagcagggagcagtccctcgatgccctgcagacacactacgatgagctgcaggccaggctgggggagctgcagggcgaggccgcctccagggaggacacgatctgcctcctgcagaacgagaagatcatcttggaggcggctttgcaggcggccaagagtggcaaggaggagcttgacagaggagcaagacgcttggaagaaggtaccgaggaaacgtcggaaactttagagaagttaagagaagaattagctatcaaatccggccaggtggaacacctgcagcaggagactgctgctctgaaaaagcaaatgcaaaaaataaaggaacagtttctccaacaaaaggtgatggtggaggcctaccggcgcgacgccacctccaaagaccagctcatcagtgagctgaaagccaccaggaagaggctggactcggagctgaaggagctgcggcaggagctgatgcaagtgcacggggagaagcggactgccgaggcggagctctcgcgcctgcacagagaggtggcccaggtccgtcagcacatggcggaccttgaagggcatctccagtcggcgcagaaggagcgagacgagatggaaacacacttgcagtcgttgcagttcgataaggagcagatggtcgcggtcacagaggccaatgaggcgctgaagaaacaaatcgaagagttgcagcaagaggcccggaaggccatcacggaacagaagcagaagatgaggcggctgggctcagacttgaccagcgcccagaaggagatgaagaccaaacataaggcctacgagaacgccgtgggcatcctcagccgccgcctgcaggaggccctcgcggccaaggaggctgcggacgcggagctgggccagctccgagcccagggtggcagcagtgacagcagcctggctctacatgaaaggatccaggccctggaggcggagctgcaggctgtcagtcatagcaagacgctgctggaaaaggaactgcaggaggtcatagcgctgaccagccaggagctggaggagtcccgggagaaggtgctggagctggaggacgagcttcaagaatccagaggctttaggaagaagataaaacgccttgaggagtcaaacaagaagttggctcttgaattagagcacgagaaagggaagcttacgggcctcggtcagtccaacgcagctctgcgggaacacaacagcatcctagaaacagctttggccaagagggaggcagacctagtccagttgaaccttcaggtgcaggcagttttgcagcgcaagagccacgcgacgagccgcaccaagagccacacaaggggacccgaggtgccccaccatgagccacgcaaagagccacccaacgagcggcgcctggtggtagctggttgtccaagatagaatcttagttcaactttaaatttgcccaaagagccacacgaagagccccgcgaagagccacgccatgagccacgcgaagagccacccaacgcgccccgaatgag

SEQ ID NO: 451076 - DNA, 709 bp, Homo sapiens
cacgtctccgccggagcatccgggccgggcggcctccggggctgccagagcagcaggagactgggtgtgttgctgtattgcccaggctggtgtggaactcctggcctcaagcgatcctcccaccccagcctcccaaagtgctggtgttacaggcagtataccttaaatggcaagaaggaaataaatcatctgacatcactcagattgaagaggagctttttttcccccgattgccttaagaagtagcatactttcccaagtatcatgatattagctggtttgacatcaagtcatttgtgagtcatcagatcttctcctgaaaatgggagacacagtagggcccctcccaggagctcttggctgttgctgatggcagaagccaagcttgtccaaggttcacttgtagcccctcagcgtcagctcagctggtgtcgtcctgaccatggacggcgcgtcggccgagcaagatggcctccaggaggacagatcccacagtggcccctcgtctctccccgaggccccactgaagcccccgggcccactggtgccacctgaccagcaggacaaagtccagtgtaagtcgtgaggttcctctgtgtgctggtcacaggaggacctggtgttgagggaggacgtggtgttgagggaggatgtggcgttgagaccactgtgagcttttcacttaattcaaagttgttttttttttttt

SEQ ID NO: 451077 - DNA, 475 bp, Homo sapiens
gacctggactggcatcatctagatggcgccgaggaggacatgtgtgtgcttaacctatgaaaatacaaactcggatcttggcaggatgtttaagatctgttagcttttaaaaatctgacttcattttccacagaacgtcaagtctgagttggagatggcccaggaagacctgtccatgacccagaaggataaatttatgctccaggcaaaagtgtcggagctgaagaacaacatgaagaccctgctccagcagaaccagcagctcaagctggacctacgccgcggcgcggccaagacggtactcaggcccgcgtccctcccggggtagccgacgtgcgctgtagatgctctcggacaggaggctggcagacgtgttagtcattcagacataaacggatttgttgagcccacactgagcagctgctgtgtagtcagtggtaatggggtgacagatgaaatcatttcattctggttt

SEQ ID NO: 451078 - DNA, 635 bp, Homo sapiens
  misc_feature (16)..(16): n is a, c, g, or t
  misc_feature (38)..(38): n is a, c, g, or t
gcgacttctccttgcntatgggaagtcctcaagtgagngatgttcaccatgtatttttttttctcttaggacagactaattctgaaaataccgaagaaaagtagctctatgttctcaccccggttttcctgtacttctgcagtcatcgagaagtcctggatcttttgtggttacaccagcatcatgtggcaagcagaggcgacttccggaagagacaggcaggcaccgtgaggaaggtggctgtgctctcccaggtgtctcagagacagatgccttatttaaaatcagcacgacatgtgtgaggagggacttgagttgagtgacgctgtggtgtgaggtgttctgagctcactgaccggaaggtccaggtgaatctcgtcataagtgatctcaggctctcacaggatccggagggaaatgtgttagagggtctggaaaattcagtgcttttgagttacttgtttttattaaaaatttcctcacaaaagagagtcctcaagttgtggctgttcttgggaaaggggtcaccgtgtctgacaaagtgtaactttaaaaagcacgttgattttttacaaatgtaagtgtgcttgggaattccttaaattttgtgcaataaactattttttggtaaagat

SEQ ID NO: 451079 - DNA, 598 bp, Homo sapiens
ctcatggccgactcttgaggataaaactaatgttcggacccaccagtgtccctcgggggcctaaggtgggcagcctggggcttccggcacatcctagggagaaaaaaacttccaaatcaagcaaaatccggtctctggccgattacagaactgaagattcaaatgcggggaattctgggggaaatgtcccggctcccgattctaccaagggttccctgaagcagaacagaagcagtgcggcgtccgttgtgtctgagatcagcctgtcccccgacactgacgaccgtctggagaacacctccctggctggagacagcgtgtctgaggtggatggaaatgacagcgacagctcatcgtacagcagcgcctccacccgagggacctatggcattctgtcgaagacagtgggcacgcaggacaccccctatatggtcaacggccaggagattcctgcggataccctgggccagttcccctccattaaggacgtcctccaggccgcagccgctgagcaccaagaccaggggcaggaggtcaacggggaggtgcggagtcggagagacagcatctgcagcaggtggtggggacagcagaggtg

SEQ ID NO: 451080 - DNA, 6473 bp, Homo sapiens
cttacattatggacgtggacaccagaggggctgtgggccttatcctggccaccccgcctgtgggacggggcccatgggctgctcctctcagagtgaagcctttgtgggatgagaaagtgccgtgctcatgagtctggatcctcttctctcctactccagctgcatgtctgaaaagcgacgtcaccttgttgttaaagccatggtggtccagcgtgctctgtctttccaggtgccgaggtaaacagagcatccacggaaggggaaagcccggatggacctggccagggaggcctctgtcagaacgggccaacgccacccttcccagaccctccgtcgtctctcgatcccaccacaagcccagtgggccctgatgcctctccaggtgtggctggtttccatgacaacctaaggaagtctcagggaactagtgctgagggcagtgttagaaaagaagctttgcagtctctcagactcagtcttcctatgcaagaaacgcaactgtgctctacagattctcccctgcccctggagaaggaggagcaggtccgacttcaggctcggaagtggctggaagagcagctcaaacagtacagggtgaagcgccagcaggagaggtccagtcaacctgcaaccaaaacgagactttttagcacgcttgatcctgagctcatgttaaacccagaaaacttaccaagggccagtaccctggctatgacaaaagaatattccttcctgcgcaccagtgtccctcgggggcctaaggtgggcagcctggggcttccggcacatcctagggagaaaaaaacttccaaatcaagcaaaatccggtctctggccgattacagaactgaagattcaaatgcggggaattctgggggaaatgtcccggctcccgattctaccaagggttccctgaagcagaacagaagcagtgcggcgtccgttgtgtctgagatcagcctgtcccccgacactgacgaccgtctggagaacacctccctggctggagacagcgtgtctgaggtggatggaaatgacagcgacagctcatcgtacagcagcgcctccacccgagggacctatggcattctgtcgaagacagtgggcacgcaggacaccccctatatggtcaacggccaggagattcctgcggataccctgggccagttcccctccattaaggacgtcctccaggccgcagccgctgagcaccaagaccaggggcaggaggtcaacggggaggtgcggagtcggagagacagcatctgcagcagcgtgtccttggagagctctgcagcagaaacacaggaggagatgctgcaggtgctcaaagagaaaatgcgactcgaaggacagctggaagccttgtcactggaggcgagtcaggcacttaaagagaaggctgagctgcaggcccagctggccgccctcagcacgaagctgcaggcgcaggtggagtgcagccacagcagccagcagcggcaggattcgctgagctcggaggtggacaccctgaagcagtcgtgctgggacctggagcgagccatgactgacctgcagaacatgctggaggcaaaaaatgccagcctggcgtcgtccaacaacgacttgcaggtggccgaggagcagtaccagaggcttatggccaaggtagaggacatgcagaggagcatgctcagcaaggacaacacagtgcacgacctgcgacagcagatgacagccttgcagagccagcttcagcaggtgcagctggagcggacgacgctgaccagcaagctgaaggcgtcgcaggcggagatctcgtccctacagagtgtccggcagtggtaccagcagcagctcgccctggcacaggaggcccgcgtcaggctgcagggtgagatggcccacatccaggttggacagatgacccaggctggtatcctggagcacctgaaactcgagaatgtgtccctgtcccagcagctgacggaaactcagcacaggtccatgaaggagaaggggcgcatcgcggcacagctgcagggcattgaggctgacatgttggatcaggaagcagccttcatgcagattcaggaggcaaagacgatggtggaggaggaccttcagaggaggctggaagagtttgaaggtgagagggagcggctgcagaggatggcggactcggcggcatccctggagcagcagctggagcaggtgaagttgactttactccagcgagaccagcagcttgaggctttgcagcaggagcacctggacctgatgaaacagctcaccttgactcaggaggctctgcagagcagggagcagtccctcgatgccctgcagacacactacgatgagctgcaggccaggctgggggagctgcagggcgaggccgcctccagggaggacacgatctgcctcctgcagaacgagaagatcatcttggaggcggctttgcaggcggccaagagtggcaaggaggagcttgacagaggagcaagacgcttggaagaaggtaccgaggaaacgtcggaaactttagagaagttaagagaagaattagctatcaaatccggccaggtggaacacctgcagcaggagactgctgctctgaaaaagcaaatgcaaaaaataaaggaacagtttctccaacaaaaggtgatggtggaggcctaccggcgcgacgccacctccaaagaccagctcatcagtgagctgaaagccaccaggaagaggctggactcggagctgaaggagctgcggcaggagctgatgcaagtgcacggggagaagcggactgccgaggcggagctctcgcgcctgcacagagaggtggcccaggtccgtcagcacatggcggaccttgaagggcatctccagtcggcgcagaaggagcgagacgagatggaaacacacttgcagtcgttgcagttcgataaggagcagatggtcgcggtcacagaggccaatgaggcgctgaagaaacaaatcgaagagttgcagcaagaggcccggaaggccatcacggaacagaagcagaagatgaggcggctgggctcagacttgaccagcgcccagaaggagatgaagaccaaacataaggcctacgagaacgccgtgggcatcctcagccgccgcctgcaggaggccctcgcggccaaggaggctgcggacgcggagctgggccagctccgagcccagggtggcagcagtgacagcagcctggctctacatgaaaggatccaggccctggaggcggagctgcaggctgtcagtcatagcaagacgctgctggaaaaggaactgcaggaggtcatagcgctgaccagccaggagctggaggagtcccgggagaaggtgctggagctggaggacgagcttcaagaatccagaggctttaggaagaagataaaacgccttgaggagtcaaacaagaagttggctcttgaattagagcacgagaaagggaagcttacgggcctcggtcagtccaacgcagctctgcgggaacacaacagcatcctagaaacagctttggccaagagggaggcagacctagtccagttgaaccttcaggtgcaggcagttttgcagcgcaaagaagaggaggatcgccagatgaagcatcttgtccaggccctgcaggcctcactagagaaggagaaggagaaggtgaacagcctcaaggagcaggtggctgctgccaaggtggaagccgggcataaccgccgccacttcaaggcggcctccttggagctgagtgaggtgaagaaggagctgcaggccaaggaacacctggtgcagaagctgcaggccgaggccgacgaccttcagattcgggaggggaaacattcccaggagatagcacagttccaagcagagctggccgaggcccgggcacagctccagctcctgcagaagcagctggacgagcagctcagcaaacagcccgtgggaaaccaagagatggaaaatctcaaatgggaggtggatcagaaagaaagagaaatccagtccttgaagcagcagctggacttgacggagcagcagggcaggaaggaactggaagggctacagcagctgctgcagaacgtcaagtctgagttggagatggcccaggaagacctgtccatgacccagaaggataaatttatgctccaggcaaaagtgtcggagctgaagaacaacatgaagaccctgctccagcagaaccagcagctcaagctggacctacgccgcggcgcggccaagacgagaaaggagccgaaaggcgaggccagctcttccaaccctgccacgcccatcaagatcccggactgcccagttcccgcctcgctgctggaggagctgctgagaccaccgcccgccgtgagcaaggagcccctcaagaacctgaacagctgcctccagcagctcaagcaggagatggacagcctgcagcgccagatggaggagcacgccctgacggtgcacgagtctctgtcctcgtggacgccgctggagccagccactgccagccctgtgcccccggggggtcacgccggcccacgcggcgacccacagagacacagtcagagcagggcttccaaagaagggccgggagagtgactgctgtggactcgcctccgtgcgccgctgccccagaaggctcttatcaatgttatttatttgattgtgtggtcgatgtttttctaagacatgaaatttaagttttgttttgcctttaacaagaagtaaaatatatagcagaatgagagccaaggactagaaaaacattcgaagatcacaattagcttttcacatggaatgaccaactcttaaaagcctgataggctctcggcgaggagctttgaacgtgtctgaagggttacttgtaggtcgtggcttctgagcggccaccgatgctgctctctgcgggtgacagggagaggctgcgtaactgggagcagctgtgtgacagggtctgcggcaccgcgcctggccaggccggctgcagtttctcacttccctgttccattcagtaagagctttacttttccgcagaaatgaaattttatctgtacctttggctttttacttgttttttttgatagccatcccaccataggatgtgtacatagatactgaatatcataatccaatctttgtttttttttttttttttttttgagacagagtctcgctttgttgcccaggctggagtgcagtggcacactctccgctcactgcaagctccgcctcccaggttcatgcgattctcctgcctcagcctctcgagtagctgggattacaggtgcccgccaccacaccagcctaatttttgtatttttagaggggtggagttccaccatgttggccaggctggtcttgaactcttgacctcaggtgatcctgagcctcagcctcccaaagtgctggaattataggcgtgaaccaccgcccccggctgcagttggatttttaaattgcttttttttattgttgaggtttttttatctccaagggactctcccggcacttctaccttccagagttacttcagtgcataaagtttgaattattttgttcttgtgggcagaagtgggaatgatggaatatcctcacggaaaaggcagtgaagttgggagtactgcttacaaaacagggtcaccagtgcattatgtggcgtgttcatccccacgccgtgtgtcacgggctagggcggcgtgttcatccccacaccgtgtgtcacaacaggctagggcacttcacgatgtcactacttgtttttctgacgttccaaaaacaacgtaacttggttttcatgtgtttttccgtggtatatgtgagattgatgctacgggtcttacggactcacacccgttcccactctctgcaatatggatcaggcagtgtttctgataggatgtgaaatggactctcctcgggtgggtccagcaggggccctgcccaccagaacacagtccgtgctgtgctgcgctaaggagctggccctcaactctccttggtgcagggttcccacaaccgagttctagttccctgaggtctttaaaaacaaaaacagaatgttgtacgtgaagattctaggaggggagggaccagcaaatctgagagaaccgtcctggggcctcccttcgaggagccctctgatgtgaggagggacttgagttgagtgacgctgtggtgtgaggtgttctgagctcactgaccggaaggtccaggtgaatctcgtcataagtgatctcaggctctcacaggatccggagggaaatgtgttagagggtctggaaaattcagtgcttttgagttacttgtttttattaaaaatttcctcacaaaagagagtcctcaagttgtggctgttcttgggaaaggggtcaccgtgtctgacaaagtgtaactttaaaaagcacgttgattttttacaaatgtaagtgtgcttgggaattccttaaattttgtgcaataaactattttttggtaaagat

SEQ ID NO: 451081 - DNA, 4403 bp, Homo sapiens
agccatcagtgtaatgtctgtgtagttgcatccccctcctggagccctcagtgtaacatctgtgtagatgtgtccccctgctgtagccctcagtgtaatattcatgcacatgcatccccctcttggagccctcagtgtaacatctgtgcagacacattcccctcctatagtcctcagtgtaacaactctgcagatgtgtcctttcctggagccctcagtgtaacatctctgcagatgtgtccccttctggagccctcagtgtaacaactctgcagatgtgtcctttcctggagctctcagtgtaacatcgctgcagatgtggccccttctggagccctcagtgtaacatctctgcagatgtggcccctcctggagccctcagtgtaacatctgtgtagatgtgtccccctgctgtagccttcagtgtaacatctgtgcagacagattcccctcctggagccgtcagtgtaatgtctgtgcacatgtctcccacaggtggaacacctgcagcaggagactgctgctctgaaaaagcaaatgcaaaaaataaaggaacagtttctccaacaaaaggtgatggtggaggcctaccggcgcgacgccacctccaaagaccagctcatcagtgagctgaaagccaccaggaagaggctggactcggagctgaaggagctgcggcaggagctgatgcaagtgcacggggagaagcggactgccgaggcggagctctcgcgcctgcacagagaggtggcccaggtccgtcagcacatggcggaccttgaagggcatctccagtcggcgcagaaggagcgagacgagatggaaacacacttgcagtcgttgcagttcgataaggagcagatggtcgcggtcacagaggccaatgaggcgctgaagaaacaaatcgaagagttgcagcaagaggcccggaaggccatcacggaacagaagcagaagatgaggcggctgggctcagacttgaccagcgcccagaaggagatgaagaccaaacataaggcctacgagaacgccgtgggcatcctcagccgccgcctgcaggaggccctcgcggccaaggaggctgcggacgcggagctgggccagctccgagcccagggtggcagcagtgacagcagcctggctctacatgaaaggatccaggccctggaggcggagctgcaggctgtcagtcatagcaagacgctgctggaaaaggaactgcaggaggtcatagcgctgaccagccaggagctggaggagtcccgggagaaggtgctggagctggaggacgagcttcaagaatccagaggctttaggaagaagataaaacgccttgaggagtcaaacaagaagttggctcttgaattagagcacgagaaagggaagcttacgggcctcggtcagtccaacgcagctctgcgggaacacaacagcatcctagaaacagctttggccaagagggaggcagacctagtccagttgaaccttcaggtgcaggcagttttgcagcgcaaagaagaggaggatcgccagatgaagcatcttgtccaggccctgcaggcctcactagagaaggagaaggagaaggtgaacagcctcaaggagcaggtggctgctgccaaggtggaagccgggcataaccgccgccacttcaaggcggcctccttggagctgagtgaggtgaagaaggagctgcaggccaaggaacacctggtgcagaagctgcaggccgaggccgacgaccttcagattcgggaggggaaacattcccaggagatagcacagttccaagcagagctggccgaggcccgggcacagctccagctcctgcagaagcagctggacgagcagctcagcaaacagcccgtgggaaaccaagagatggaaaatctcaaatgggaggtggatcagaaagaaagagaaatccagtccttgaagcagcagctggacttgacggagcagcagggcaggaaggaactggaagggctacagcagctgctgcagaacgtcaagtctgagttggagatggcccaggaagacctgtccatgacccagaaggataaatttatgctccaggcaaaagtgtcggagctgaagaacaacatgaagaccctgctccagcagaaccagcagctcaagctggacctacgccgcggcgcggccaagacgagaaaggagccgaaaggcgaggccagctcttccaaccctgccacgcccatcaagatcccggactgcccagttcccgcctcgctgctggaggagctgctgagaccaccgcccgccgtgagcaaggagcccctcaagaacctgaacagctgcctccagcagctcaagcaggagatggacagcctgcagcgccagatggaggagcacgccctgacggtgcacgagtctctgtcctcgtggacgccgctggagccagccactgccagccctgtgcccccggggggtcacgccggcccacgcggcgacccacagagacacagtcagagcagggcttccaaagaagggccgggagagtgactgctgtggactcgcctccgtgcgccgctgccccagaaggctcttatcaatgttatttatttgattgtgtggtcgatgtttttctaagacatgaaatttaagttttgttttgcctttaacaagaagtaaaatatatagcagaatgagagccaaggactagaaaaacattcgaagatcacaattagcttttcacatggaatgaccaactcttaaaagcctgataggctctcggcgaggagctttgaacgtgtctgaagggttacttgtaggtcgtggcttctgagcggccaccgatgctgctctctgcgggtgacagggagaggctgcgtaactgggagcagctgtgtgacagggtctgcggcaccgcgcctggccaggccggctgcagtttctcacttccctgttccattcagtaagagctttacttttccgcagaaatgaaattttatctgtacctttggctttttacttgttttttttgatagccatcccaccataggatgtgtacatagatactgaatatcataatccaatctttgtttttttttttttttttttttgagacagagtctcgctttgttgcccaggctggagtgcagtggcacactctccgctcactgcaagctccgcctcccaggttcatgcgattctcctgcctcagcctctcgagtagctgggattacaggtgcccgccaccacaccagcctaatttttgtatttttagaggggtggagttccaccatgttggccaggctggtcttgaactcttgacctcaggtgatcctgagcctcagcctcccaaagtgctggaattataggcgtgaaccaccgcccccggctgcagttggatttttaaattgcttttttttattgttgaggtttttttatctccaagggactctcccggcacttctaccttccagagttacttcagtgcataaagtttgaattattttgttcttgtgggcagaagtgggaatgatggaatatcctcacggaaaaggcagtgaagttgggagtactgcttacaaaacagggtcaccagtgcattatgtggcgtgttcatccccacgccgtgtgtcacgggctagggcggcgtgttcatccccacaccgtgtgtcacaacaggctagggcacttcacgatgtcactacttgtttttctgacgttccaaaaacaacgtaacttggttttcatgtgtttttccgtggtatatgtgagattgatgctacgggtcttacggactcacacccgttcccactctctgcaatatggatcaggcagtgtttctgataggatgtgaaatggactctcctcgggtgggtccagcaggggccctgcccaccagaacacagtccgtgctgtgctgcgctaaggagctggccctcaactctccttggtgcagggttcccacaaccgagttctagttccctgaggtctttaaaaacaaaaacagaatgttgtacgtgaagattctaggaggggagggaccagcaaatctgagagaaccgtcctggggcctcccttcgaggagccctctgatgtgaggagggacttgagttgagtgacgctgtggtgtgaggtgttctgagctcactgaccggaaggtccaggtgaatctcgtcataagtgatctcaggctctcacaggatccggagggaaatgtgttagagggtctggaaaattcagtgcttttgagttacttgtttttattaaaaatttcctcacaaaagagagtcctcaagttgtggctgttcttgggaaaggggtcaccgtgtctgacaaagtgtaactttaaaaagcacgttgattttttacaaatgtaagtgtgcttgggaattccttaaattttgtgcaataaactattttttggtaaagat

SEQ ID NO: 451082 - DNA, 6112 bp, Homo sapiens
cacgtctccgccggagcatccgggccgggcggcctccggggctgccagagcagcaggagactgggtgtgttgctgtattgcccaggctggtgtggaactcctggcctcaagcgatcctcccaccccagcctcccaaagtgctggtgttacaggcagtataccttaaatggcaagaaggaaataaatcatctgacatcactcagattgaagaggagctttttttcccccgattgccttaagaagtagcatactttcccaagtatcatgatattagctggtttgacatcaagtcatttgtgagtcatcagatcttctcctgaaaatgggagacacagtagggcccctcccaggagctcttggctgttgctgatggcagaagccaagcttgtccaaggttcacttgtagcccctcagcgtcagctcagctggtgtcgtcctgaccatggacggcgcgtcggccgagcaagatggcctccaggaggacagatcccacagtggcccctcgtctctccccgaggccccactgaagcccccgggcccactggtgccacctgaccagcaggacaaagtccagtgtgccgaggtaaacagagcatccacggaaggggaaagcccggatggacctggccagggaggcctctgtcagaacgggccaacgccacccttcccagaccctccgtcgtctctcgatcccaccacaagcccagtgggccctgatgcctctccaggctctacagattctcccctgcccctggagaaggaggagcaggtccgacttcaggctcggaagtggctggaagagcagctcaaacagtacagggtgaagcgccagcaggagaggtccagtcaacctgcaaccaaaacgagactttttagcacgcttgatcctgagctcatgttaaacccagaaaacttaccaagggccagtaccctggctatgacaaaagaatattccttcctgcgcaccagtgtccctcgggggcctaaggtgggcagcctggggcttccggcacatcctagggagaaaaaaacttccaaatcaagcaaaatccggtctctggccgattacagaactgaagattcaaatgcggggaattctgggggaaatgtcccggctcccgattctaccaagggttccctgaagcagaacagaagcagtgcggcgtccgttgtgtctgagatcagcctgtcccccgacactgacgaccgtctggagaacacctccctggctggagacagcgtgtctgaggtggatggaaatgacagcgacagctcatcgtacagcagcgcctccacccgagggacctatggcattctgtcgaagacagtgggcacgcaggacaccccctatatggtcaacggccaggagattcctgcggataccctgggccagttcccctccattaaggacgtcctccaggccgcagccgctgagcaccaagaccaggggcaggaggtcaacggggaggtgcggagtcggagagacagcatctgcagcagcgtgtccttggagagctctgcagcagaaacacaggaggagatgctgcaggtgctcaaagagaaaatgcgactcgaaggacagctggaagccttgtcactggaggcgagtcaggcacttaaagagaaggctgagctgcaggcccagctggccgccctcagcacgaagctgcaggcgcaggtggagtgcagccacagcagccagcagcggcaggattcgctgagctcggaggtggacaccctgaagcagtcgtgctgggacctggagcgagccatgactgacctgcagaacatgctggaggcaaaaaatgccagcctggcgtcgtccaacaacgacttgcaggtggccgaggagcagtaccagaggcttatggccaaggtagaggacatgcagaggagcatgctcagcaaggacaacacagtgcacgacctgcgacagcagatgacagccttgcagagccagcttcagcaggtgcagctggagcggacgacgctgaccagcaagctgaaggcgtcgcaggcggagatctcgtccctacagagtgtccggcagtggtaccagcagcagctcgccctggcacaggaggcccgcgtcaggctgcagggtgagatggcccacatccaggttggacagatgacccaggctggtatcctggagcacctgaaactcgagaatgtgtccctgtcccagcagctgacggaaactcagcacaggtccatgaaggagaaggggcgcatcgcggcacagctgcagggcattgaggctgacatgttggatcaggaagcagccttcatgcagattcaggaggcaaagacgatggtggaggaggaccttcagaggaggctggaagagtttgaaggtgagagggagcggctgcagaggatggcggactcggcggcatccctggagcagcagctggagcaggtgaagttgactttactccagcgagaccagcagcttgaggctttgcagcaggagcacctggacctgatgaaacagctcaccttgactcaggaggctctgcagagcagggagcagtccctcgatgccctgcagacacactacgatgagctgcaggccaggctgggggagctgcagggcgaggccgcctccagggaggacacgatctgcctcctgcagaacgagaagatcatcttggaggcggctttgcaggcggccaagagtggcaaggaggagcttgacagaggagcaagacgcttggaagaaggtaccgaggaaacgtcggaaactttagagaagttaagagaagaattagctatcaaatccggccaggtggaacacctgcagcaggagactgctgctctgaaaaagcaaatgcaaaaaataaaggaacagtttctccaacaaaaggtgatggtggaggcctaccggcgcgacgccacctccaaagaccagctcatcagtgagctgaaagccaccaggaagaggctggactcggagctgaaggagctgcggcaggagctgatgcaagtgcacggggagaagcggactgccgaggcggagctctcgcgcctgcacagagaggtggcccaggtccgtcagcacatggcggaccttgaagggcatctccagtcggcgcagaaggagcgagacgagatggaaacacacttgcagtcgttgcagttcgataaggagcagatggtcgcggtcacagaggccaatgaggcgctgaagaaacaaatcgaagagttgcagcaagaggcccggaaggccatcacggaacagaagcagaagatgaggcggctgggctcagacttgaccagcgcccagaaggagatgaagaccaaacataaggcctacgagaacgccgtgggcatcctcagccgccgcctgcaggaggccctcgcggccaaggaggctgcggacgcggagctgggccagctccgagcccagggtggcagcagtgacagcagcctggctctacatgaaaggatccaggccctggaggcggagctgcaggctgtcagtcatagcaagacgctgctggaaaaggaactgcaggaggtcatagcgctgaccagccaggagctggaggagtcccgggagaaggtgctggagctggaggacgagcttcaagaatccagaggctttaggaagaagataaaacgccttgaggagtcaaacaagaagttggctcttgaattagagcacgagaaagggaagcttacgggcctcggtcagtccaacgcagctctgcgggaacacaacagcatcctagaaacagctttggccaagagggaggcagacctagtccagttgaaccttcaggtgcaggcagttttgcagcgcaaagaagaggaggatcgccagatgaagcatcttgtccaggccctgcaggcctcactagagaaggagaaggagaaggtgaacagcctcaaggagcaggtggctgctgccaaggtggaagccgggcataaccgccgccacttcaaggcggcctccttggagctgagtgaggtgaagaaggagctgcaggccaaggaacacctggtgcagaagctgcaggccgaggccgacgaccttcagattcgggaggggaaacattcccaggagatagcacagttccaagcagagctggccgaggcccgggcacagctccagctcctgcagaagcagctggacgagcagctcagcaaacagcccgtgggaaaccaagagatggaaaatctcaaatgggaggtggatcagaaagaaagagaacgtcaagtctgagttggagatggcccaggaagacctgtccatgacccagaaggctcttatcaatgttatttatttgattgtgtggtcgatgtttttctaagacatgaaatttaagttttgttttgcctttaacaagaagtaaaatatatagcagaatgagagccaaggactagaaaaacattcgaagatcacaattagcttttcacatggaatgaccaactcttaaaagcctgataggctctcggcgaggagctttgaacgtgtctgaagggttacttgtaggtcgtggcttctgagcggccaccgatgctgctctctgcgggtgacagggagaggctgcgtaactgggagcagctgtgtgacagggtctgcggcaccgcgcctggccaggccggctgcagtttctcacttccctgttccattcagtaagagctttacttttccgcagaaatgaaattttatctgtacctttggctttttacttgttttttttgatagccatcccaccataggatgtgtacatagatactgaatatcataatccaatctttgtttttttttttttttttttttgagacagagtctcgctttgttgcccaggctggagtgcagtggcacactctccgctcactgcaagctccgcctcccaggttcatgcgattctcctgcctcagcctctcgagtagctgggattacaggtgcccgccaccacaccagcctaatttttgtatttttagaggggtggagttccaccatgttggccaggctggtcttgaactcttgacctcaggtgatcctgagcctcagcctcccaaagtgctggaattataggcgtgaaccaccgcccccggctgcagttggatttttaaattgcttttttttattgttgaggtttttttatctccaagggactctcccggcacttctaccttccagagttacttcagtgcataaagtttgaattattttgttcttgtgggcagaagtgggaatgatggaatatcctcacggaaaaggcagtgaagttgggagtactgcttacaaaacagggtcaccagtgcattatgtggcgtgttcatccccacgccgtgtgtcacgggctagggcggcgtgttcatccccacaccgtgtgtcacaacaggctagggcacttcacgatgtcactacttgtttttctgacgttccaaaaacaacgtaacttggttttcatgtgtttttccgtggtatatgtgagattgatgctacgggtcttacggactcacacccgttcccactctctgcaatatggatcaggcagtgtttctgataggatgtgaaatggactctcctcgggtgggtccagcaggggccctgcccaccagaacacagtccgtgctgtgctgcgctaaggagctggccctcaactctccttggtgcagggttcccacaaccgagttctagttccctgaggtctttaaaaacaaaaacagaatgttgtacgtgaagattctaggaggggagggaccagcaaatctgagagaaccgtcctggggcctcccttcgaggagccctctgatgtgaggagggacttgagttgagtgacgctgtggtgtgaggtgttctgagctcactgaccggaaggtccaggtgaatctcgtcataagtgatctcaggctctcacaggatccggagggaaatgtgttagagggtctggaaaattcagtgcttttgagttacttgtttttattaaaaatttcctcacaaaagagagtcctcaagttgtggctgttcttgggaaaggggtcaccgtgtctgacaaagtgtaactttaaaaagcacgttgattttttacaaatgtaagtgtgcttgggaattccttaaattttgtgcaataaactattttttggtaaagat

SEQ ID NO: 451083 - DNA, 4385 bp, Homo sapiens
  misc_feature (4250)..(4250): n is a, c, g, or t
gagcaaggaagattcaggacaggggactccgcggctttgcaggcggccaagagtggcaaggaggagcttgacagaggagcaagacgcttggaagaaggtaccgaggaaacgtcggaaactttagagaagttaagagaagaattagctatcaaatccggccaggtggaacacctgcagcaggagactgctgctctgaaaaagcaaatgcaaaaaataaaggaacagtttctccaacaaaaggtgatggtggaggcctaccggcgcgacgccacctccaaagaccagctcatcagtgagctgaaagccaccaggaagaggctggactcggagctgaaggagctgcggcaggagctgatgcaagtgcacggggagaagcggactgccgaggcggagctctcgcgcctgcacagagaggtggcccaggtccgtcagcacatggcggaccttgaagggcatctccagtcggcgcagaaggagcgagacgagatggaaacacacttgcagtcgttgcagttcgataaggagcagatggtcgcggtcacagaggccaatgaggcgctgaagaaacaaatcgaagagttgcagcaagaggcccggaaggccatcacggaacagaagcagaagatgaggcggctgggctcagacttgaccagcgcccagaaggagatgaagaccaaacataaggcctacgagaacgccgtgggcatcctcagccgccgcctgcaggaggccctcgcggccaaggaggctgcggacgcggagctgggccagctccgagcccagggtggcagcagtgacagcagcctggctctacatgaaaggatccaggccctggaggcggagctgcaggctgtcagtcatagcaagacgctgctggaaaaggaactgcaggaggtcatagcgctgaccagccaggagctggaggagtcccgggagaaggtgctggagctggaggacgagcttcaagaatccagaggctttaggaagaagataaaacgccttgaggagtcaaacaagaagttggctcttgaattagagcacgagaaagggaagcttacgggcctcggtcagtccaacgcagctctgcgggaacacaacagcatcctagaaacagctttggccaagagggaggcagacctagtccagttgaaccttcaggtgcaggcagttttgcagcgcaaagaagaggaggatcgccagatgaagcatcttgtccaggccctgcaggcctcactagagaaggagaaggagaaggtgaacagcctcaaggagcaggtggctgctgccaaggtggaagccgggcataaccgccgccacttcaaggcggcctccttggagctgagtgaggtgaagaaggagctgcaggccaaggaacacctggtgcagaagctgcaggccgaggccgacgaccttcagattcgggaggggaaacattcccaggagatagcacagttccaagcagagctggccgaggcccgggcacagctccagctcctgcagaagcagctggacgagcagctcagcaaacagcccgtgggaaaccaagagatggaaaatctcaaatgggaggtggatcagaaagaaagagaaatccagtccttgaagcagcagctggacttgacggagcagcagggcaggaaggaactggaagggctacagcagctgctgcagaacgtcaagtctgagttggagatggcccaggaagacctgtccatgacccagaaggataaatttatgctccaggcaaaagtgtcggagctgaagaacaacatgaagaccctgctccagcagaaccagcagctcaagctggacctacgccgcggcgcggccaagacgagaaaggagccgaaaggcgaggccagctcttccaaccctgccacgcccatcaagatcccggactgcccagttcccgcctcgctgctggaggagctgctgagaccaccgcccgccgtgagcaaggagcccctcaagaacctgaacagctgcctccagcagctcaagcaggagatggacagcctgcagcgccagatggaggagcacgccctgacggtgcacgagtctctgtcctcgtggacgccgctggagccagccactgccagccctgtgcccccggggggtcacgccggcccacgcggcgacccacagagacacagtcagagcagggcttccaaagaagggccgggagagtgactgctgtggactcgcctccgtgcgccgctgccccagaaggctcttatcaatgttatttatttgattgtgtggtcgatgtttttctaagacatgaaatttaagttttgttttgcctttaacaagaagtaaaatatatagcagaatgagagccaaggactagaaaaacattcgaagatcacaattagcttttcacatggaatgaccaactcttaaaagcctgataggctctcggcgaggagctttgaacgtgtctgaagggttacttgtaggtcgtggcttctgagcggccaccgatgctgctctctgcgggtgacagggagaggctgcgtaactgggagcagctgtgtgacagggtctgcggcaccgcgcctggccaggccggctgcagtttctcacttccctgttccattcagtaagagctttacttttccgcagaaatgaaattttatctgtacctttggctttttacttgttttttttgatagccatcccaccataggatgtgtacatagatactgaatatcataatccaatctttgtttttttttttttttttttttgagacagagtctcgctttgttgcccaggctggagtgcagtggcacactctccgctcactgcaagctccgcctcccaggttcatgcgattctcctgcctcagcctctcgagtagctgggattacaggtgcccgccaccacaccagcctaatttttgtatttttagaggggtggagttccaccatgttggccaggctggtcttgaactcttgacctcaggtgatcctgagcctcagcctcccaaagtgctggaattataggcgtgaaccaccgcccccggctgcagttggatttttaaattgcttttttttattgttgaggtttttttatctccaagggactctcccggcacttctaccttccagagttacttcagtgcataaagtttgaattattttgttcttgtgggcagaagtgggaatgatggaatatcctcacggaaaaggcagtgaagttgggagtactgcttacaaaacagggtcaccagtgcattatgtggcgtgttcatccccacgccgtgtgtcacgggctagggcggcgtgttcatccccacaccgtgtgtcacaacaggctagggcacttcacgatgtcactacttgtttttctgacgttccaaaaacaacgtaacttggttttcatgtgtttttccgtggtatatgtgagattgatgctacgggtcttacggactcacacccgttcccactctctgcaatatggatcaggcagtgtttctgataggatgtgaaatggactctcctcgggtgggtccagcaggggccctgcccaccagaacacagtccgtgctgtgctgcgctaaggagctggccctcaactctccttggtgcagggttcccacaaccgagttctagttccctgaggtctttaaaaacaaaaacagaatgttgtacgtgaagattctaggaggggagggaccagcaaatctgagagaaccgtcctggggcctcccttcgaggagccctctgatgtgaggagggacttgagttgagtgacgctgtggtgtgaggtgttctgagctcactgaccggaaggtccaggtgaatctcgtcataagtgatctcaggctctcacaggatccggagggaaatgtgttagagggtctggaaaattcagtgcttttgagttacttgtttttattaaaaatttcctcacaaaagagagtcctcaagttgtggctgttcttgggaaaggggtcaccgtgtctgacaaagtgtaactttaaaaagcacgttgattttttacaaatgtaagtgtgcttgggaattccttaaattttgtgcaataaactattttttggtaaagataaaaaaaaaaaaaccggggctcattttcgggggggggaaaaaaggggtattggaagtggcccttggtccttacgttgttccctggaccacgttttcttgggacagggtggcagatcgccggcccccaagaggaggccattaatacagaagcagtaaccgagtttggtctcgcaccaaaanacacaaccacgatacacacagcgacactacaacaaacggtcacaatacacagcacgaatcatacacaaacaacactgaaccacgaacagaaagtacaacaaatcaacatcacacacatgaacatacccggacaag

SEQ ID NO: 451084 - DNA, 1206 bp, Homo sapiens
cacgtctccgccggagcatccgggccgggcggcctccggggctgccagagcagcaggagactgggtgtgttgctgtattgcccaggctggtgtggaactcctggcctcaagcgatcctcccaccccagcctcccaaagtgctggtgttacaggcagtataccttaaatggcaagaaggaaataaatcatctgacatcactcagattgaagaggagctttttttcccccgattgccttaagaagtagcatactttcccaagtatcatgatattagctggtttgacatcaagtcatttgtgagtcatcagatcttctcctgaaaatgggagacacagtagggcccctcccaggagctcttggctgttgctgatggcagaagccaagcttgtccaaggttcacttgtagcccctcagcgtcagctcagctggtgtcgtcctgaccatggacggcgcgtcggccgagcaagatggcctccaggaggacagatcccacagtggcccctcgtctctccccgaggccccactgaagcccccgggcccactggtgccacctgaccagcaggacaaagtccagtgtgccgaggtaaacagagcatccacggaaggggaaagcccggatggacctggccagggaggcctctgtcagaacgggccaacgccacccttcccagaccctccgtcgtctctcgatcccaccacaagcccagtgggccctgatgcctctccaggctctacagattctcccctgcccctggagaaggaggagcaggtccgacttcaggctcggaagtggctggaagagcagctcaaacagtacagggtgaagcgccagcaggagagggtgagtctccctctcccgaacaagctcatggaaagcttcctgtgccagagacaactgttggtcccacataacccggggacctgccattggcttctctgagctgccatgggctcaggggcaacaagcacattttatttctaaatctgccaattgaaaagcaaagaaagcaaacacgggtgacctcagaggtactgtgggttcagttctggaccaccacaaaaatgtaaacattgcaataaagcaagtcctacaatgtttttggtttcctagtgcataaagaagttatgtgtatacgctactgtagtttactaagtgtgcagtagcactgtgtctaaataaaactgatgtacccacattaaaatgaa

SEQ ID NO: 451085 - DNA, 487 bp, Homo sapiens
tttgcagcgcaaagaagaggaggatcgccagatgaagcatcttgtccaggccctgcaggcctcactagagaaggagaaggagaaggtgaacagcctcaaggagcaggtgcgtgccaccttccgtctcacagggcgttccagaggacgctccagtgcctagaaatctatgcagggtccttcacacaccagcctccttccagcagttacacagagcaaaggtgtgttgcagttgttggtgacggaggccgcagagcacctgctctggtccgtagaaggtggcgttagattaaatggcagtgcagctgtgagggcctggggccaatgagctccgcgtgcatgtgtatttatattgtgctgggagtggtgtcctgtatgtcgtgttgcattgcaaaagcaaacttgagaatagcatatgatcccatttgtgttcggcagataagaggggtggttctgtggacccttctctgtgtagagagctgtcttttcg

SEQ ID NO: 451086 - DNA, 1499 bp, Homo sapiens
gcgacgcattcggcatgaggggtcacgtggtggctgggccggggaaatggcggcttcaggagagagcgggacttcaggcggcggaggcagcaccgaggaagcatttatgaccttctacagtgaggtgaaacaaatagagaagagagactcggttctaacttcgaaaaatcagattgaaagactgacccgtcctggttcctcttacttcaatttgaacccatttgaggttcttcagatagatcctgaagttacagatgaagaaataaaaaagaggtttcggcagttatccatcttggtgcatcctgacaaaaatcaagatgatgctgacagagcacaaaaggcttttgaagctgtggacaaagcttacaagttgctactggatcaggagcaaaagaagagggccctggatgtaattcaggcaggaaaagaatacgtggaacacactgtgaaagagcgaaaaaaacaattaaagaaggaaggaaaacctacaattgtagaggaggatgatcctgagctgttcaaacaagctgtatataaacagacaatgaaactctttgcagagctggaaattaaaaggaaagagagagaagccaaagagatgcatgaaaggaaacgacaaagggaagaagagattgaagctcaagaaaaagccaaacgggaaagagagtggcagaaaaactttgaggaaagtcgagatggtcgtgtggacagctggcgaaacttccaagccaatacgaaggggaagaaagagaagaaaaatcggaccttcctgagaccaccgaaagtaaaaatggagcaacgtgagtgaccgcccaaggtcacaggcacagaacctttcccctgctatctcccttcctgcttcgaaggactcattctttcctcccacttccaccccaacatagagtagtatttgctttttagtccattttgttttcaatacgatttaatatcgatcagagtaattcttttgtacattgaaatgaggggcttggtttaaaaaaagacctttccctctccctgcccctagaacaaccagtattagaaggtgccaccattggtgctgccttctcttcccacagcctgtaactcagtgttttgtacttcactgaattgtgatggttagaaacttcgtggatagtttgtggaaatcatccaattaaacatactgcttaaaacagtgttgctgtgacttcagagacaagcctggaaggggcaccttaggaagccccttcgcttcagttgctcgcttctgggtgtgctcccttcgaaggcccagataagacagggaacacttgtgagcacacagagcagcatctgatgccctgtggtgtttggcatgtgccccctgtctactgaccaatcagtgtggcatgaggcccacgccacccaaacctttcactttccaaagagctagccgtcctccacccagtaccatgtcctagcctgtctgcatttgttagtggtaatattctttatgtataataaatttttatacccaa

SEQ ID NO: 451087 - DNA, 755 bp, Homo sapiens
  misc_feature (446)..(446): n is a, c, g, or t
  misc_feature (450)..(450): n is a, c, g, or t
  misc_feature (452)..(452): n is a, c, g, or t
  misc_feature (457)..(457): n is a, c, g, or t
  misc_feature (470)..(470): n is a, c, g, or t
  misc_feature (474)..(474): n is a, c, g, or t
gcgacgcattcggcatgaggggtcacgtggtggctgggccggggaaatggcggcttcaggagagagcgggacttcaggcggcggaggcagcaccgaggaagcatttatgaccttctacagtgaggtgaaacaaatagagaagagagactcggttctaacttcgaaaaatcagattgaaagactgacccgtcctggttcctcttacttcaatttgaacccatttgaggttcttcagatagatcctgaagttacagatgaagaaataaaaaagaggtttcggcagttatccatcttggtgcatcctgacaaaaatcaagatgatgctgacagagcacaaaaggcttttgaagctgtggacaaagcttacaagttgctactggatcaggagcaaaagaagagggccctggatgtaattcaggcaggaaaagaatacgtggaacacactnaaanancaaanaaaaaaaaaaaanaaanaaaaaaaatttttggggggttgggccctgaaagaagagtttttaagaaccacttccgtgggggcgcggcggccccattggtgtaagtgaacacggtgcctagacacctggtccccagaggaaacaccgggggccaggaacagaggcgcgggctatcctccaccaatataaaaaagaccccggggggaacaccgagacggttcgggaacaaatcccaaagggacccgcgaagccaagagggggaccaaccccagagaccccagggactcgaataaaagagcc

SEQ ID NO: 451088 - DNA, 812 bp, Homo sapiens
gcgacgcattcggcatgaggggtcacgtggtggctgggccggggaaatggcggcttcaggagagagcgggacttcaggcggcggaggcagcaccgaggaagcatttatgaccttctacagtgaggaataaagatggcatatagcataccagagattcattccaactagcattccaactctgacagtgacaccaagaatgttttcctgggactgcctggtgcttgttctccctggcattgtcttcaggtgaaacaaatagagaagagagactcggttctaacttcgaaaaatcagattgaaagactgacccgtcctggttcctcttacttcaatttgaacccatttgaggttcttcagatagatcctgaagttacagatgaagaaataaaaaagaggtttcggcagttatccatcttggtgcatcctgacaaaaatcaagatgatgctgacagagcacaaaaggcttttgaaggtatttgtaaatttacctgcttctgagtattagattgtgaatggcagggcctaactgttccttgtcctagatcaagcaaagactgttatagttttgtcttctggtcaccaagaagctgtggttttcagtagagcagttgccatttcaaagcagaatgttgttgtttaagaagtagaccttaactttgctttgttaaaacttttatatgccaacaaagactgttattgcataggatcattttttttctttgaacataaagaattttatcactgaattaaatccagatgtagtgtatttagccttgagtatatatttaattttttccaaggctcttaaggaa

SEQ ID NO: 451089 - DNA, 373 bp, Homo sapiens
taggggcagggagagggaaaggtctttttttaaaccaagcccctcatttcaatgtacaaaagaattactctgatcgatattaaatcgtattgaaaacaaaatggcctaaaaagcaaatacttctctatgttggggtggaagtgggaggaaagaatgagtccttccaagccggaagggagataccaggggaaaggttttgtggtgtttggcatgtgccccctgtctactgaccaatcagtgtggcatgaggcccacgccacccaaacctttcactttccaaagagctagccgtcctccacccagtaccatgtcctagcctgtctgcatttgttagtggtaatattctttatgtataataaatttttatacccaa

SEQ ID NO: 451090 - DNA, 737 bp, Homo sapiens
gcgacgcattcggcatgaggggtcacgtggtggctgggccggggaaatggcggcttcaggagagagcgggacttcaggcggcggaggcagcaccgaggaagcatttatgaccttctacagtgaggaataaagatggcatatagcataccagagattcattccaactagcattccaactctgacagtgacaccaagaatgttttcctgggactgcctggtgcttgttctccctggcattgtcttcaggtgaaacaaatagagaagagagactcggttctaacttcgaaaaatcagattgaaagactgacccgtcctggttcctcttacttcaatttgaacccatttgagtcttcaggataggatcctgaagttaacagaaaaaaaaaaaaaaaaaaaaaaaaaaacacgtgtgtgtggggcgcgccgagggccccccgagagaagagtttcgaaagagacccatcgcgtgggggcgcgcgggggccccaggagggaagggagacaacggggacataagcggggctgcccaagggaaacccggggaccaggacacagggcggggaattgcgcacacaaatataaaaaagacggcccgcgggggacaaaacggaaccgttgccgcgaacacaatccccagatgggcgagtctcgaggggcacaatacagggggacacctaagcaacggagggagtcccagagggaactgcggcgaagcccaatatacagcccggcctcga

SEQ ID NO: 451091 - DNA, 1621 bp, Homo sapiens
gcgacgcattcggcatgaggggtcacgtggtggctgggccggggaaatggcggcttcaggagagagcgggacttcaggcggcggaggcagcaccgaggaagcatttatgaccttctacagtgaggaataaagatggcatatagcataccagagattcattccaactagcattccaactctgacagtgacaccaagaatgttttcctgggactgcctggtgcttgttctccctggcattgtcttcaggtgaaacaaatagagaagagagactcggttctaacttcgaaaaatcagattgaaagactgacccgtcctggttcctcttacttcaatttgaacccatttgaggttcttcagatagatcctgaagttacagatgaagaaataaaaaagaggtttcggcagttatccatcttggtgcatcctgacaaaaatcaagatgatgctgacagagcacaaaaggcttttgaagctgtggacaaagcttacaagttgctactggatcaggagcaaaagaagagggccctggatgtaattcaggcaggaaaagaatacgtggaacacactgtgaaagagcgaaaaaaacaattaaagaaggaaggaaaacctacaattgtagaggaggatgatcctgagctgttcaaacaagctgtatataaacagacaatgaaactctttgcagagctggaaattaaaaggaaagagagagaagccaaagagatgcatgaaaggaaacgacaaagggaagaagagattgaagctcaagaaaaagccaaacgggaaagagagtggcagaaaaactttgaggaaagtcgagatggtcgtgtggacagctggcgaaacttccaagccaatacgaaggggaagaaagagaagaaaaatcggaccttcctgagaccaccgaaagtaaaaatggagcaacgtgagtgaccgcccaaggtcacaggcacagaacctttcccctgctatctcccttcctgcttcgaaggactcattctttcctcccacttccaccccaacatagagtagtatttgctttttagtccattttgttttcaatacgatttaatatcgatcagagtaattcttttgtacattgaaatgaggggcttggtttaaaaaaagacctttccctctccctgcccctagaacaaccagtattagaaggtgccaccattggtgctgccttctcttcccacagcctgtaactcagtgttttgtacttcactgaattgtgatggttagaaacttcgtggatagtttgtggaaatcatccaattaaacatactgcttaaaacagtgttgctgtgacttcagagacaagcctggaaggggcaccttaggaagccccttcgcttcagttgctcgcttctgggtgtgctcccttcgaaggcccagataagacagggaacacttgtgagcacacagagcagcatctgatgccctgtggtgtttggcatgtgccccctgtctactgaccaatcagtgtggcatgaggcccacgccacccaaacctttcactttccaaagagctagccgtcctccacccagtaccatgtcctagcctgtctgcatttgttagtggtaatattctttatgtataataaatttttatacccaa

SEQ ID NO: 451092 - DNA, 1784 bp, Homo sapiens
gcgacgcattcggcatgaggggtcacgtggtggctgggccggggaaatggcggcttcaggagagagcgggacttcaggcggcggaggcagcaccgaggaagcatttatgaccttctacagtgaggtgaaacaaatagagaagagagactcggttctaacttcgaaaaatcagattgaaagactgacccgtcctggttcctcttacttcaatttgaacccatttgaggttcttcagatagatcctgaagttacagatgaagaaataaaaaagaggtttcggcagttatccatcttggtgcatcctgacaaaaatcaagatgatgctgacagagcacaaaaggcttttgaagctgtggacaaagcttacaagttgctactggatcaggagcaaaagaagagggccctggatgtaattcaggcaggaaaagaatacgtggaacacactgtgaaagagcgaaaaaaacaattaaagaaggaaggaaaacctacaattgtagaggaggatgatcctgagctgttcaaacaagctgtatataaacagacaatgaaactctttgcagagctggaaattaaaaggaaagagagagaagccaaagagatgcatgaaaggaaacgacaaagggaagaagagattgaagctcaagaaaaagccaaacgggaaagagagtggcagaaaaactttgaggaaagtcgagatggtcgtgtggacagctggcgaaacttccaagccaatacgaaggggaagaaagagaagaaaaatcggaccttcctgagaccaccgaaagtaaaaatggagcaacgtgagtgaccgcccaaggtcacaggcacagaacctttcccctgctatctcccttcctgcttcgaaggactcattctttcctcccacttccaccccaacatagagtagtatttgctttttagtccattttgttttcaatacgatttaatatcgatcagagtaattcttttgtacattgaaatgaggggcttggtttaaaaaaagacctttccctctccctgcccctagaacaaccagtattagaaggtgccaccattggtgctgccttctcttcccacagcctgtaactcagtgttttgtacttcactgaattgtgatggttagaaacttcgtggatagtttgtggaaatcatccaattaaacatactgcttaaaacagtgttgctgtgacttcagagacaagcctggaaggggcaccttaggaagccccttcgcttcagttgctcgcttctgggtgtgctcccttcgaaggcccagataagacagggaacacttgtgagcacacagagcagcatctgatgccctgtggtgtttggcatgtgccccctgtctactgaccaatcagtgtggcatgaggcccacgccacccaaacctttcactttccaaagagctagccgtcctccacccagtaccatgtcctagcctgtctgcatttgttagtggtaatattctttatgtataataaatttttatacccaagccattgatgtacttttccttgtactctcccttgtgggtcccttgtctggcttggctgaaccccaaaatgctttggggttggacagacctggctgaaccttagtttcttcatctatgaaatgggaatatgaattactgcagcagcttttagggcagatttgccatggcatatacaaggtaactaccatagtgctccttgggtattgccaatatcctattatttctgtgtaaaatgaagatactgattgttttgaggattaaatgaagtaatatatgaaaaaaaaa

SEQ ID NO: 451093 - DNA, 2031 bp, Homo sapiens
gcgacgcattcggcatgaggggtcacgtggtggctgggccggggaaatggcggcttcaggagagagcgggacttcaggcggcggaggcagcaccgaggaagcatttatgaccttctacagtgaggtgaaacaaatagagaagagagactcggttctaacttcgaaaaatcagattgaaagactgacccgtcctggttcctcttacttcaatttgaacccatttgaggttcttcagatagatcctgaagttacagatgaagaaataaaaaagaggtttcggcagttatccatcttggtgcatcctgacaaaaatcaagatgatgctgacagagcacaaaaggcttttgaagctgtggacaaagcttacaagttgctactggatcaggagcaaaagaagagggccctggatgtaattcaggcaggaaaagaatacgtggaacacactgtgaaagagcgaaaaaaacaattaaagaaggaaggaaaacctacaattgtagaggaggatgatcctgagctgttcaaacaagctgtatataaacagacaatgaaactctttgcagagctggaaattaaaaggaaagagagagaagccaaagagatgcatgaaaggaaacgacaaagggaagaagagattgaagctcaagaaaaagccaaacgggaaagagagtggcagaaaaactttgaggaaagtcgagatggtcgtgtggacagctggcgaaacttccaagccaatacgaaggggaagaaagagaagaaaaatcggaccttcctgagaccaccgaaagtaaaaatggagcaacgtgagtgaccgcccaaggtcacaggcacagaacctttcccctgctatctcccttcctgcttcgaaggactcattctttcctcccacttccaccccaacatagagtagtatttgctttttagtccattttgttttcaatacgatttaatatcgatcagagtaattcttttgtacattgaaatgaggggcttggtttaaaaaaagacctttccctctccctgcccctagaacaaccagtattagaaggtgccaccattggtgctgccttctcttcccacagcctgtaactcagtgttttgtacttcactgaattgtgatggttagaaacttcgtggatagtttgtggaaatcatccaattaaacatactgcttaaaacagtgttgctgtgacttcagagacaagcctggaaggggcaccttaggaagccccttcgcttcagttgctcgcttctgggtgtgctcccttcgaaggcccagataagacagggaacacttgtgagcacacagagcagcatctgatgccctgtggtgtttggcatgtgccccctgtctactgaccaatcagtgtggcatgaggcccacgccacccaaacctttcactttccaaagagctagccgtcctccacccagtaccatgtcctagcctgtctgcatttgttagtggtaatattctttatgtataataaatttttatacccaaaaaaaaaaaaaaaaaaaaaaaaaaaaaacggggggctttaattgggggggggaaaaaaggggtatagaaggggcagggggtccaacatagcgtgtttctcactgaaccccaggtcttcgttgttacaagagggggagaaaatcgacgaggatcaacccaatagggggagcgatctaaaatgcgcaatagggcccggtttaccccgggatttagtggattccaccacaggcgagacggaacagacgcgagaagacacacgagcggagaaccaggggagcacaccaacaggaagaaaacgcggagaaggcagaaagaaacaagaagacggaaagaaaagaaagacgccacaaaaaatgacaaaagagaaaaggaacgaagaaaagaaacgacaagagaagcgaggaagaagaaagagaacgacgacagaaagagagcgcggaaaaggcactgaaggacagtgaggcaaaaagacgcagaagaggaacagcaacagagaagaaggcagaaagcagcagaacaccaccagcacaca

SEQ ID NO: 451094 - DNA, 1517 bp, Homo sapiens
gcgacgcattcggcatgaggggtcacgtggtggctgggccggggaaatggcggcttcaggagagagcgggacttcaggcggcggaggcagcaccgaggaagcatttatgaccttctacagtgaggtgaaacaaatagagaagagagactcggttctaacttcgaaaaatcagattgaaagactgacccgtcctggttcctcttacttcaatttgaacccatttgaggttcttcagatagatcctgaagttacagatgaagaaataaaaaagaggtttcggcagttatccatcttggtgcatcctgacaaaaatcaagatgatgctgacagagcacaaaaggcttttgaagctgtggacaaagcttacaagttgctactggatcaggagcaaaagaagagggccctggatgtaattcaggcaggaaaagaatacgtggaacacactgtgaaagagcgaaaaaaacaattaaagaaggaaggaaaacctacaattgtagaggaggatgatcctgagctgttcaaacaagctgtatataaacagacaatgaaactctttgcagagctggaaattaaaaggaaagagagagaagccaaagagatgcatgaaaggaaacgacaaagggaagaagagattgaagctcaagaaaaagccaaacgggaaagagagtggcagaaaaactttgaggaaagtcgagatggtcgtgtggacagctggcgaaacttccaagccaatacgaaggggaagaaagagaagaaaaatcggaccttcctgagaccaccgaaagtaaaaatggagcaacgtgagtgaccgcccaaggtcacaggcacagaacctttcccctgctatctcccttcctgcttcgaaggactcattctttcctcccacttccaccccaacatagagtagtatttgctttttagtccattttgttttcaatacgatttaatatcgatcagagtaattcttttgtacattgaaatgaggggcttggtttaaaaaaagacctttccctctccctgcccctagaacaaccagtattagaaggtgccaccattggtgctgccttctcttcccacagcctgtaactcagtgttttgtacttcactgaattgtgatggttagaaacttcgtggatagtttgtggaaatcatccaattaaacatactgcttaaaacagtgttgctgtgacttcagagacaagcctggaaggggcaccttaggaagccccttcgcttcagttgctcgcttctgggtgtgctcccttcgaaggcccagataagacagggaacacttgtgagcacacagagcagcatctgatgccctgtggtgtttggcatgtgccccctgtctactgaccaatcagtgtggcatgaggcccacgccacccaaacctttcactttccaaagagctagccgtcctccacccagtaccatgtcctagcctgtctggcaatttgattatacaagctcgggtggggatatttttcttgtttgatggtattaataagtttattcc

SEQ ID NO: 451095 - DNA, 1407 bp, Homo sapiens
gcgacgcattcggcatgaggggtcacgtggtggctgggccggggaaatggcggcttcaggagagagcgggacttcaggcggcggaggcagcaccgaggaagcatttatgaccttctacagtgaggtgaaacaaatagagaagagagactcggttctaacttcgaaaaatcagattgaaagactgacccgtcctggttcctcttacttcaatttgaacccatttgaggttcttcagatagatcctgaagttacagatgaagaaataaaaaagaggtttcggcagttatccatcttggtgcatcctgacaaaaatcaagatgatgctgacagagcacaaaaggcttttgaagctgtggacaaagcttacaagttgctactggatcaggagcaaaagaagagggccctggatgtaattcaggcaggaaaagaatacgtggaacacactgtgaaagagcgaaaaaaacaattaaagaaggaaggaaaacctacaattgtagaggaggatgatcctgagctggaaacgacaaagggaagaagagattgaagctcaagaaaaagccaaacgggaaagagagtggcagaaaaactttgaggaaagtcgagatggtcgtgtggacagctggcgaaacttccaagccaatacgaaggggaagaaagagaagaaaaatcggaccttcctgagaccaccgaaagtaaaaatggagcaacgtgagtgaccgcccaaggtcacaggcacagaacctttcccctgctatctcccttcctgcttcgaaggactcattctttcctcccacttccaccccaacatagagtagtatttgctttttagtccattttgttttcaatacgatttaatatcgatcagagtaattcttttgtacattgaaatgaggggcttggtttaaaaaaagacctttccctctccctgcccctagaacaaccagtattagaaggtgccaccattggtgctgccttctcttcccacagcctgtaactcagtgttttgtacttcactgaattgtgatggttagaaacttcgtggatagtttgtggaaatcatccaattaaacatactgcttaaaacagtgttgctgtgacttcagagacaagcctggaaggggcaccttaggaagccccttcgcttcagttgctcgcttctgggtgtgctcccttcgaaggcccagataagacagggaacacttgtgagcacacagagcagcatctgatgccctgtggtgtttggcatgtgccccctgtctactgaccaatcagtgtggcatgaggcccacgccacccaaacctttcactttccaaagagctagccgtcctccacccagtaccatgtcctagcctgtctgcatttgttagtggtaatattctttatgtataataaatttttatacccaa

SEQ ID NO: 451096 - DNA, 1094 bp, Homo sapiens
cctgattaagccaccccaggaaagaatcgtggaacacactgtgaaagagcgaaaaaaacaattaaagaaggaaggaaaacctacaattgtagaggaggatgatcctgagctgttcaaacaagctgtatataaacagacaatgaaactctttgcagagctggaaattaaaaggaaagagagagaagccaaagagatgcatgaaaggaaacgacaaagggaagaagagattgaagctcaagaaaaagccaaacgggaaagagagtggcagaaaaactttgaggaaagtcgagatggtcgtgtggacagctggcgaaacttccaagccaatacgaaggggaagaaagagaagaaaaatcggaccttcctgagaccaccgaaagtaaaaatggagcaacgtgagtgaccgcccaaggtcacaggcacagaacctttcccctgctatctcccttcctgcttcgaaggactcattctttcctcccacttccaccccaacatagagtagtatttgctttttagtccattttgttttcaatacgatttaatatcgatcagagtaattcttttgtacattgaaatgaggggcttggtttaaaaaaagacctttccctctccctgcccctagaacaaccagtattagaaggtgccaccattggtgctgccttctcttcccacagcctgtaactcagtgttttgtacttcactgaattgtgatggttagaaacttcgtggatagtttgtggaaatcatccaattaaacatactgcttaaaacagtgttgctgtgacttcagagacaagcctggaaggggcaccttaggaagccccttcgcttcagttgctcgcttctgggtgtgctcccttcgaaggcccagataagacagggaacacttgtgagcacacagagcagcatctgatgccctgtggtgtttggcatgtgccccctgtctactgaccaatcagtgtggcatgaggcccacgccacccaaacctttcactttccaaagagctagccgtcctccacccagtaccatgtcctagcctgtctgcatttgttagtggtaatattctttatgtataataaatttttatacccaa

SEQ ID NO: 451097 - DNA, 1245 bp, Homo sapiens
gcacgagtgcatgccaaaaccaatgcctgccaaacaaaatcttagacatcccaatataatatgttagttatatttctattcacatcattattgaaaatacccagctcagtgcctggcttaataaatgtttaattcccttacctactcttgctctatttttttatttgaaatggagatgagcaaaataacacattcatggctgaagcaattttttggacatttcttgttaccaaaagatctataatcaggatgatcctgagctgttcaaacaagctgtatataaacagacaatgaaactctttgcagagctggaaattaaaaggaaagagagagaagccaaagagatgcatgaaaggaaacgacaaagggaagaagagattgaagctcaagaaaaagccaaacgggaaagagagtggcagaaaaactttgaggaaagtcgagatggtcgtgtggacagctggcgaaacttccaagccaatacgaaggggaagaaagagaagaaaaatcggaccttcctgagaccaccgaaagtaaaaatggagcaacgtgagtgaccgcccaaggtcacaggcacagaacctttcccctgctatctcccttcctgcttcgaaggactcattctttcctcccacttccaccccaacatagagtagtatttgctttttagtccattttgttttcaatacgatttaatatcgatcagagtaattcttttgtacattgaaatgaggggcttggtttaaaaaaagacctttccctctccctgcccctagaacaaccagtattagaaggtgccaccattggtgctgccttctcttcccacagcctgtaactcagtgttttgtacttcactgaattgtgatggttagaaacttcgtggatagtttgtggaaatcatccaattaaacatactgcttaaaacagtgttgctgtgacttcagagacaagcctggaaggggcaccttaggaagccccttcgcttcagttgctcgcttctgggtgtgctcccttcgaaggcccagataagacagggaacacttgtgagcacacagagcagcatctgatgccctgtggtgtttggcatgtgccccctgtctactgaccaatcagtgtggcatgaggcccacgccacccaaacctttcactttccaaagagctagccgtcctccacccagtaccatgtcctagcctgtctgcatttgttagtggtaatattctttatgtataataaatttttatacccaa

SEQ ID NO: 451098 - DNA, 1063 bp, Homo sapiens
gcgacgcattcggcatgaggggtcacgtggtggctgggccggggaaatggcggcttcaggagagagcgggacttcaggcggcggaggcagcaccgaggaagcatttatgaccttctacagtgagagctggaaattaaaaggaaagagagagaagccaaagagatgcatgaaaggaaacgacaaagggaagaagagattgaagctcaagaaaaagccaaacgggaaagagagtggcagaaaaactttgaggaaagtcgagatggtcgtgtggacagctggcgaaacttccaagccaatacgaaggggaagaaagagaagaaaaatcggaccttcctgagaccaccgaaagtaaaaatggagcaacgtgagtgaccgcccaaggtcacaggcacagaacctttcccctgctatctcccttcctgcttcgaaggactcattctttcctcccacttccaccccaacatagagtagtatttgctttttagtccattttgttttcaatacgatttaatatcgatcagagtaattcttttgtacattgaaatgaggggcttggtttaaaaaaagacctttccctctccctgcccctagaacaaccagtattagaaggtgccaccattggtgctgccttctcttcccacagcctgtaactcagtgttttgtacttcactgaattgtgatggttagaaacttcgtggatagtttgtggaaatcatccaattaaacatactgcttaaaacagtgttgctgtgacttcagagacaagcctggaaggggcaccttaggaagccccttcgcttcagttgctcgcttctgggtgtgctcccttcgaaggcccagataagacagggaacacttgtgagcacacagagcagcatctgatgccctgtggtgtttggcatgtgccccctgtctactgaccaatcagtgtggcatgaggcccacgccacccaaacctttcactttccaaagagctagccgtcctccacccagtaccatgtcctagcctgtctgcatttgttagtggtaatattctttatgtataataaatttttatacccaa

SEQ ID NO: 451099 - DNA, 1011 bp, Homo sapiens
gcgacgcattcggcatgaggggtcacgtggtggctgggccggggaaatggcggcttcaggagagagcgggacttcaggcggcggaggcagcaccgaggaagcatttatgaccttctacagtgaggtgaaacaaatagagaagagagactcggttctaacttcgaaaaatcagattgaaagactgacccgtcctggttcctcttacttcaatttgaacccatttgaggttcttcagatagatcctgaagttacagatgaagaaataaaaaagaggtttcggcagttatccatcttggtgcatcctgacaaaaatcaagatgatgctgacagagcacaaaaggcttttgaagctgtggacaaagcttacaagttgctactggatcaggagcaaaagaagagggccctggatgtaattcaggcaggaaaagaatacgtggaacacactgtgaaagagcgaaaaaaacaattaaagaaggaaggaaaacctacaattgtagaggaggatgatcctgagctgttcaaacaagctgtatataaacagacaatgaaactctttgcagagctggaaattaaaaggaaagagagagaagccaaagagatgcatgaaaggaaacgacaaagggaagaagagattgaagctcaagaaaaagccaaacgggaaagagagtggcagaaaaactttgaggaaagtcgagatggtcgtgtggacagctggcgaaacttccaagccaatacgaaggggaagaaagagaagaaaaatcggaccttcctgagaccaccgaaagtaaaaatggagcaacgtgagtgacgctttacaggaagcatggctggggaggcctcaggaaacttaacagttgtggcagaaggtgaagaggaaggaggcacgtcttacatggccggagcaggaggaagagagcgcagggagaggtgctgtacgcttttaaacaaccagatctcactatctggatagtgatagataagaactcactatcacaagaacagcaaaggggg

SEQ ID NO: 451100 - DNA, 1119 bp, Homo sapiens
gcgacgcattcggcatgaggggtcacgtggtggctgggccggggaaatggcggcttcaggagagagcgggacttcaggcggcggaggcagcaccgaggaagcatttatgaccttctacagtgaggaataaagatggcatatagcataccagagattcattccaactagcattccaactctgacagtgacaccaagaatgttttcctgggactgcctggtgcttgttctccctggcattgtcttcaggtgaaacaaatagagaagagagactcggttctaacttcgaaaaatcagattgaaagactgacccgtcctggttcctcttacttcaatttgaacccatttgaggttcttcagatagatcctgaagttacagatgaagaaataaaaaagaggtttcggcagttatccatcttggtgcatcctgacaaaaatcaagatgatgctgacagagcacaaaaggcttttgaaggtgaaagagcgaaaaaaacaattaaagaaggaaggaaaacctacaattgtagaggaggatgatcctgagctgttcaaacaagctgtatataaacagacaatgaaactctttgcagagctggaaattaaaaggaaagagagagaagccaaagagatgcatgaaaggaaacgacaaagggaagaagagattgaagctcaagaaaaagccaaacgggaaagagagtggcagaaaaactttgagggaaagtcgagatggtcagggtgatggttagaaacttcgtggatagtttgtggaaatcatccaattaaacatactgcttaaaacagtgttgctgtgacttcagagacaagcctggaaggggcaccttaggaagccccttcgcttcagttgctcgcttctgggtgtgctcccttcgaaggcccagataagacagggaacacttgtgagcacacagagcagcatctgatgccctgtggtgtttggcatgtgccccctgtctactgaccaatcagtgtggcatgaggcccacgccacccaaacctttcactttccaaagagctagccgtcctccacccagtaccatgtcctagcctgtctgcatttgttagtggtaatattctttatgtataataaatttttatacccaa

SEQ ID NO: 451101 - DNA, 699 bp, Homo sapiens
gcgacgcattcggcatgaggggtcacgtggtggctgggccggggaaatggcggcttcaggagagagcgggacttcaggcggcggaggcagcaccgaggaagcatttatgaccttctacagtgaggtgaaacaaatagagaagagagactcggttctaacttcgaaaaatcagattgaaagactgacccgtcctggttcctcttacttcaatttgaacccatttgaggttcttcagatagatcctgaagttacagatgaagaaataaaaaagaggtttcggcagttatccatcttggtgcatcctgacaaaaatcaagatgatgctgacagagcacaaaaggcttttgaagctgtggacaaagcttacaagttgctactggatcaggagcaaaagaagagggccctggaaggggcaccttaggaagccccttcgcttcagttgctcgcttctgggtgtgctcccttcgaaggcccagataagacagggaacacttgtgagcacacagagcagcatctgatgccctgtggtgtttggcatgtgccccctgtctactgaccaatcagtgtggcatgaggcccacgccacccaaacctttcactttccaaagagctagccgtcctccacccagtaccatgtcctagcctgtctgcatttgttagtggtaatattctttatgtataataaatttttatacccaa

SEQ ID NO: 451102 - DNA, 864 bp, Homo sapiens
ctagtttctagatcgtgagcgccgtccttttgttcatttgttggggacttggttcgcattaaaatatttatgattctaaaaacctactcgcgctgggcgcgcgtaggaacaaccagtattagaaggtgccaccattggtgctgccttctcttcccacagcctgtaactcagtgttttgtacttcactgaattgtgatggttagaaacttcgtggatagtttgtggaaatcatccaattaaacatactgcttaaaacagtgttgctgtgacttcagagacaagcctggaaggggcaccttaggaagccccttcgcttcagttgctcgcttctgggtgtgctcccttcgaaggcccagataagacagggaacacttgtgagcacacagagcagcatctgatgccctgtggtgtttggcatgtgccccctgtctactgaccaatcagtgtggcatgaggcccacgccacccaaacctttcactttccaaagagctagccgtcctccacccagtaccatgtcctagcctgtctgcatttgttagtggtaatattctttatgtataataaatttttatacccaagccattgatgtacttttccttgtactctcccttgtgggtcccttgtctggcttggctgaaccccaaaatgctttggggttggacagacctggctgaaccttagtttcttcatctatgaaatgggaatatgaattactgcagcagcttttagggcagatttgccatggcatatacaaggtaactaccatagtgctccttgggtattgccaatatcctattatttctgtgtaaaatgaagatactgattgttttgaggattaaatgaagtaatatatgaaaaaaaaa

SEQ ID NO: 451103 - DNA, 368 bp, Homo sapiens
ataagtagtctgtttcaaagactttttggatctgatgagttggggacaacctcccgttggtcccctttcatctttcattcttcctggtagattggattttagatgagattagaaaaaggacttgtggttcctaattttccttgattctgttgttcttttgaggagggaggggaggggctctttttttttttaatgaaaactttttgctatacccgtgcctatagaaagttaaatatattgtatgtgtacagcccagtggatattctcaaagcacagatgctcgtcttttgatgaaaaaaaattctttttaggtgaaagagcgaaaaaaacaattaaagaaggaaggaaaacctacaattgtagaggag

SEQ ID NO: 451104 - DNA, 846 bp, Homo sapiens
gcgacgcattcggcatgaggggtcacgtggtggctgggccggggaaatggcggcttcaggagagagcgggacttcaggcggcggaggcagcaccgaggaagcatttatgaccttctacagtgaggtgaaacaaatagagaagagagactcggttctaacttcgaaaaatcagattgaaagactgacccgtcctggttcctcttacttcaatttgaacccatttgaggttcttcagatagatcctgaagttacagatgaagaaataaaaaagaggtttcggcagttatccatcttggtgcatcctgacaaaaatcaagatgatgctgacagagcacaaaaggcttttgaagctgtggacaaagcttacaagttgctactggatcaggagcaaaagaagagggccctggatgtaattcaggcaggaaaagaatacgtggaacacactgtgaaagagcgaaaaaaacaattaaagaaggaaggaaaacctacaattgtagaggaggatgatcctgagctgttcaaacaagctgtatataaacagacaatgaaactctttgcagagctggaaattaaaaggaaagagagagaagccaaagagatgcatgaaaggaaacgacaaagggaagaagagattgaagctcaagaaaaagccaaacgggaaagagagtggcagaaaaactttgaggaaagtcgagatggtcgtgtggacagctggcgaaacttccaagccaatacgaaggggaagaaagagaagaaaattgggcctttctgagaccaccaaaggtgtatttccttctgcttgaaggactatttttcctccacttcaccccactaaagagtattgca

SEQ ID NO: 451105 - DNA, 637 bp, Homo sapiens
  misc_feature (595)..(595): n is a, c, g, or t
  misc_feature (637)..(637): n is a, c, g, or t
cctgattaagccaccccaggaaagaatcgtggaacacactgtgaaagagcgaaaaaaacaattaaagaaggaaggaaaacctacaattgtagaggaggatgatcctgagctgttcaaacaagctgtatataaacagacaatgaaactctttgcagagctggaaattaaaaggaaagagagagaagccaaagagatgcatgaaaggaaacgacaaagggaagaagagattgaagctcaagaaaaagccaaacgggaaagagagtggcagaaaaactttgaggaaagtcgagatggtcgtgtggacagctggcgaaacttccaagccaatacgaaggggaagaaagagaagaaaaatcggaccttcctgagaccaccgaaagtaaaaatggagcaacgtgagtgaccgcccaaggtcacaggcacagaacctttcccctgctatctcccttcctgcttcgaaggactcattctttcctcccacttccaccccaacatagagtagtatttgctttttagtccattttgttttcaatacgatttaatatcgatcagagtaattcttttgtacattgaaatgaggggcttggtttttgtngctgcttctctccccgcctgtacttagtgttttgactccctn

SEQ ID NO: 451106 - DNA, 1738 bp, Homo sapiens
gcgacgcattcggcatgaggggtcacgtggtggctgggccggggaaatggcggcttcaggagagagcgggacttcaggcggcggaggcagcaccgaggaagcatttatgaccttctacagtgaggtgaaacaaatagagaagagagactcggttctaacttcgaaaaatcagattgaaagactgacccgtcctggttcctcttacttcaatttgaacccatttgaggttcttcagatagatcctgaagttacagatgaagaaataaaaaagaggtttcggcagttatccatcttggtgcatcctgacaaaaatcaagatgatgctgacagagcacaaaaggcttttgaagctgtggacaaagcttacaagttgctactggatcaggagcaaaagaagagggccctggatgtaattcaggcaggaaaagaatacgtggaacacactgtgaaagagcgaaaaaaacaattaaagaaggaaggaaaacctacaattgtagaggaggatgatcctgagctgttcaaacaagctgtatataaacagacaatgaaactctttgcagagctggaaattaaaaggaaagagagagaagccaaagagatgcatgaaaggaaacgacaaagggaagaagagattgaagctcaagaaaaagccaaacgggaaagagagtggcagaaaaactttgaggaaagtcgagatggtcgtgtggacagctggcgaaacttccaagccaatacgaaggggaagaaagagaagaaaaatcggaccttcctgagaccaccgaaagtaaaaatggagcaacgtgagtgaccgcccaaggtcacaggcacagaacctttcccctgctatctcccttcctgcttcgaaggactcattctttcctcccacttccaccccaacatagagtagtatttgctttttagtccattttgttttcaatacgatttaatatcgatcagagtaattcttttgtacattgaaatgaggggcttggtttaaaaaaagacctttccctctccctgcccctagaacaaccagtattagaaggtgccaccattggtgctgccttctcttcccacagcctgtaactcagtgttttgtacttcactgaattgtgatggttagaaacttcgtggatagtttgtggaaatcatccaattaaacatactgcttaaaacagtgttgctgtgacttcagagacaagcctggaaggggcaccttaggaagccccttcgcttcagttgctcgcttctgggtgtgctcccttcgaaggcccagataagacagggaacacttgtgagcacacagagcagcatctgatgccctgtggtgtttggcatgtgccccctgtctactgaccaatcagtgtggcatgaggcccacgccacccaaacctttcactttccaaagagctagccgtcctccacccagtaccatgtcctagcctgtctgcatttgttagtggtaatattctttatgtataataaatttttatacccaagccattgatgtacttttccttgtactctcccttgtgggtcccttgtctggcttggctgaaccccaaaatgctttggggttggacagacctggctgaaccttagtttcttcatctatgaaatgggaatatgaattactgcagcagctcgcccctgagttagcagctcgcccctgagttagcagctcgttcctgagttagcagctcgcccctgagttagcagctcgccctgagtcagcagt

SEQ ID NO: 451107 - DNA, 1582 bp, Homo sapiens
gcgacgcattcggcatgaggggtcacgtggtggctgggccggggaaatggcggcttcaggagagagcgggacttcaggcggcggaggcagcaccgaggaagcatttatgaccttctacagtgaggtgaaacaaatagagaagagagactcggttctaacttcgaaaaatcagattgaaagactgacccgtcctggttcctcttacttcaatttgaacccatttgaggttcttcagatagatcctgaagttacagatgaagaaataaaaaagaggtttcggcagttatccatcttggtgcatcctgacaaaaatcaagatgatgctgacagagcacaaaaggcttttgaagctgtggacaaagcttacaagttgctactggatcaggagcaaaagaagagggccctggatgtaattcaggcaggaaaagaatacgtggaacacactgtgaaagagcgaaaaaaacaattaaagaaggaaggaaaacctacaattgtagaggaggatgatcctgagctgttcaaacaagctgtatataaacagacaatgaaactctttgcagagctggaaattaaaaggaaagagagagaagccaaagagatgcatgaaaggaaacgacaaagggaagaagagattgaagctcaagaaaaagccaaacgggaaagagagtggcagaaaaactttgaggaaagtcgagatggtcgtgtggacagctggcgaaacttccaagccaatacgaaggggaagaaagagaagaaaaatcggaccttcctgagaccaccgaaagtaaaaatggagcaacgtgagtgaccgcccaaggtcacaggcacagaacctttcccctgctatctcccttcctgcttcgaaggactcattctttcctcccacttccaccccaacatagagtagtatttgctttttagtccattttgttttcaatacgatttaatatcgatcagagtaattcttttgtacattgaaatgaggggcttggtttaaaaaaagacctttccctctccctgcccctagaacaaccagtattagaaggtgccaccattggtgctgccttctcttcccacagcctgtaactcagtgttttgtacttcactgaattgtgatggttagaaacttcgtggatagtttgtggaaatcatccaattaaacatactgcttaaaacagtgttgctgtgacttcagagacaagcctggaaggggcaccttaggaagccccttcgcttcagttgctcgcttctgggtgtgctcccttcgaaggcccagataagacagggaacacttgtgagcacacagagcagcatctgatgccctgtggtgtttggcatgtgccccctgtctactgaccaatcagtgtggcatgaggcccacgccacccaaacctttcactttccaaagagctagccgtcctccacccagtaccatgtcctagcctgtctgcatttgttagtggtaatattctttatgtataataaatttttatacccaaaaaaaaaattacaaaccgaaagcggccggaaccttatcccctttagggaggggtaaattttaacttggcccttggccgtcgtt

SEQ ID NO: 451108 - DNA, 1977 bp, Homo sapiens
  misc_feature (1500)..(1500): n is a, c, g, or t
  misc_feature (1504)..(1504): n is a, c, g, or t
  misc_feature (1506)..(1506): n is a, c, g, or t
  misc_feature (1511)..(1511): n is a, c, g, or t
  misc_feature (1524)..(1524): n is a, c, g, or t
  misc_feature (1528)..(1528): n is a, c, g, or t
gcgacgcattcggcatgaggggtcacgtggtggctgggccggggaaatggcggcttcaggagagagcgggacttcaggcggcggaggcagcaccgaggaagcatttatgaccttctacagtgaggtgaaacaaatagagaagagagactcggttctaacttcgaaaaatcagattgaaagactgacccgtcctggttcctcttacttcaatttgaacccatttgaggttcttcagatagatcctgaagttacagatgaagaaataaaaaagaggtttcggcagttatccatcttggtgcatcctgacaaaaatcaagatgatgctgacagagcacaaaaggcttttgaagctgtggacaaagcttacaagttgctactggatcaggagcaaaagaagagggccctggatgtaattcaggcaggaaaagaatacgtggaacacactgtgaaagagcgaaaaaaacaattaaagaaggaaggaaaacctacaattgtagaggaggatgatcctgagctgttcaaacaagctgtatataaacagacaatgaaactctttgcagagctggaaattaaaaggaaagagagagaagccaaagagatgcatgaaaggaaacgacaaagggaagaagagattgaagctcaagaaaaagccaaacgggaaagagagtggcagaaaaactttgaggaaagtcgagatggtcgtgtggacagctggcgaaacttccaagccaatacgaaggggaagaaagagaagaaaaatcggaccttcctgagaccaccgaaagtaaaaatggagcaacgtgagtgaccgcccaaggtcacaggcacagaacctttcccctgctatctcccttcctgcttcgaaggactcattctttcctcccacttccaccccaacatagagtagtatttgctttttagtccattttgttttcaatacgatttaatatcgatcagagtaattcttttgtacattgaaatgaggggcttggtttaaaaaaagacctttccctctccctgcccctagaacaaccagtattagaaggtgccaccattggtgctgccttctcttcccacagcctgtaactcagtgttttgtacttcactgaattgtgatggttagaaacttcgtggatagtttgtggaaatcatccaattaaacatactgcttaaaacagtgttgctgtgacttcagagacaagcctggaaggggcaccttaggaagccccttcgcttcagttgctcgcttctgggtgtgctcccttcgaaggcccagataagacagggaacacttgtgagcacacagagcagcatctgatgccctgtggtgtttggcatgtgccccctgtctactgaccaatcagtgtggcatgaggcccacgccacccaaacctttcactttccaaagagctagccgtcctccacccagtaccatgtcctagcctgtctgcatttgttagtggtaatattctttatgtataataaatttttatacccaanaaanancaaanaaaaaaaaaaaanaaanaaaaaaaataaaaaaaaaaaaaaaaaaaaaaaaaaagaggggggggcgccgcccaaaaaatctcccccggggggccccatctcttgcccccccccccctttttttgtaaaaagggcggcccccaaaaagaggggcactctatataaaaaaaacagaacacgagcggccgggcgctgcttctatcaaaacacaagcctgtcgccgatggcgtggtaacaaaaccagctgctcctgtggtcgacctaatgttgtgagcgaagagcaacccccactattgtgggggccggtggacactatattggatgcacacacccaactcagaagaagtgtttaatagttcctcaggaggaacattcaacatctgcgcgtatctagtggtgtacaacccaccgagttttgttcgcgcgcgaaaaatattgtgtcgtcgtatatttctgaaatttacaaga

SEQ ID NO: 451109 - DNA, 1172 bp, Homo sapiens
gcgacgcattcggcatgaggggtcacgtggtggctgggccggggaaatggcggcttcaggagagagcgggacttcaggcggcggaggcagcaccgaggaagcatttatgaccttctacagtgaggtgaaacaaatagagaagagagactcggttctaacttcgaaaaatcagattgaaagactgacccgtcctggttcctcttacttcaatttgaacccatttgaggttcttcagatagatcctgaagttacagatgaagaaataaaaaagaggtttcggcagttatccatcttggtgcatcctgacaaaaatcaagatgatgctgacagagcacaaaaggcttttgaagctgtggacaaagcttacaagttgctactggatcaggagcaaaagaagagggccctggatgtaattcaggcaggaaaagaatacgtggaacacactgtgaaagagcgaaaaaaacaattaaagaaggaaggaaaacctacaattgtagaggaggatgatcctgagctgttcaaacaagctgtatataaacagacaatgaaactctttgcagagctggaaattaaaaggaaagagagagaagccaaagagatgcatgaaaggaaacgacaaagggaagaagagattgaagctcaagaaaaagccaaacgggaaagagagtggcagaaaaactttgaggaaagtcgagatggtcgtgtggacagctggcgaaacttccaagccaatacgaaggggaagaaagagaagaaaaatcggaccttcctgagaccaccgaaagtaaaaatggagcaacgtgagtgaccgcccaaggtcacaggcacagaacctttcccctgctatctcccttcctgcttcgaaggactcattctttcctcccacttccaccccaacatagagtagtatttgctttttagtccattttgttttcaatacgatttaatatcgatcagagtaattcttttgtacattgaaatgaggggcttggtttaaaaaaagacctttccctctccctgcccctagaacaaccagtattagaaggtgccaccattggtgctgccttctcttcccacagcctgtaactcagtgttttgtacttcactgaattgtgatggttagaaacttcgtggatagtttgtggaaatcatccaattaaacatactgctta

SEQ ID NO: 451110 - DNA, 1343 bp, Homo sapiens
gcgacgcattcggcatgaggggtcacgtggtggctgggccggggaaatggcggcttcaggagagagcgggacttcaggcggcggaggcagcaccgaggaagcatttatgaccttctacagtgaggttcttcagatagatcctgaagttacagatgaagaaataaaaaagaggtttcggcagttatccatcttggtgcatcctgacaaaaatcaagatgatgctgacagagcacaaaaggcttttgaagctgtggacaaagcttacaagttgctactggatcaggagcaaaagaagagggccctggatgtaattcaggcaggaaaagaatacgtggaacacactgtgaaagagcgaaaaaaacaattaaagaaggaaggaaaacctacaattgtagaggaggatgatcctgagctgttcaaacaagctgtatataaacagacaatgaaactctttgcagagctggaaattaaaaggaaagagagagaagccaaagagatgcatgaaaggaaacgacaaagggaagaagagattgaagctcaagaaaaagccaaacgggaaagagagtggcagaaaaactttgaggaaagtcgagatggtcgtgtggacagctggcgaaacttccaagccaatacgaaggggaagaaagagaagacgcccaaggtcacaggcacagaacctttcccctgctatctcccttcctgcttcgaaggactcattctttcctcccacttccaccccaacatagagtagtatttgctttttagtccattttgttttcaatacgatttaatatcgatcagagtaattcttttgtacattgaaatgaggggcttggtttaaaaaaagacctttccctctccctgcccctagaacaaccagtattagaaggtgccaccattggtgctgccttctcttcccacagcctgtaactcagtgttttgtacttcactgaattgtgatggttagaaacttcgtggatagtttgtggaaatcatccaattaaacatactgcttaaaacagtgttgctgtgacttcagagacaagcctggaaggggcaccttaggaagccccttcgcttcagttgctcgcttctgggtgtgctcccttcgaaggcccagataagacagggaacacttgtgagcacacagagcagcatctgatgccctgtggtgtttggcatgtgccccctgtctactgaccaatcagtgtggcatgaggcccacgccacccaaacctttcactttccaaagagctagccgtcctccacccagtaccatgtcctagcctgtctgcatttgttagtggtaatattctttatgtataataaatttttatacccaa

SEQ ID NO: 451111 - DNA, 1092 bp, Homo sapiens
gcgacgcattcggcatgaggggtcacgtggtggctgggccggggaaatggcggcttcaggagagagcgggacttcaggcggcggaggcagcaccgaggaagcatttatgaccttctacagtgaggtgaaacaaatagagaagagagactcggttctaacttcgaaaaatcagattgaaagactgacccgtcctggttcctcttacttcaatttgaacccatttgaggttcttcagatagatcctgaagttacagatgaagaaataaaaaagaggtttcggcagttatccatcttggtgcatcctgacaaaaatcaagatgatgctgacagagcacaaaaggcttttgaagctgtggacaaagcttacaagttgctactggatcaggagcaaaagaagagggccctggatgtaattcaggcaggaaaagaatacgtggaacacactgtgaaagagcgaaaaaaacaattaaagaaggaaggaaaacctacaattgtagaggaggatgatcctgagctgttcaaacaagctgtatataaacagacaatgaaactctttgcagagctggaaattaaaaggaaagagagagaagccaaagagatgcatgaaaggaaacgacaaagggaagaagagattgaagctcaagaaaaagccaaacgggaaagagagtggcagaaaaactttgagggaaagtcgagatggtcagggtgatggttagaaacttcgtggatagtttgtggaaatcatccaattaaacatactgcttaaaacagtgttgctgtgacttcagagacaagcctggaaggggcaccttaggaagccccttcgcttcagttgctcgcttctgggtgtgctcccttcgaaggcccagataagacagggaacacttgtgagcacacagagcagcatctgatgccctgtggtgtttggcatgtgccccctgtctactgaccaatcagtgtggcatgaggcccacgccacccaaacctttcactttccaaagagctagccgtcctccacccagtaccatgtcctagcctgtctgcatttgttagtggtaatattctttatgtataataaatttttatacccaa

SEQ ID NO: 451112 - DNA, 928 bp, Homo sapiens
tgagatggagtcttgctctgttgccagactggagtgcagtggtgcgatctgggctcactgcaatctccacctcctgggctcaagcaatcctcctgccttggcctcccaaagtgctgggattacaggcatgatccaccgtgcccagccggtagacgtggtcttaaaaacagtgtttacatggccatcttgatgcttagaaagataattgattaaaatttaataaggcagggccaactccgagagttcattgacaacggcagcaaaaaggccctgaattctgtactttcttcccccagcctccttctccagcaaggagaatagcactcctccctccagaagccagctccctaagttggagccactatgtaagagaagaggaacgttcactttttaaaaattccatatattttaaaaatcaagacccaaaaagtaaattctgtactcctattattgactgtagtcaatcaaacataaaaaggtgaaagtaaaatttaattttttacccttattttactgaccaatatggaagttcttggtatctttaaggctgaccttcctggtattgtgtaatgattgaatgtatctaaactgtaataatttgaaactgacaaacataaccttctcagacttacaaaactatgttctttctaaagatacagatttttattattttattttgactaggaaggatttataaataaatgtaatgaaaaatctttgatcttaataaagtaccttcaaacagtgtgtgtacttacttgaaaattgtttttgcacttggatattctattttattatactactattgtgatctattccattatactatttcccatggtagaacaaattatattttctactgtgatatgaagtgatgtaattgaacttgccatgtctaaaattaaatttcatatttttttcaatcaaa

SEQ ID NO: 451113 - DNA, 3283 bp, Homo sapiens
accaaggtgctgcaaaacccttcacagaagaagattttcaagaaatgattaaatctgcacagataatggaaagtcaatatggtcatctttttgacaaaattataataaatgatgacctcactgtggcattcaatgagctcaaaacaacttttgacaaattagagacagagacccattgggtgccagtgagctggttacattcataactaagagaaatttccataattgtctttttctatagagtgcatgatgaaatcaattacagttttggtagtagggtttttaaatctatatcactgtcatagatgtacaatcttggttcaagttgaatgctggttttgtttgtatctttttacagccttatttcaaacgccatgtgttagtataagatccgaaatcaaaatatgcacagtactgtattctaagcaaaacctcaaaccttctcgttgtcttcaataccgctctatctccaagatgaggctgaaattttcagagagacttagctagaggcttagtatgtatgggagttcagcgcttctgctggtctcaggtgtggctgctgctgtcgagtttgaatgttagctgttgaaggtatcaattcagcagccatgagcagctccagacagacaggtgagctctgctgtttctgggtggatcatcacagatttagccgggcaggcagtaaggtgtcctcttactattcaaaaagtgtagactttcttacatattcgcaatacgttcacagtgtgtgcattttaaacataattcttaaaggagtaactgaaattttaccttgagtgaatggccttcataatatagcttgagaagtccttttgagtacctgtcagtgactcaacaacatttaataagggaaagtagacttttaacagttattatatatgtaacgaaaagcctttcctttgggattaatataagtaagaatggtagccttgtggcaagaaatgattacaaaggatatttttatttgtaattcctcagaagacaatttatgaagtcaccccaaatgttattttagctggttttggatttttccaataaattagaagaaggatttctattctaaaacatgtaaaacctgttttacatattactgatacaattaaagattatttttcatctatgtgcaatagatcacccctctttaaattgctctaagatttattttagaaaacttttcatgtgatgttatttctttgtcatcaaaatgcttgttaacactgtccagacaccatcctaaccttgccattgttaaagaagtttaggaaagactcttatattgtaaatatttagatgggttctctcacttttctttgatactactgattttcagcaagtgaattatataattcaaaatgctagaaatgtctatccgttctataagagagcatatcctgccgttcttgcatgcagtgaagccctgcccgtcgaaaatcattgcatctgtgactttcaaagtggaaaaaaaaatgttatttttttgttgatttgtaaagagagtttaaatgtcatgtgaaaaaaaatagaatgtagtaaaattctatatatttatgaaatattttaaaggcatatttttttaaatatcaaacggggctattcataaaataaactgattgtatgtcaagatgtcctaatttaaaagagtagttttataaatcatggtcaacattccatgtaaatatttgagctttacaaagatagatccaagtgtgcgatctgtgcactgcacatttgatagcattattcactggttttccttcatacttgtcaagttcatattagaagcagagacaaaaaccactccaatggccttgacacatagtcacaccaaaatagataatcagactaagtattatataacaacgtgatccagacagtgagttctaagtgtattaattaaatagcaaaaaattttgtttttaaaaaatgaaagagggagggttgccaacctgaagtcttaagtagattgtttgggtagcatatttccttctttgaacattgtctgaaattttctataaatcaagacttcttgtacaaagaatgatgggacatatgtaataattcaggcaatcacctgagtaatttaggcagtccaaattctttaccctgaaatacccacattttaaaaaaattgcagataattgcttcagttatttactttggggacagagatatagtgtaaagtgggagaaactgagtccttttttggtggtggtaataataagatgttataaaaatataacattttaaaaaagaaaggtccagaccttaagcgcagagctagaacaatattttttaaataatggggggaaaagggggcactttggtaattttagaaatcaggtagtatacttttttttttttttttgagacagggtcttgccatgttgctcaggctggtcttgaactcctgggctcaagcaatcctcctgccttggcctcccaaagtgctgggattacaggcatgatccaccgtgcccagccggtagacgtggtcttaaaaacagtgtttacatggccatcttgatgcttagaaagataattgattaaaatttaataaggcagggccaactccgagagttcattgacaacggcagcaaaaaggccctgaattctgtactttcttcccccagcctccttctccagcaaggagaatagcactcctccctccagaagccagctccctaagttggagccactatgtaagagaagaggaacgttcactttttaaaaattccatatattttaaaaatcaagacccaaaaagtaaattctgtactcctattattgactgtagtcaatcaaacataaaaaggtgaaagtaaaatttaattttttacccttattttactgaccaatatggaagttcttggtatctttaaggctgaccttcctggtattgtgtaatgattgaatgtatctaaactgtaataatttgaaactgacaaacataaccttctcagacttacaaaactatgttctttctaaagatacagatttttattattttattttgactaggaaggatttataaataaatgtaatgaaaaatctttgatcttaataaagtaccttcaaacagtgtgtgtacttacttgaaaattgtttttgcacttggatattctattttattatactactattgtgatctattccattatactatttcccatggtagaacaaattatattttctactgtgatatgaagtgatgtaattgaacttgccatgtctaaaattaaatttcatatttttttcaatcaaa

SEQ ID NO: 451114 - DNA, 6189 bp, Homo sapiens
cagcgctgtgcttcgccgtgagccgctcgctgctgctgacgtgcctggtgccggccgcgctgctgggcctgcgctactactacagccgcaaggtgatccgcgcctacctggagtgcgcgctgcacacggacatggcggacatcgagcagtactacatgaagccgcccggctcctgcttctgggtggccgtgctggatggcaacgtggtgggcattgtggctgcacgggcccacgaggaggacaacacggtggagctgctgcggatgtctgtggactcacgtttccgaggcaagggcatcgccaaggcgctgggccggaaggtgctggagttcgccgtggtgcacaactactccgcggtggtgctgggcacgacggccgtcaaggtggccgcccacaagctctacgagtcgctgggcttcagacacatgggcgccagtgaccactacgtgctgccgggcatgaccctctcgctggctgagcgcctcttcttccaggtccgctaccaccgctaccgcctgcagctgcgcgaggagtgaccgccgccgctcgcccggaccgcccgcccggcctgccctgtgcgccttgtgccgcctgcccgccgcccggcgcggcctgctttcagacgctcacttggcgtttgtgttgggtttccccttttcaacatcctgcggttgtctggctggttccggggggtgcggggctgttgttcttcggcgacactttggtgggggtgggttgtttgtcgccatagcccctcgcccttccccacctgcctgggcggcttgccacctgaagagtggcatcttggaccaccgcggctgtccatgacgctgccctgcccgccgccactggggaaggcccagccttgctcaccaagcacagaacctctgcagcagatcccggggccaggctccggccccgcctgcggccccagcgccactgcctgtggaggcccgagctggccacggcgctgctttgctccgcgcatgccgagggtgtggcccggctgagcatgccgcatgcacacaggcccgccctgccgccctgcccagactggacccggagacccgggctggtgagcgcccctgtccccagcccccagctggctgtgggagggcctgcccctgcacccacctcctggagggactggtctgacccgcgccgcccggctctgtccacacctgctttgctctgacgccctccatttctctggctccggcccctcccctgcctgggctgtgctgactggtgtcatcacccaggtgactcccatggcgtccgtggcacagccagggtgggggtccatgggacccctctccccagtgcccactggatcgtgctggcctctcccagatgtccccggggacctcctgcctctggctgacggtccaccctgtgaatcttatcagcccaggctgctgccaacagcgcccagcccacagcttctcccagcctgaaaccaacacattttctaataagttatttagacagaatagcactctgcatgactttaattcttgggacaaaacggtagtttgtaccctaagacacagtttctggcccagtgtgatgggggtgggtggccgggtgggtggagcgtttgctgttggaaacctggagggaaaccctgattggatgtcatttcctgccatggagcacgcctcccagccctggcctgcagggtgggcagggtggggggcaagggagtccgcagcctccgggaggaggggcagggcgctgccttgggctgggtgggaagaggggtggccgcctcggcttccgctggccatgctcctggtctctccttcctgaggtcacaggcaggggctgccctggacggggggcggggggggtggcctggaaggggagacagaggtggagggtggcacaggctgcacattcagcttagaagtggacctggctttggtggcaggagaagaataaacacttgcccagacccctttgtgtgggggaattggggaggggtcgtggcaggcagggtgggccacggaactgggtcccaggcatcaaggccacgtgcagggccatggagggatgcttctcacgaggcgcttcagaagcgagcgaagggacagagaagccctgcgtccaagggccttttgtcctgttagcaattgaggtgtgcagagcactgtacagaccccactcccctgtacattcctccctggaggtgcccggtccccgcttggggatgggagttttgtagactgtacagaaatcggcaccctattttcttgcagctcagattttgttaatctggaatatacagacagacgtaaagtgttttagcaaaatggaaacaaacagttgtgcctttttcctcttttggtttggtttgggtttggcctggggctggtcccagttggtgcggggcatgctgggggcaggaggggcagggcgggccaggtggagtcaggtcttgggggtgtcatgtcggggtgctgccagcgtcccttggtcctgtgcctttggagcctcgggctcctggggtgcagggtgcttgggggtggctgttggagcccaccgacgccagggcagggcctggaggcccagggactgccagtgtctccttgatattgatcctagcagatccccctcctgggggttctgagagtcctgggcagtgtggccttctctcattctggtggcatctgcgcccgtgagtgacctcttccttggctgcactgccctgtgggtggtgagacgcttggccttttttgttgctgccaggacttggtagagatggcaggaagggtgtgcggggtggttgtgtgcagaaccctgccgcccctgaggtgagcagaggcactggtgtgcctgccaggctggggcggagctgcccggaacccttgccaggccaatgtgtagcttggtggcgcccttgaaggccactggggggtaggtgtgtcctcccccggggctggaggccgggtgcctggtgggtgggcctgacctggcccacctcatccctccagcctgggatctcactgctctgcacctgtgcactgacgtgaattttatacgtttgtagaaactctgatgtaacttcttctacctctgaagcgccctcctgggccctgctgtcacgtggctggtgcggcttccccgagtgctggccccctgcccgctccccatgggcacccaccactcaaactctgcgtggtgaggcccggggaaagccaggccgggccctagcactgctcaggggcctggggctcctgggatttctgtgtgtttggaagcctctgtttttggagtggggggcgtggaaggcgggaggggctgacagtgcctggggccagagctgggcgaaggaggacatcctcactggacgagcactgcaggcctgacgagaggctccgggcagctgagggctgaagcgcctcgggatgccccacactgcccagagccacgggtcttgctgtgctgggggtggggtggccccaggcagctgccactgcccaggtgtgagtcgctgcagacctggtccctgagggtgggaggcctgcttgtgctgaagctgccatgtggtctggcccccagaagggctcctgagcgtagggagttgagccccgcagccgtggcggcatctcctcctccttcctccgccccatgcccagccttgcttccggctggtggcatgccttggggccgggcagcaggtgagaagctgcccccggagggaggggccaagggctgggtcagtctggcctgaggggtggatggctggccctgggggaaggctgggcctgggaggccctgtggacagcaggcctgaggccacgaggtcctggggccacccctctcctgctctgggtgtccttctcagagaagatggcagaaggctgcaggccctagaggggacgacgggctggggacgccctgagcttcctggctgtgtggcaggtgctggggaagctctctgggccatagggacctggctcccctctgagaggcccgcctgccctgggacacccagggctgtgctggtggcctgaggctgggaacttgggttcctgggctctgctggcgcctgggctttgtgggggccgaaggtggttgccccgccgggcagggggctgtgtgggccctcgtggggccaccttcctgtcagtgcccgagggacggtgggacagttgcccctgcgccaagggagcccactgccatcccccgtgggctggcgctgcagtcgcgcaccctgtgttgcctgctgacttgcttatgtctgtttggaagctgcttctgtttggccacaggcctgtgttcctgggctgatggccacagagctgacacttggggtttgagttccagacttgcagaccctgggatccgcttactcctccgcgccacggctgctgtgcttccagaggtggcgtgatgcctcccggggccacggtggggtgaaggatggcgagccggacataccattgttggatgtattttttttaaaacagcaataattagccattttaaaggagggatgtacctgtgtgtgtgcatgtgcacgtgtttgagcgtgtgtgtgtgtgtgcaagtgggttcttggatatgtgtagtgtgagcatgtgtgcatgtgtgagcctgtgcacgtgcatgttgtaggtgcataagcatgtacacgcgtgagcatgcatgtgcgtgtacacgtgtataggtgtacatgtgcatgagttgtgtacatgcgtgagcacgtgtatagatgtacgtgtgtgtgcgcatgtgtgcgtgtacatgtgtttgtgtcttgggtatgcataagcatgcacgtgtgtatgaatgtgcgtgtgtatgcatgagcacgtatgcatgtgtgatgcgcatgttcttgtgtacttctctgagggggcacatatgtatgagtgtatgagtgcatacatatgcatatggtgtacgtgtgtgtactttgtgtgtgggcatgtatgcgtatgagtacttgtgtgtggctggtgtatgggtgagcatgcacatgtgtatggatgcatatgtgagctgtacatgtagagtgtacatgtgtgttgcatgagcatgcatgcgtgcgagtgcctgtgtgtgtacttgcatatatgtggctgtgcaggtacccggcggtggtgggctggcagtgcccggggaagcaggtcctgctcacggcttccctgctgggccccaggccccgggctgagcctccctggcccctcttgcccctcagtggagcagggcctgggtggagggcctgggcagctccagggcaggtccggggaggccaggcttggggagcacagggggtggggttcacctgctgctgtttgttcccgaaactgtactgtgagcccacggcgggggcagattgttctgaggccccagatgtgccaaaacagcccccagggtgggggcgagcgagttctgaggagaggggctgcgggggccgggggtgggtgtgtgcccctcccctgaatggcccccaatgctgctgtttttcaataaaaccagagttgaaggcaaaaaaaaaaaaaaaaaaaaaaaaaaaaaaaaaccagcaaacaaccacaaacaaagggggggcgcacacacaagccacccccacccgaggggccccacacacgcgcggcacaacaacgccccgctgccccaccaggcggcacccacaaggacgcccccaatcaacacacaaaaggacaccggcgacagccaaacaacacgcgcaacaggcgcaccaaccccccccccgggaacccccgcacagacacaccaaccgagagacgccacacaaaacgagccacaccacaccacgagcacacaaagcgcccgccgggccacatcaccacaccacacggcgccccgcggcgcgacacaacacgcgccacaccgccgccccgcccgaaagacagccgcaccgccgacatacacctgcaacacatacaccagagcccacccagcacaagcggcgcagcaccgccgccacagcgccgagccccacagccacgcgccgccggcgcggcacgagccggacagcgcacaagtgggagaagcaagacgaggcagaacacgccacgaccgccgcaagaccaccgcgcgaacccgccgccgcgcggagccaggacacgagagcacgcaacaggacccgaaccgacgagacagaaacagcagaaccgaacctcgcgtacaagagcgaacgccaacagaggcgag

SEQ ID NO: 451115 - DNA, 5122 bp, Homo sapiens
cagcgctgtgcttcgccgtgagccgctcgctgctgctgacgtgcctggtgccggccgcgctgctgggcctgcgctactactacagccgcaaggtgatccgcgcctacctggagtgcgcgctgcacacggacatggcggacatcgagcagtactacatgaagccgcccggctcctgcttctgggtggccgtgctggatggcaacgtggtgggcattgtggctgcacgggcccacgaggaggacaacacggtggagctgctgcggatgtctgtggactcacgtttccgaggcaagggcatcgccaaggcgctgggccggaaggtgctggagttcgccgtggtgcacaactactccgcggtggtgctgggcacgacggccgtcaaggtggccgcccacaagctctacgagtcgctgggcttcagacacatgggcgccagtgaccactacgtgctgccgggcatgaccctctcgctggctgagcgcctcttcttccaggtccgctaccaccgctaccgcctgcagctgcgcgaggagtgaccgccgccgctcgcccggaccgcccgcccggcctgccctgtgcgccttgtgccgcctgcccgccgcccggcgcggcctgctttcagacgctcacttggcgtttgtgttgggtttccccttttcaacatcctgcggttgtctggctggttccggggggtgcggggctgttgttcttcggcgacactttggtgggggtgggttgtttgtcgccatagcccctcgcccttccccacctgcctgggcggcttgccacctgaagagtggcatcttggaccaccgcggctgtccatgacgctgccctgcccgccgccactggggaaggcccagccttgctcaccaagcacagaacctctgcagcagatcccggggccaggctccggccccgcctgcggccccagcgccactgcctgtggaggcccgagctggccacggcgctgctttgctccgcgcatgccgagggtgtggcccggctgagcatgccgcatgcacacaggcccgccctgccgccctgcccagactggacccggagacccgggctggtgagcgcccctgtccccagcccccagctggctgtgggagggcctgcccctgcacccacctcctggagggactggtctgacccgcgccgcccggctctgtccacacctgctttgctctgacgccctccatttctctggctccggcccctcccctgcctgggctgtgctgactggtgtcatcacccaggtgactcccatggcgtccgtggcacagccagggtgggggtccatgggacccctctccccagtgcccactggatcgtgctggcctctcccagatgtccccggggacctcctgcctctggctgacggtccaccctgtgaatcttatcagcccaggctgctgccaacagcgcccagcccacagcttctcccagcctgaaaccaacacattttctaataagttatttagacagaatagcactctgcatgactttaattcttgggacaaaacggtagtttgtaccctaagacacagtttctggcccagtgtgatgggggtgggtggccgggtgggtggagcgtttgctgttggaaacctggagggaaaccctgattggatgtcatttcctgccatggagcacgcctcccagccctggcctgcagggtgggcagggtggggggcaagggagtccgcagcctccgggaggaggggcagggcgctgccttgggctgggtgggaagaggggtggccgcctcggcttccgctggccatgctcctggtctctccttcctgaggtcacaggcaggggctgccctggacggggggcggggggggtggcctggaaggggagacagaggtggagggtggcacaggctgcacattcagcttagaagtggacctggctttggtggcaggagaagaataaacacttgcccagacccctttgtgtgggggaattggggaggggtcgtggcaggcagggtgggccacggaactgggtcccaggcatcaaggccacgtgcagggccatggagggatgcttctcacgaggcgcttcagaagcgagcgaagggacagagaagccctgcgtccaagggccttttgtcctgttagcaattgaggtgtgcagagcactgtacagaccccactcccctgtacattcctccctggaggtgcccggtccccgcttggggatgggagttttgtagactgtacagaaatcggcaccctattttcttgcagctcagattttgttaatctggaatatacagacagacgtaaagtgttttagcaaaatggaaacaaacagttgtgcctttttcctcttttggtttggtttgggtttggcctggggctggtcccagttggtgcggggcatgctgggggcaggaggggcagggcgggccaggtggagtcaggtcttgggggtgtcatgtcggggtgctgccagcgtcccttggtcctgtgcctttggagcctcgggctcctggggtgcagggtgcttgggggtggctgttggagcccaccgacgccagggcagggcctggaggcccagggactgccagtgtctccttgatattgatcctagcagatccccctcctgggggttctgagagtcctgggcagtgtggccttctctcattctggtggcatctgcgcccgtgagtgacctcttccttggctgcactgccctgtgggtggtgagacgcttggccttttttgttgctgccaggacttggtagagatggcaggaagggtgtgcggggtggttgtgtgcagaaccctgccgcccctgaggtgagcagaggcactggtgtgcctgccaggctggggcggagctgcccggaacccttgccaggccaatgtgtagcttggtggcgcccttgaaggccactggggggtaggtgtgtcctcccccggggctggaggccgggtgcctggtgggtgggcctgacctggcccacctcatccctccagcctgggatctcactgctctgcacctgtgcactgacgtgaattttatacgtttgtagaaactctgatgtaacttcttctacctctgaagcgccctcctgggccctgctgtcacgtggctggtgcggcttccccgagtgctggccccctgcccgctccccatgggcacccaccactcaaactctgcgtggtgaggcccggggaaagccaggccgggccctagcactgctcaggggcctggggctcctgggatttctgtgtgtttggaagcctctgtttttggagtggggggcgtggaaggcgggaggggctgacagtgcctggggccagagctgggcgaaggaggacatcctcactggacgagcactgcaggcctgacgagaggctccgggcagctgagggctgaagcgcctcgggatgccccacactgcccagagccacgggtcttgctgtgctgggggtggggtggccccaggcagctgccactgcccaggtgtgagtcgctgcagacctggtccctgagggtgggaggcctgcttgtgctgaagctgccatgtggtctggcccccagaagggctcctgagcgtagggagttgagccccgcagccgtggcggcatctcctcctccttcctccgccccatgcccagccttgcttccggctggtggcatgccttggggccgggcagcaggtgagaagctgcccccggagggaggggccaagggctgggtcagtctggcctgaggggtggatggctggccctgggggaaggctgggcctgggaggccctgtggacagcaggcctgaggccacgaggtcctggggccacccctctcctgctctgggtgtccttctcagagaagatggcagaaggctgcaggccctagaggggacgacgggctggggacgccctgagcttcctggctgtgtggcaggtgctggggaagctctctgggccatagggacctggctcccctctgagaggcccgcctgccctgggacacccagggctgtgctggtggcctgaggctgggaacttgggttcctgggctctgctggcgcctgggctttgtgggggccgaaggtggttgccccgccgggcagggggctgtgtgggccctcgtggggccaccttcctgtcagtgcccgagggacggtgggacagttgcccctgcgccaagggagcccactgccatcccccgtgggctggcgctgcagtcgcgcaccctgtgttgcctgctgacttgcttatgtctgtttggaagctgcttctgtttggccacaggcctgtgttcctgggctgatggccacagagctgacacttggggtttgagttccagacttgcagaccctgggatccgcttactcctccgcgccacggctgctgtgcttccagaggtggcgtgatgcctcccggggccacggtggggtgaaggatggcgagccggacataccattgttggatgtattttttttaaaacagcaataattagccattttaaaggagggatgtacctgtgtgtgtgcatgtgcacgtgtttgagcgtgtgtgtgtgtgtgcaagtgggttcttggatatgtgtagtgtgagcatgtgtgcatgtgtgagcctgtgcacgtgcatgttgtaggtgcataagcatgtacacgcgtgagcatgcatgtgcgtgtacacgtgtataggtgtacatgtgcatgagttgtgtacatgcgtgagcacgtgtatagatgtacgtgtgtgtgcgcatgtgtgcgtgtacatgtgtttgtgtcttgggtatgcataagcatgcacgtgtgtatgaatgtgcgtgtgtatgcatgagcacgtatgcatgtgtgatgcgcatgttcttgtgtacttctctgagggggcacatatgtatgagtgtatgagtgcatacatatgcatatggtgtacgtgtgtgtactttgtgtgtgggcatgtatgcgtatgagtacttgtgtgtggctggtgtatgggtgagcatgcacatgtgtatggatgcatatgtgagctgtacatgtagagtgtacatgtgtgttgcatgagcatgcatgcgtgcgagtgcctgtgtgtgtacttgcatatataggctgatctcgaactcctgacctcaagtgatctgc

SEQ ID NO: 451116 - DNA, 5501 bp, Homo sapiens
cagcgctgtgcttcgccgtgagccgctcgctgctgctgacgtgcctggtgccggccgcgctgctgggcctgcgctactactacagccgcaaggtgatccgcgcctacctggagtgcgcgctgcacacggacatggcggacatcgagcagtactacatgaagccgcccggctcctgcttctgggtggccgtgctggatggcaacgtggtgggcattgtggctgcacgggcccacgaggaggacaacacggtggagctgctgcggatgtctgtggactcacgtttccgaggcaagggcatcgccaaggcgctgggccggaaggtgctggagttcgccgtggtgcacaactactccgcggtggtgctgggcacgacggccgtcaaggtggccgcccacaagctctacgagtcgctgggcttcagacacatgggcgccagtgaccactacgtgctgccgggcatgaccctctcgctggctgagcgcctcttcttccaggtccgctaccaccgctaccgcctgcagctgcgcgaggagtgaccgccgccgctcgcccggaccgcccgcccggcctgccctgtgcgccttgtgccgcctgcccgccgcccggcgcggcctgctttcagacgctcacttggcgtttgtgttgggtttccccttttcaacatcctgcggttgtctggctggttccggggggtgcggggctgttgttcttcggcgacactttggtgggggtgggttgtttgtcgccatagcccctcgcccttccccacctgcctgggcggcttgccacctgaagagtggcatcttggaccaccgcggctgtccatgacgctgccctgcccgccgccactggggaaggcccagccttgctcaccaagcacagaacctctgcagcagatcccggggccaggctccggccccgcctgcggccccagcgccactgcctgtggaggcccgagctggccacggcgctgctttgctccgcgcatgccgagggtgtggcccggctgagcatgccgcatgcacacaggcccgccctgccgccctgcccagactggacccggagacccgggctggtgagcgcccctgtccccagcccccagctggctgtgggagggcctgcccctgcacccacctcctggagggactggtctgacccgcgccgcccggctctgtccacacctgctttgctctgacgccctccatttctctggctccggcccctcccctgcctgggctgtgctgactggtgtcatcacccaggtgactcccatggcgtccgtggcacagccagggtgggggtccatgggacccctctccccagtgcccactggatcgtgctggcctctcccagatgtccccggggacctcctgcctctggctgacggtccaccctgtgaatcttatcagcccaggctgctgccaacagcgcccagcccacagcttctcccagcctgaaaccaacacattttctaataagttatttagacagaatagcactctgcatgactttaattcttgggacaaaacggtagtttgtaccctaagacacagtttctggcccagtgtgatgggggtgggtggccgggtgggtggagcgtttgctgttggaaacctggagggaaaccctgattggatgtcatttcctgccatggagcacgcctcccagccctggcctgcagggtgggcagggtggggggcaagggagtccgcagcctccgggaggaggggcagggcgctgccttgggctgggtgggaagaggggtggccgcctcggcttccgctggccatgctcctggtctctccttcctgaggtcacaggcaggggctgccctggacggggggcggggggggtggcctggaaggggagacagaggtggagggtggcacaggctgcacattcagcttagaagtggacctggctttggtggcaggagaagaataaacacttgcccagacccctttgtgtgggggaattggggaggggtcgtggcaggcagggtgggccacggaactgggtcccaggcatcaaggccacgtgcagggccatggagggatgcttctcacgaggcgcttcagaagcgagcgaagggacagagaagccctgcgtccaagggccttttgtcctgttagcaattgaggtgtgcagagcactgtacagaccccactcccctgtacattcctccctggaggtgcccggtccccgcttggggatgggagttttgtagactgtacagaaatcggcaccctattttcttgcagctcagattttgttaatctggaatatacagacagacgtaaagtgttttagcaaaatggaaacaaacagttgtgcctttttcctcttttggtttggtttgggtttggcctggggctggtcccagttggtgcggggcatgctgggggcaggaggggcagggcgggccaggtggagtcaggtcttgggggtgtcatgtcggggtgctgccagcgtcccttggtcctgtgcctttggagcctcgggctcctggggtgcagggtgcttgggggtggctgttggagcccaccgacgccagggcagggcctggaggcccagggactgccagtgtctccttgatattgatcctagcagatccccctcctgggggttctgagagtcctgggcagtgtggccttctctcattctggtggcatctgcgcccgtgagtgacctcttccttggctgcactgccctgtgggtggtgagacgcttggccttttttgttgctgccaggacttggtagagatggcaggaagggtgtgcggggtggttgtgtgcagaaccctgccgcccctgaggtgagcagaggcactggtgtgcctgccaggctggggcggagctgcccggaacccttgccaggccaatgtgtagcttggtggcgcccttgaaggccactggggggtaggtgtgtcctcccccggggctggaggccgggtgcctggtgggtgggcctgacctggcccacctcatccctccagcctgggatctcactgctctgcacctgtgcactgacgtgaattttatacgtttgtagaaactctgatgtaacttcttctacctctgaagcgccctcctgggccctgctgtcacgtggctggtgcggcttccccgagtgctggccccctgcccgctccccatgggcacccaccactcaaactctgcgtggtgaggcccggggaaagccaggccgggccctagcactgctcaggggcctggggctcctgggatttctgtgtgtttggaagcctctgtttttggagtggggggcgtggaaggcgggaggggctgacagtgcctggggccagagctgggcgaaggaggacatcctcactggacgagcactgcaggcctgacgagaggctccgggcagctgagggctgaagcgcctcgggatgccccacactgcccagagccacgggtcttgctgtgctgggggtggggtggccccaggcagctgccactgcccaggtgtgagtcgctgcagacctggtccctgagggtgggaggcctgcttgtgctgaagctgccatgtggtctggcccccagaagggctcctgagcgtagggagttgagccccgcagccgtggcggcatctcctcctccttcctccgccccatgcccagccttgcttccggctggtggcatgccttggggccgggcagcaggtgagaagctgcccccggagggaggggccaagggctgggtcagtctggcctgaggggtggatggctggccctgggggaaggctgggcctgggaggccctgtggacagcaggcctgaggccacgaggtcctggggccacccctctcctgctctgggtgtccttctcagagaagatggcagaaggctgcaggccctagaggggacgacgggctggggacgccctgagcttcctggctgtgtggcaggtgctggggaagctctctgggccatagggacctggctcccctctgagaggcccgcctgccctgggacacccagggctgtgctggtggcctgaggctgggaacttgggttcctgggctctgctggcgcctgggctttgtgggggccgaaggtggttgccccgccgggcagggggctgtgtgggccctcgtggggccaccttcctgtcagtgcccgagggacggtgggacagttgcccctgcgccaagggagcccactgccatcccccgtgggctggcgctgcagtcgcgcaccctgtgttgcctgctgacttgcttatgtctgtttggaagctgcttctgtttggccacaggcctgtgttcctgggctgatggccacagagctgacacttggggtttgagttccagacttgcagaccctgggatccgcttactcctccgcgccacggctgctgtgcttccagaggtggcgtgatgcctcccggggccacggtggggtgaaggatggcgagccggacataccattgttggatgtattttttttaaaacagcaataattagccattttaaaggagggatgtacctgtgtgtgtgcatgtgcacgtgtttgagcgtgtgtgtgtgtgtgcaagtgggttcttggatatgtgtagtgtgagcatgtgtgcatgtgtgagcctgtgcacgtgcatgttgtaggtgcataagcatgtacacgcgtgagcatgcatgtgcgtgtacacgtgtataggtgtacatgtgcatgagttgtgtacatgcgtgagcacgtgtatagatgtacgtgtgtgtgcgcatgtgtgcgtgtacatgtgtttgtgtcttgggtatgcataagcatgcacgtgtgtatgaatgtgcgtgtgtatgcatgagcacgtatgcatgtgtgatgcgcatgttcttgtgtacttctctgagggggcacatatgtatgagtgtatgagtgcatacatatgcatatggtgtacgtgtgtgtactttgtgtgtgggcatgtatgcgtatgagtacttgtgtgtggctggtgtatgggtgagcatgcacatgtgtatggatgcatatgtgagctgtacatgtagagtgtacatgtgtgttgcatgagcatgcatgcgtgcgagtgcctgtgtgtgtacttgcatatatgtggctgtgcaggtacccggcggtggtgggctggcagtgcccggggaagcaggtcctgctcacggcttccctgctgggccccaggccccgggctgagcctccctggcccctcttgcccctcagtggagcagggcctgggtggagggcctgggcagctccagggcaggtccggggaggccaggcttggggagcacagggggtggggttcacctgctgctgtttgttcccgaaactgtactgtgagcccacggcgggggcagattgttctgaggccccagatgtgccaaaacagcccccagggtgggggcgagcgagttctgaggagaggggctgcgggggccgggggtgggtgtgtgcccctcccctgaatggcccccaatgctgctgtttttcaataaaaccagagttgaaggca

SEQ ID NO: 451117 - DNA, 4615 bp, Homo sapiens
  misc_feature (4584)..(4584): n is a, c, g, or t
  misc_feature (4601)..(4601): n is a, c, g, or t
cagcgctgtgcttcgccgtgagccgctcgctgctgctgacgtgcctggtgccggccgcgctgctgggcctgcgctactactacagccgcaaggtgatccgcgcctacctggagtgcgcgctgcacacggacatggcggacatcgagcagtactacatgaagccgcccggctcctgcttctgggtggccgtgctggatggcaacgtggtgggcattgtggctgcacgggcccacgaggaggacaacacggtggagctgctgcggatgtctgtggactcacgtttccgaggcaagggcatcgccaaggcgctgggccggaaggtgctggagttcgccgtggtgcacaactactccgcggtggtgctgggcacgacggccgtcaaggtggccgcccacaagctctacgagtcgctgggcttcagacacatgggcgccagtgaccactacgtgctgccgggcatgaccctctcgctggctgagcgcctcttcttccaggtccgctaccaccgctaccgcctgcagctgcgcgaggagtgaccgccgccgctcgcccggaccgcccgcccggcctgccctgtgcgccttgtgccgcctgcccgccgcccggcgcggcctgctttcagacgctcacttggcgtttgtgttgggtttccccttttcaacatcctgcggttgtctggctggttccggggggtgcggggctgttgttcttcggcgacactttggtgggggtgggttgtttgtcgccatagcccctcgcccttccccacctgcctgggcggcttgccacctgaagagtggcatcttggaccaccgcggctgtccatgacgctgccctgcccgccgccactggggaaggcccagccttgctcaccaagcacagaacctctgcagcagatcccggggccaggctccggccccgcctgcggccccagcgccactgcctgtggaggcccgagctggccacggcgctgctttgctccgcgcatgccgagggtgtggcccggctgagcatgccgcatgcacacaggcccgccctgccgccctgcccagactggacccggagacccgggctggtgagcgcccctgtccccagcccccagctggctgtgggagggcctgcccctgcacccacctcctggagggactggtctgacccgcgccgcccggctctgtccacacctgctttgctctgacgccctccatttctctggctccggcccctcccctgcctgggctgtgctgactggtgtcatcacccaggtgactcccatggcgtccgtggcacagccagggtgggggtccatgggacccctctccccagtgcccactggatcgtgctggcctctcccagatgtccccggggacctcctgcctctggctgacggtccaccctgtgaatcttatcagcccaggctgctgccaacagcgcccagcccacagcttctcccagcctgaaaccaacacattttctaataagttatttagacagaatagcactctgcatgactttaattcttgggacaaaacggtagtttgtaccctaagacacagtttctggcccagtgtgatgggggtgggtggccgggtgggtggagcgtttgctgttggaaacctggagggaaaccctgattggatgtcatttcctgccatggagcacgcctcccagccctggcctgcagggtgggcagggtggggggcaagggagtccgcagcctccgggaggaggggcagggcgctgccttgggctgggtgggaagaggggtggccgcctcggcttccgctggccatgctcctggtctctccttcctgaggtcacaggcaggggctgccctggacggggggcggggggggtggcctggaaggggagacagaggtggagggtggcacaggctgcacattcagcttagaagtggacctggctttggtggcaggagaagaataaacacttgcccagacccctttgtgtgggggaattggggaggggtcgtggcaggcagggtgggccacggaactgggtcccaggcatcaaggccacgtgcagggccatggagggatgcttctcacgaggcgcttcagaagcgagcgaagggacagagaagccctgcgtccaagggccttttgtcctgttagcaattgaggtgtgcagagcactgtacagaccccactcccctgtacattcctccctggaggtgcccggtccccgcttggggatgggagttttgtagactgtacagaaatcggcaccctattttcttgcagctcagattttgttaatctggaatatacagacagacgtaaagtgttttagcaaaatggaaacaaacagttgtgcctttttcctcttttggtttggtttgggtttggcctggggctggtcccagttggtgcggggcatgctgggggcaggaggggcagggcgggccaggtggagtcaggtcttgggggtgtcatgtcggggtgctgccagcgtcccttggtcctgtgcctttggagcctcgggctcctggggtgcagggtgcttgggggtggctgttggagcccaccgacgccagggcagggcctggaggcccagggactgccagtgtctccttgatattgatcctagcagatccccctcctgggggttctgagagtcctgggcagtgtggccttctctcattctggtggcatctgcgcccgtgagtgacctcttccttggctgcactgccctgtgggtggtgagacgcttggccttttttgttgctgccaggacttggtagagatggcaggaagggtgtgcggggtggttgtgtgcagaaccctgccgcccctgaggtgagcagaggcactggtgtgcctgccaggctggggcggagctgcccggaacccttgccaggccaatgtgtagcttggtggcgcccttgaaggccactggggggtaggtgtgtcctcccccggggctggaggccgggtgcctggtgggtgggcctgacctggcccacctcatccctccagcctgggatctcactgctctgcacctgtgcactgacgtgaattttatacgtttgtagaaactctgatgtaacttcttctacctctgaagcgccctcctgggccctgctgtcacgtggctggtgcggcttccccgagtgctggccccctgcccgctccccatgggcacccaccactcaaactctgcgtggtgaggcccggggaaagccaggccgggccctagcactgctcaggggcctggggctcctgggatttctgtgtgtttggaagcctctgtttttggagtggggggcgtggaaggcgggaggggctgacagtgcctggggccagagctgggcgaaggaggacatcctcactggacgagcactgcaggcctgacgagaggctccgggcagctgagggctgaagcgcctcgggatgccccacactgcccagagccacgggtcttgctgtgctgggggtggggtggccccaggcagctgccactgcccaggtgtgagtcgctgcagacctggtccctgagggtgggaggcctgcttgtgctgaagctgccatgtggtctggcccccagaagggctcctgagcgtagggagttgagccccgcagccgtggcggcatctcctcctccttcctccgccccatgcccagccttgcttccggctggtggcatgccttggggccgggcagcaggtgagaagctgcccccggagggaggggccaagggctgggtcagtctggcctgaggggtggatggctggccctgggggaaggctgggcctgggaggccctgtggacagcaggcctgaggccacgaggtcctggggccacccctctcctgctctgggtgtccttctcagagaagatggcagaaggctgcaggccctagaggggacgacgggctggggacgccctgagcttcctggctgtgtggcaggtgctggggaagctctctgggccatagggacctggctcccctctgagaggcccgcctgccctgggacacccagggctgtgctggtggcctgaggctgggaacttgggttcctgggctctgctggcgcctgggctttgtgggggccgaaggtggttgccccgccgggcagggggctgtgtgggccctcgtggggccaccttcctgtcagtgcccgagggacggtgggacagttgcccctgcgccaagggagcccactgccatcccccgtgggctggcgctgcagtcgcgcaccctgtgttgcctgctgacttgcttatgtctgtttggaagctgcttctgtttggccacaggcctgtgttcctgggctgatggccacagagctgacacttggggtttgagttccagacttgcagaccctgggatccgcttactcctccgcgccacggctgctgtgcttccagaggtggcgtgatgcctcccggggccacggtggggtgaaggatggcgagccggacataccattgttggatgtattttttttaaaacagcaataattagccattttaaaggagggatgtacctgtgtgtgtgcatgtgcacgtgtttgagcgtgtgtgtgtgtggggcacgtagggtctcgaggacagtgaagcccanggcaggtctcaacccgngctgccattgggct

SEQ ID NO: 451118 - DNA, 991 bp, Homo sapiens
ggcacgaggcgcgcgcgctcgcgcaccacgcgccccgcgcggcccgcccggatcgtggcctctcgagagcaagacatgggaaagcggaaccaccaaaaggagtgatgatcaacgatctcatgataaatctggatgctagttctcatgcctcaggacatcctactgggaacgacacaccagctcctgggatcagactttcatctacttaggacccctctttgcccagactactaaagccagtcttcactagccacgaatggctacccaaaggaaacacttggtgaaagattttaatccttacattacctgctatatctgtaaagggtatctgatcaagccaacaacagtgacggaatgcctccatacatctgcagaatcctactggatgtccacttggatgtcctgaagccacctgaaactcagcatatctacgaatgatcaaatgggatgccagcactcagttatccaagcaagaaatatgctccatgcttgactctttaccctcactaacaaaactgggcaaagtcctgctggtctctctctttaatacttctcaaatctgtccctttagtttcatccctctgttactgttctcattcagattcttattacatctcaccaaagccactgcagcacattcttaactgtgtccaagtggtaataattaaaaacagcttactgtctttatcattatcactcttaacccaccctaaaatttcctaaaggtatcccgttgacctcaggatacattaaagctacttagtggtgactggtttctgcctaccacttcctcccctaccacctaacactcacacatacaaatacttggttcaactgtttgctctccttgaaatgaatgcctcctctgtgcccagctagcagttacccatcctttaaaactcatcccctctaagatgtgccctaccacctgcagatttgggttaagtgtctcaataaaatcttaaatgaataaatgcatggctaataagtt

SEQ ID NO: 451119 - DNA, 769 bp, Homo sapiens
ggcacgaggcgcgcgcgctcgcgcaccacgcgccccgcgcggcccgcccggatcgtggcctctcgagagcaagacatgggaaagcggaaccaccaaaaggagtgatgatcaacgatctcatgataaatctggatgctagttctcatgcctcaggacatcctactgggaacgacacaccagctcctgggatcagactttcatctacttaggacccctctttgcccagactactaaagccagtcttcactagccacgaatggctacccaaaggaaacacttggtgaaagattttaatccttacattacctgctatatctgtaaagggtatctgatcaagccaacaacagtgacggaatgcctccatacattctgtaagacttgtattgttcagcactttgaagatagcaatgattgcccaaggtgtggcaaccaagttcatgagacaaatccattagaaatgttgaggttggacaatacattagaggaaattatatttaagctggtccctggactacgagaacaagaacttgagcgtgaatctgaattttggaagaaaaataagcctcaagaaaatggacaagatgatacttcaaaagctgacaaaccgaaagtagatgaagaaggtgatgaaaatgaagatgataaagattatcacagaagtgacccacaaattgctatctgtctagattgtttacgaaataatgggcaatcaggggacaatgtagtaaagggtttaactgacacgaaattccttcgatgttctaacacg

SEQ ID NO: 451120 - DNA, 1525 bp, Homo sapiens
  misc_feature (11)..(11): n is a, c, g, or t
agcgagtgggnggagttgcccttggaggcggcaccggacctgggccccgaggcccgccgcgccctgtcgggcctgagccgagtggccccacagagccggcgcgctcccgcctgcagggggagagcagacggggcgcggggaccggccaggccgcggcgggtgctgtttctgtttcactttccttcactctgaggccggcgcgctggcgggcgaggagcggcggcggtggcggccgctggacatgggaaagcggaaccaccaaaaggagtgatgatcaacgatctcatgataaatctggatgctagttctcatgcctcaggacatcctactgggaacgacacaccagctcctgggatcagactttcatctacttaggacccctctttgcccagactactaaagccagtcttcactagccacgaatggctacccaaaggaaacacttggtgaaagattttaatccttacattacctgctatatctgtaaagggtatctgatcaagccaacaacagtgacggaatgcctccatacatctgcagaatcctactggatgtccacttggatgtcctgaagccacctgaaactcagcatatctacgaatgatcaaatgggatgccagcactcagttatccaagcaagaaatatgctccatgcttgactctttaccctcactaacaaaactgggcaaagtcctgctggtctctctctttaatacttctcaaatctgtccctttagtttcatccctctgttactgttctcattcagattcttattacatctcaccaaagccactgcagcacattcttaactgtgtccaagtggtaataattaaaaacagcttactgtctttatcattatcactcttaacccaccctaaaatttcctaaaggtatcccgttgacctcaggatacattaaagctacttagtggtgactggtttctgcctaccacttcctcccctaccacctaacactcacacatacaaatacttggttcaactgtttgctctccttgaaatgaatgcctcctctgtgcccagctagcagttacccatcctttaaaactcatcccctctaagatgtgccctaccacctgcagatttgggttaagtgtctcaataaaatcttaaatgaataaatgcatggctaataagttattttattgtgtatttttcctttcaaagattcaaatgcagtgataggtaacttgaaacatgtaggcattgttggttaggaattacaaatttaggaaaactgtctcctaggatctacataggcatctttggggtcttagggagagggagagactctggactggggactagaaattgatggccctagattaagggatgttctgtctctttcaccaggtgaccctggtgaaaagagaaactttaaagctgcttagaatgtatctgctgggtggtataggttgttgatttaaaacaaaagactttttacttaaactaaggacaaaggggctatgttccagcagctcaaatgtgaccaatacagtgtattggt

SEQ ID NO: 451121 - DNA, 935 bp, Homo sapiens
  misc_feature (11)..(11): n is a, c, g, or t
agcgagtgggnggagttgcccttggaggcggcaccggacctgggccccgaggcccgccgcgccctgtcgggcctgagccgagtggccccacagagccggcgcgctcccgcctgcagggggagagcagacggggcgcggggaccggccaggccgcggcgggtgctgtttctgtttcactttccttcactctgaggccggcgcgctggcgggcgaggagcggcggcggtggcggccgctggacatgggaaagcggaaccaccaaaaggagtgatgatcaacgatctcatgataaatctggatgctagttctcatgcctcaggacatcctactgggaacgacacaccagctcctgggatcagactttcatctacttaggacccctctttgcccagactactaaagccagtcttcactagccacgaatggctacccaaaggaaacacttggtgaaagattttaatccttacattacctgctatatctgtaaagggtatctgatcaagccaacaacagtgacggaatgcctccatacattctgtaagacttgtattgttcagcactttgaagatagcaatgattgcccaaggtgtggcaaccaagttcatgagacaaatccattagaaatgttgaggttggacaatacattagaggaaattatatttaagctggtccctggactacgagaacaagaacttgagcgtgaatctgaattttggaagaaaaataagcctcaagaaaatggacaagatgatacttcaaaagctgacaaaccgaaagtagatgaagaaggtgatgaaaatgaagatgataaagattatcacagaagtgacccacaaattgctatctgtctagattgtttacgaaataatgggcaatcaggggacaatgtagtaaagggtttaactgacacgaaattccttcgatgttctaacacg

SEQ ID NO: 451122 - DNA, 659 bp, Homo sapiens
atgatacttcaaaagctgacaaaccgaaagtagatgaagaaggtgatgaaaatgaagatgataaagattatcacagaagtgacccacaaattgctatctgtctagattgtttacgaaataatgggcaatcaggggacaatgtagtaaaggtgagtgaacaagtactatggtatttttatgatcagtttatagtaaacccttgataatttgttgacaaattttctaatgcttcaaaatgtttgctttcaaagttttaattaacataattaaataaaatgccattctttgacaatcctatgcttagaaatggttactattcccacaactgaactgtcttgggccaatgccaccatctagtggctaatgcccagaatcacacctctgtttctccttttatacctttgctggaaattcatatgcatggtttctgttttttagagtggtgaccaacttagacttagagaatttcatgtcactggtagttctagcccttttattcattctcttctaattttatcctttatttctctatttttatttgcaactcaacaagatttccatgtcagagctaacatattttgtgaataatttaatcaattagttttgaagtaaaattagatgttgtaaaatgcctctgaacttttaaactccttgaaggc

SEQ ID NO: 451123 - DNA, 371 bp, Homo sapiens
acatgggaaagcggaaccaccaaaaggagtgatgatcaacgatctcatgataaatctggatgctagttctcatgcctcaggacatcctactgggaacgacacaccagctcctgggatcagactttcatctacttaggacccctctttgcccagactactaaagccagtcttcactagccacgaatggctacccaaaggaaacacttggtgaaagattttaatccttacattacctgctatatctgtaaagggtatctgatcaagccaacaacagtgacggaatgcctccatacatgtaagtattcttttaggttattatacctatcaaagtttatatgtacattttgttcttttaaaattgccatgttttg

SEQ ID NO: 451124 - DNA, 1157 bp, Homo sapiens
  misc_feature (11)..(11): n is a, c, g, or t
agcgagtgggnggagttgcccttggaggcggcaccggacctgggccccgaggcccgccgcgccctgtcgggcctgagccgagtggccccacagagccggcgcgctcccgcctgcagggggagagcagacggggcgcggggaccggccaggccgcggcgggtgctgtttctgtttcactttccttcactctgaggccggcgcgctggcgggcgaggagcggcggcggtggcggccgctggacatgggaaagcggaaccaccaaaaggagtgatgatcaacgatctcatgataaatctggatgctagttctcatgcctcaggacatcctactgggaacgacacaccagctcctgggatcagactttcatctacttaggacccctctttgcccagactactaaagccagtcttcactagccacgaatggctacccaaaggaaacacttggtgaaagattttaatccttacattacctgctatatctgtaaagggtatctgatcaagccaacaacagtgacggaatgcctccatacatctgcagaatcctactggatgtccacttggatgtcctgaagccacctgaaactcagcatatctacgaatgatcaaatgggatgccagcactcagttatccaagcaagaaatatgctccatgcttgactctttaccctcactaacaaaactgggcaaagtcctgctggtctctctctttaatacttctcaaatctgtccctttagtttcatccctctgttactgttctcattcagattcttattacatctcaccaaagccactgcagcacattcttaactgtgtccaagtggtaataattaaaaacagcttactgtctttatcattatcactcttaacccaccctaaaatttcctaaaggtatcccgttgacctcaggatacattaaagctacttagtggtgactggtttctgcctaccacttcctcccctaccacctaacactcacacatacaaatacttggttcaactgtttgctctccttgaaatgaatgcctcctctgtgcccagctagcagttacccatcctttaaaactcatcccctctaagatgtgccctaccacctgcagatttgggttaagtgtctcaataaaatcttaaatgaataaatgcatggctaataagtt

SEQ ID NO: 451125 - DNA, 1125 bp, Homo sapiens
  misc_feature (11)..(11): n is a, c, g, or t
agcgagtgggnggagttgcccttggaggcggcaccggacctgggccccgaggcccgccgcgccctgtcgggcctgagccgagtggccccacagagccggcgcgctcccgcctgcagggggagagcagacggggcgcggggaccggccaggccgcggcgggtgctgtttctgtttcactttccttcactctgaggccggcgcgctggcgggcgaggagcggcggcggtggcggccgctggacatgggaaagcggaaccaccaaaaggagtgatgatcaacgatctcatgataaatctggatgctagttctcatgcctcaggacatcctactgggaacgacacaccagctcctgggatcagactttcatctacttaggacccctctttgcccagactactaaagccagtcttcactagccacgaatggctacccaaaggaaacacttggtgaaagattttaatccttacattacctgctatatctgtaaagggtatctgatcaagccaacaacagtgacggaatgcctccatacatctgcagaatcctactggatgtccacttggatgtcctgaagccacctgaaactcagcatatctacgaatgatcaaatgggatgccagcactcagttatccaagcaagaaatatgctccatgcttgactctttaccctcactaacaaaactgggcaaagtcctgctggtctctctctttaatacttctcaaatctgtccctttagtttcatccctctgttactgttctcattcagattcttattacatctcaccaaagccactgcagcacattcttaactgtgtccaagtggtaataattaaaaacagcttactgtctttatcattatcactcttaacccaccctaaaatttcctaaaggtatcccgttgacctcaggatacattaaagctacttagtggtgactggtttctgcctaccacttcctcccctaccacctaacactcacacatacaaatacttgctcctctgtgcccagctagcagttacccatcctttaaaactcatcccctctaagatgtgccctaccacctgcagatttgggttaagtgtctcaataaaatcttaaatgaataaatgcatggctaataagtt

SEQ ID NO: 451126 - DNA, 525 bp, Homo sapiens
ggcaagctggtgaaaggattcaccatcgccgcccgcaacggcgccgataccgcgacccacgcgcaccgcgattagggttagtactaaccctaatcgcccctttagtttcatccctctgttactgttctcattcagattcttattacatctcaccaaagccactgcagcacattcttaactgtgtccaagtggtaataattaaaaacagcttactgtctttatcattatcactcttaacccaccctaaaatttcctaaaggtatcccgttgacctcaggatacattaaagctacttagtggtgactggtttctgcctaccacttcctcccctaccacctaacactcacacatacaaatacttggttcaactgtttgctctccttgaaatgaatgcctcctctgtgcccagctagcagttacccatcctttaaaactcatcccctctaagatgtgccctaccacctgcagatttgggttaagtgtctcaataaaatcttaaatgaataaatgcatggctaataagtt

SEQ ID NO: 451127 - DNA, 2400 bp, Homo sapiens
gtgcagaaagcaccgtcttttactagaagaagacaataaaatgttggtcaatgaactgaatcattcgaaagaaaaagaatgccaatatgaaaaagagaaagcagaaagagaagtagctgtgagacagcttcaacaaaaacgagatgatgtcttaaacaaaggatcagcaacaaaagctctgctggatgcttcatcgcgtcactgcacctatttagaaaatgggatgcaggattcaaggaagaaattagaccagatgagaagtcaatttcaagaaatacaggatcaacttacagctactataagatgtactaaggagatggaaggcgacacacaaaagcttgaagtagaacatgtgatgatgagaaaaattattaaaaaacaggatgaccaaattgagcggcttgagaaaatcctgcagcattcaagtttgatgctgcaggtgtttgagagctagatgaagatatggacatttctggaattaagagccccctctacattgagcacaagacagtgacgaatccacattcttcagccagaaagtcacctctgagagccaaatgtctgactatagaaaggagagtcaaagaatgataacgacatctcaggaaaattgtgaaaataatcagcagccggatgtggataaccctttcaaatttctcctggggcctccaaccacccccactggtgttctcctgctgacagtgatttcaattttttctgggctggagctccctgatggaggggcaggccaccatctttgctgtttttgcaacttagccacttcagccttcagtctttggagtgtccaaggagaccagggggtgatgtggaccctcagcatagcacagctgctctataaagatgaggccagactgcttttttgagcactttcccaatgccattcctcctcactgggcaaaacctccaaactggggtctccagccacctcctacaggtgtgtttgggccagcaacaagttcattcatacctccctagggcaaagcttccaaagggagcggtaggctgccatctttgctgtttcacaggcttcactgatgataactccaggtactggaaaatctgaggctactagagactggagcgggccctgggcatactgcagcagccctatggaaaagtggccagactgttacctgggttcccattcctatatcttctcactaggcaagtcttgcaggcctgggcctctacctaaccccccctaccagaactgttgagccagtagcaactcagccactccctggagagagcctccaggggcaactgaaagcctctctgccactgcttctgcagtggaactgtccttgctaccctcagactgatgaaggagctaacacccttatctacaccttcaacaagctttaattgaccaaagcccatctctcatgggttctacacactccccactgctcatgacagggaacccctggattggcccccacagcacgaattctccatcctgattgctgattgcagtaaacagttgctgtattctccaggggtggtggaactctgaggagacaaacaaaagacccttggctacaaccactactaatgtcccttcctcttctgcctcaaagttaggaaagaaatataaacactgagattgccccagagctgcagtgggcagcctaggagtgccaagccatgacctacagccagcactcaagggggagagaagcacattttcagatcattgagagggaacatggctgcaactgtaaggaaacataggggagccacatgaccaagcaagagtctaccaactgaccagtaagcccaagtgccacctactggatcacatcccaaagcttcagcatcaaaaataccctactaatatactcccctctgaaaccagaaatgagaagtcagcttcaaataaagaccctgcacaaagcctcagcctggtgaaaacatccgaaaataagtctacggactgtactcaatctacactgcaattaaaggaaaacccataggtggaaatgagaagaaaccaatgcaagaactccagtaactcaaatggcctctgtgtcatatgtccttctaacaaccacaccagttctccaacaagagttcttaacctggatgaactgtctggaattacataaatataattcagaatatggataggaaaaaaaatcatcaagactcaggagaatggcaaaacccaatccaaggaaaataagaataacagtaaagtgttacaggagctgaaggataaagtagctggtataataaaaaagaacctaaccgatctgaaagcgccgaagaacacaatacaagaattccacaatgcaatcacaagtattaacagcagaaaaaaaaacctgaggaacgaatctcagaacttgaagattggttctctaaaataagatggac

SEQ ID NO: 451128 - DNA, 537 bp, Homo sapiens
gtgcagaaagcaccgtcttttactagaagaagacaataaaatgttggtcaatgaactgaatcattcgaaagaaaaagaatgccaatatgaaaaagagaaagcagaaagagaagtagctgtgagacagcttcaacaaaaacgagatgatgtcttaaacaaaggatcagcaacaaaagctctgctggatgcttcatcgcgtcactgcacctatttagaaaatgggatgcaggattcaaggaagaaattagaccagatgagaagtcaatttcaagaaatacaggatcaacttacagctactataagatgtactaaggagatggaaggcgacacacaaaagcttgaagtagaacatgtgatgatgagaaaaattattaaaaaacaggatgaccaaattgagcggcttgagaaaatcctgcagcattcaagtttgatgctgcaggtgtttgagagctagatgaaggtatgttgccaaaatttatgaattaaattcaaatcattgatttctgaaataaactctaagtagtgaacggtattccc

SEQ ID NO: 451129 - DNA, 2828 bp, Homo sapiens
gaagaatgttgtgttttagtcctagagcagggtctgtgaacttttctgtaaagggccagatagtgttatgtaaggctttgtgagccataagatccttgttgcaataactcggccctgcaattacagcacaaaagtagccatgaacaatatgcagactgaaggggtgtagcagtgtcccactaaaattacttacaaaaaacaggtaatgggatgatttctcctagattatgaccttttataaataaaaaagattgtgatagtctaaaatatttcatatatattttgttgattcattcatctactgatggacatttaggtcatttccaaatgtaattttttaaaattctttgtttcagtttcaagaaatacaggatcaacttacagctactataagatgtactaaggagatggaaggcgacacacaaaagtaaaatttgaagcagcacacaaaataacttgagtatttataaagcaaaagagcactgtagtatgaaaattgtatcagttatgataattagtatgtctttgtgaagccaaaaaagtttcatttgtaagctatatcgaaatacatcatttttctacattattcctaaattttgcatattatcaccaaaacacaggtagaaaatgacacagtagcccaatcgtctacttttgtgattgctaagaatttgtgtaattataccttcagaagtttgtttagaatttacatgatttaaaaaaaattacgtgtgagagtaattattttaaaatgcacattttaggcttgaagtagaacatgtgatgatgagaaaaattattaaaaaacaggatgaccaaattgagcggcttgagaaaatcctgcagcattcaagtttgatgctgcaggtgtttgagagctagatgaagatatggacatttctggaattaagagccccctctacattgagcacaagacagtgacgaatccacattcttcagccagaaagtcacctctgagagccaaatgtctgactatagaaaggagagtcaaagaatgataacgacatctcaggaaaattgtgaaaataatcagcagccggatgtggataaccctttcaaatttctcctggggcctccaaccacccccactggtgttctcctgctgacagtgatttcaattttttctgggctggagctccctgatggaggggcaggccaccatctttgctgtttttgcaacttagccacttcagccttcagtctttggagtgtccaaggagaccagggggtgatgtggaccctcagcatagcacagctgctctataaagatgaggccagactgcttttttgagcactttcccaatgccattcctcctcactgggcaaaacctccaaactggggtctccagccacctcctacaggtgtgtttgggccagcaacaagttcattcatacctccctagggcaaagcttccaaagggagcggtaggctgccatctttgctgtttcacaggcttcactgatgataactccaggtactggaaaatctgaggctactagagactggagcgggccctgggcatactgcagcagccctatggaaaagtggccagactgttacctgggttcccattcctatatcttctcactaggcaagtcttgcaggcctgggcctctacctaaccccccctaccagaactgttgagccagtagcaactcagccactccctggagagagcctccaggggcaactgaaagcctctctgccactgcttctgcagtggaactgtccttgctaccctcagactgatgaaggagctaacacccttatctacaccttcaacaagctttaattgaccaaagcccatctctcatgggttctacacactccccactgctcatgacagggaacccctggattggcccccacagcacgaattctccatcctgattgctgattgcagtaaacagttgctgtattctccaggggtggtggaactctgaggagacaaacaaaagacccttggctacaaccactactaatgtcccttcctcttctgcctcaaagttaggaaagaaatataaacactgagattgccccagagctgcagtgggcagcctaggagtgccaagccatgacctacagccagcactcaagggggagagaagcacattttcagatcattgagagggaacatggctgcaactgtaaggaaacataggggagccacatgaccaagcaagagtctaccaactgaccagtaagcccaagtgccacctactggatcacatcccaaagcttcagcatcaaaaataccctactaatatactcccctctgaaaccagaaatgagaagtcagcttcaaataaagaccctgcacaaagcctcagcctggtgaaaacatccgaaaataagtctacggactgtactcaatctacactgcaattaaaggaaaacccataggtggaaatgagaagaaaccaatgcaagaactccagtaactcaaatggcctctgtgtcatatgtccttctaacaaccacaccagttctccaacaagagttcttaacctggatgaactgtctggaattacataaatataattcagaatatggataggaaaaaaaatcatcaagactcaggagaatggcaaaacccaatccaaggaaaataagaataacagtaaagtgttacaggagctgaaggataaagtagctggtataataaaaaagaacctaaccgatctgaaagcgccgaagaacacaatacaagaattccacaatgcaatcacaagtattaacagcagaaaaaaaaacctgaggaacgaatctcagaacttgaagattggttctctaaaataagatggac

SEQ ID NO: 451130 - DNA, 1372 bp, Homo sapiens
gaagaatgttgtgttttagtcctagagcagggtctgtgaacttttctgtaaagggccagatagtgttatgtaaggctttgtgagccataagatccttgttgcaataactcggccctgcaattacagcacaaaagtagccatgaacaatatgcagactgaaggggtgtagcagtgtcccactaaaattacttacaaaaaacaggtaatgggatgatttctcctagattatgaccttttataaataaaaaagattgtgatagtctaaaatatttcatatatattttgttgattcattcatctactgatggacatttaggtcatttccaaatgtaattttttaaaattctttgtttcagtttcaagaaatacaggatcaacttacagctactataagatgtactaaggagatggaaggcgacacacaaaagtaaaatttgaagcagcacacaaaataacttgagtatttataaagcaaaagagcactgtagtatgaaaattgtatcagttatgataattagtatgtctttgtgaagccaaaaaagtttcatttgtaagctatatcgaaatacatcatttttctacattattcctaaattttgcatattatcaccaaaacacaggtagaaaatgacacagtagcccaatcgtctacttttgtgattgctaagaatttgtgtaattataccttcagaagtttgtttagaatttacatgatttaaaaaaaattacgtgtgagagtaattattttaaaatgcacattttaggcttgaagtagaacatgtgatgatgagaaaaattattaaaaaacaggatgaccaaattgagcggcttgagaaaatcctgcagcattcaagtttgatgctgcaggtgtttgagagctagatgaagcatccagccaaactagactacatggagctccacagtgatcgtcttcacctccagctgtttgcatttacttcttccctctatcctacatgtgttttccttccccttcagatatcaacctatgaattgcctctaccaaaaagcctacaatattgacacaaacctgggctagtatcccttctatgtcttccaataagtgctgtcttatgcttgtcattgtatgtatgactctgtatgggaattgcctgtttgttttttcagattatagcatacagttgttgaggggcggaccgtatcatctttatcttgtaattccagtgcttgtcctagtaccttagcacatggttgctgaatacatgaacgaagagtgagaaaccagaagctctgttacttaactgccatgataatgaattcggtgtgcaactatgggcaaattatatttaatagtaattgcatattgtacatatttttcattcttattaacact

SEQ ID NO: 451131 - DNA, 965 bp, Homo sapiens
gaagaatgttgtgttttagtcctagagcagggtctgtgaacttttctgtaaagggccagatagtgttatgtaaggctttgtgagccataagatccttgttgcaataactcggccctgcaattacagcacaaaagtagccatgaacaatatgcagactgaaggggtgtagcagtgtcccactaaaattacttacaaaaaacaggtaatgggatgatttctcctagattatgaccttttataaataaaaaagattgtgatagtctaaaatatttcatatatattttgttgattcattcatctactgatggacatttaggtcatttccaaatgtaattttttaaaattctttgtttcagtttcaagaaatacaggatcaacttacagctactataagatgtactaaggagatggaaggcgacacacaaaagtaaaatttgaagcagcacacaaaataacttgagtatttataaagcaaaagagcactgtagtatgaaaattgtatcagttatgataattagtatgtctttgtgaagccaaaaaagtttcatttgtaagctatatcgaaatacatcatttttctacattattcctaaattttgcatattatcaccaaaacacaggtagaaaatgacacagtagcccaatcgtctacttttgtgattgctaagaatttgtgtaattataccttcagaagtttgtttagaatttacatgatttaaaaaaaattacgtgtgagagtaattattttaaaatgcacattttaggcttgaagtagaacatgtgatgatgagaaaaattattaaaaaacaggatgaccaaattgagcggcttgagaaaatcctgcagcattcaagtttgatgctgcaggtgtttgagagctagatgaaggtatgttgccaaaatttatgaattaaattcaaatcattgatttctgaaataaactctaagtagtgaacggtattccc

SEQ ID NO: 451132 - DNA, 2737 bp, Homo sapiens
gtgcagaaagcaccgtcttttactagaagaagacaataaaatgttggtcaatgaactgaatcattcgaaagaaaaagaatgccaatatgaaaaagagaaagcagaaagagaagtagctgtgagacagcttcaacaaaaacgagatgatgtcttaaacaaaggatcagcaacaaaagctctgctggatgcttcatcgcgtcactgcacctatttagaaaatgggatgcaggattcaaggaagaaattagaccagatgagaagtcaatttcaagaaatacaggatcaacttacagctactataagatgtactaaggagatggaaggcgacacacaaaagtaaaatttgaagcagcacacaaaataacttgagtatttataaagcaaaagagcactgtagtatgaaaattgtatcagttatgataattagtatgtctttgtgaagccaaaaaagtttcatttgtaagctatatcgaaatacatcatttttctacattattcctaaattttgcatattatcaccaaaacacaggtagaaaatgacacagtagcccaatcgtctacttttgtgattgctaagaatttgtgtaattataccttcagaagtttgtttagaatttacatgatttaaaaaaaattacgtgtgagagtaattattttaaaatgcacattttaggcttgaagtagaacatgtgatgatgagaaaaattattaaaaaacaggatgaccaaattgagcggcttgagaaaatcctgcagcattcaagtttgatgctgcaggtgtttgagagctagatgaagatatggacatttctggaattaagagccccctctacattgagcacaagacagtgacgaatccacattcttcagccagaaagtcacctctgagagccaaatgtctgactatagaaaggagagtcaaagaatgataacgacatctcaggaaaattgtgaaaataatcagcagccggatgtggataaccctttcaaatttctcctggggcctccaaccacccccactggtgttctcctgctgacagtgatttcaattttttctgggctggagctccctgatggaggggcaggccaccatctttgctgtttttgcaacttagccacttcagccttcagtctttggagtgtccaaggagaccagggggtgatgtggaccctcagcatagcacagctgctctataaagatgaggccagactgcttttttgagcactttcccaatgccattcctcctcactgggcaaaacctccaaactggggtctccagccacctcctacaggtgtgtttgggccagcaacaagttcattcatacctccctagggcaaagcttccaaagggagcggtaggctgccatctttgctgtttcacaggcttcactgatgataactccaggtactggaaaatctgaggctactagagactggagcgggccctgggcatactgcagcagccctatggaaaagtggccagactgttacctgggttcccattcctatatcttctcactaggcaagtcttgcaggcctgggcctctacctaaccccccctaccagaactgttgagccagtagcaactcagccactccctggagagagcctccaggggcaactgaaagcctctctgccactgcttctgcagtggaactgtccttgctaccctcagactgatgaaggagctaacacccttatctacaccttcaacaagctttaattgaccaaagcccatctctcatgggttctacacactccccactgctcatgacagggaacccctggattggcccccacagcacgaattctccatcctgattgctgattgcagtaaacagttgctgtattctccaggggtggtggaactctgaggagacaaacaaaagacccttggctacaaccactactaatgtcccttcctcttctgcctcaaagttaggaaagaaatataaacactgagattgccccagagctgcagtgggcagcctaggagtgccaagccatgacctacagccagcactcaagggggagagaagcacattttcagatcattgagagggaacatggctgcaactgtaaggaaacataggggagccacatgaccaagcaagagtctaccaactgaccagtaagcccaagtgccacctactggatcacatcccaaagcttcagcatcaaaaataccctactaatatactcccctctgaaaccagaaatgagaagtcagcttcaaataaagaccctgcacaaagcctcagcctggtgaaaacatccgaaaataagtctacggactgtactcaatctacactgcaattaaaggaaaacccataggtggaaatgagaagaaaccaatgcaagaactccagtaactcaaatggcctctgtgtcatatgtccttctaacaaccacaccagttctccaacaagagttcttaacctggatgaactgtctggaattacataaatataattcagaatatggataggaaaaaaaatcatcaagactcaggagaatggcaaaacccaatccaaggaaaataagaataacagtaaagtgttacaggagctgaaggataaagtagctggtataataaaaaagaacctaaccgatctgaaagcgccgaagaacacaatacaagaattccacaatgcaatcacaagtattaacagcagaaaaaaaaacctgaggaacgaatctcagaacttgaagattggttctctaaaataagatggac

SEQ ID NO: 451133 - DNA, 405 bp, Homo sapiens
gtgcagaaagcaccgtcttttactagaagaagacaataaaatgttggtcaatgaactgaatcattcgaaagaaaaagaatgccaatatgaaaaagagaaagcagaaagagaagtagctgtgagacagcttcaacaaaaacgagatgatgtcttaaacaaaggatcagcaacaaaagctctgctggatgcttcatcgcgtcactgcacctatttagaaaatgggatgcaggattcaaggaagaaattagaccagatgagaagtcaagtatgtatgcaactttgcacaccaacaactgttaatctgtagctagttaactaatataaagtgttttggggtactaattttagtggatggctttcttttgtatttttatgataattaatgttattaaaattttatagtgg

SEQ ID NO: 451134 - DNA, 2041 bp, Homo sapiens
atgtgttgtcgtgcaggtagaggcttactagaagtgtgaaaacgtaggcttggattaaggcgacagcgatttctaggatagtcagtagaattagaattgtgaagatgataagtgtagagggaaggttaatggttgatattgctagggtggcgcttccaattaggtgcatgagtaggtggcctgcagtaatgttagcggttaggcgtacggccagggctattggttgaatgagtaggctgatggtttcgataataactagtatggggataaggggtgtaggtgtgccttgtggtaagaagtgggctagggcatttttaatcttagagcgaaagcctataatcactgcgcccgctcataaggggatggccatggctaggtttatagatagttgggtggttggtgtaaatgagtgaggcaggagtccgaggaggttagggaaggtgcgaataagcggggaaattcttctcggctgactcagtcatttcatttcttcatgtttgagccgattttttctcccgtaaatgccttgaatcagcctatttagaccgtttcttcgccatttaaggcgttatccccagtttttagtgagatctctcccactgacgtatcatttggtccgcccgaaacaggttggccagcgtgaataacatcgccagttggttatcgtttttcagcaaccccttgtatctggctttcacgaagccgaactgtcgcttgatgatgcgaaatgggtgctccaccctggcccggatgctggctttcatgtattcgatgttgatggccgttttgttcttgcgtggatgctgtttcaaggttcttaccttgccggggcgctcggcgatcagccagtccacatccacctcggccagctcctcgcgctgtggcgccccttggtagccggcatcggctgagacaaattgctcctctccatgcagcagattacccagctgattgaggtcatgctcgttggccgcggtggtgaccaggctgtgggtcaggccactcttggcatcgacaccaatgtgggccttcatgccaaagtgccactgattgcctttcttggtctgatgcatctccggatcgcgttgctgctctttgttcttggtcgagctgggtgcctcaatgatggtggcatcgaccaaggtgccttgagtcatcatgacgcctgcttcggccagccagcgattgatggtcttgaacaattggcgggccagttgatgctgctccagcaggtggcggaaattcatgatggtggtgcggtccggcaaggcgctatccagggataaccgggcaaacagacgcatggaggcgatttcgtacagagcatcttccatcgcgccatcgctcaggttgtaccaatgctgcatgcagtgaatgcgtagcatggtttccagcggataaggtcgccggccattaccagccttggggtaaaacggctcgatgacttccaccatgttttgccatggcagaatctgctccatgcgggacaagaaaatctcttttctggtctgacggcgcttactgctgaattcactgtcggcgaaggtaagttgatgactcatgatgaaccctgttctatggctccagatgacaaacatgatctcatatcagggacttgttcgcaccttccttagttgtggcaataaaaatgattaaggatactagtataagagatcaggttcgtcctttagtgttgtgtatggctatcatttgttttgaggttagtttgattagtcattgttgggtggtgattagtcggttgttgatgagatatttggaggtggggatcaatagagggggaaatagaatgatcagtactgcggcgggtaggcctaggattgtgggggcaatgaatgaagcgaacagattttcgttcattttggttctcagggtttgttataattttttatttttatgggctttggtgagggaggtaggtggtagtttgtgtttaatatttttagttgggtgatgaggaatagtgtaaggaatatgggggtaattatggtgggccatacggtagtatttagttggggcattt

SEQ ID NO: 451135 - DNA, 2268 bp, Homo sapiens
tattcctttgatgaccaaagagataggaagaataagagattctcattatagttatccacctcacctaacagtaatgatatataatgagaatctcttattcttcctattcctttgatgaccaaagagataaagtgaagtcatccttattattaaaatgcagcctccaaacaaatttctcaagattccttttccttccttctatccattttctgcccataatttccaagaaaaggtgggtatggaaacacatgagagaatgtgatagtgaagtcatatttacaaaactgagaacatgtccaaaatggattcttgtctcctcttcagaattagccatttaaaatattttctgtgacttcaaattgtaattcttatttgcagttttaccagtcttcatgtacagtgacgaaactgtgtagaaactaaatcatcgctttagtaagaaaggataaaaaggtgtggaagtgaatataaaatgcatctaaacatgacatttaatttgtttataaaaataagacttactaaatatagagtaattcattttgaataggaggctattgtttttatattgtgtaataactcacgtactctgaagagagcttggtcaaacaataaaatacattgttactaacttggtttcttttctgtgtactttgcaaaaattctatttttaattttgttcatatgttgaatgtgcccctaattggcatcttaaagagaatagtaagcatctattaaccaaaaaagaactctaatagtaaaggaaagggaaatattggtggtatgtacccacaaaacccccaagtgccaagttaatggaatctctgctttccctttcagatgctagaaagccactgtaatgagttcttgcagtttagcatccagtctaagctactgcattgtttaaagagcagcatcaaggacactttctccaaactggaactctcttctttgtcaaatcttgtactttaaaattctacaattctgttacattgttgtttaaatcacagactgctcagatccattttactgcagtagtttccaagtgtgtaacttggctttagtatttatcagttgccagaaagaaacaggttgtcatttggaagtttttgtggttattttttcccatttttattcttcagataaaagcagtaccccaaaatagaaaatgaaaattttcatgaaacaaagagaactcccttgttaaaaccagcttattaactctgtattctgtcaaatgcatttttttctaacaactgaccatggatgttgtgaaggtgcattttaatttaaacatggaaaagatttttttcataattacatactagaatgtaaaattataattttgccatgacttaaagagcacagttgatatcccaaaggttttgatgctaagaagctacagttattctaaatgcactaaaatgtttgaggcaaatctaccttagaggcttttttggtatggtattttttaaaatatttagattttatttaaatttcctgtgagttattctgtatttgaaaagatgttcgtgtcttcccctctgtattgaatgtttcactcattttatttttaatcaaatattttatagaaatgagttgttgggaagagtttaacatgcactatttatagtactttgccgttaacaggcaatgttctgaaactaaatttatttttgttcagtgaacataagtttagatttttaaagttggtagataatttatctccactaatatttttttaagaaactgtgaagagattaactgggaataattttatttcagattttactaatgtagtatgtagctacaacttcttgaacttcaagttaaggctagacatttactttgaaaaaattccactgggtgtttccagggctatttcattttagaaataagtgtttgccattcttctgcaaaaactggacaaggggaatactacaaaaaatactcagagataaaatcctcatttcaagttctacaaaatatttatcaaatgaatgttaatttttttttaattccctgctaaagacgttttcattagtcttagagggtatatgctttctagaacttgtttttgttaacatgtgctttgatgtaaagaacatattttgtatgcaaaacataacttgcattatggttgtacaatacactatattgtttagggattccggaaagcagtttaatgcagaaataactatatctagtatgcagttcatattgtgaatgaagctttgcttttgtaataaataaataagactttctaatgac

SEQ ID NO: 451136 - DNA, 3467 bp, Homo sapiens
tattcctttgatgaccaaagagataggaagaataagagattctcattatagttatccacctcacctaacagtaatgatatataatgagaatctcttattcttcctattcctttgatgaccaaagagataaagtgaagtcatccttattattaaaatgcagcctccaaacaaatttctcaagattccttttccttccttctatccattttctgcccataatttccaagaaaaggtgggtatggaaacacatgagagaatgtgatagtgaagtcatatttacaaaactgagaacatgtccaaaatggattcttgtctcctcttcagaattagccatttaaaatattttctgtgacttcaaattgtaattcttatttgcagttttaccagtcttcatgtacagtgacgaaactgtgtagaaactaaatcatcgctttagtaagaaaggataaaaaggtgtggaagtgaatataaaatgcatctaaacatgacatttaatttgtttataaaaataagacttactaaatatagagtaattcattttgaataggaggctattgtttttatattgtgtaataactcacgtactctgaagagagcttggtcaaacaataaaatacattgttactaacttggtttcttttctgtgtactttgcaaaaattctatttttaattttgttcatatgttgaatgtgcccctaattggcatcttaaagagaatagtaagcatctattaaccaaaaaagaactctaatagtaaaggaaagggaaatattggtggtatgtacccacaaaacccccaagtgccaagttaatggaatctctgctttccctttcagatgctagaaagccactgtaatgagttcttgcagtttagcatccagtctaagctactgcattgtttaaagagcagcatcaaggacactttctccaaactggaactctcttctttgtcaaatcttgtactttaaaattctacaattctgttacattgttgtttaaatcacagactgctcagatccattttactgcagtagtttccaagtgtgtaacttggctttagtatttatcagttgccagaaagaaacaggttgtcatttggaagtttttgtggttattttttcccatttttattcttcagataaaagcagtaccccaaaatagaaaatgaaaattttcatgaaacaaagagaactcccttgttaaaaccagcttattaactctgtattctgtcaaatgcatttttttctaacaactgaccatggatgttgtgaaggtgcattttaatttaaacatggaaaagatttttttcataattacatactagaatgtaaaattataattttgccatgacttaaagagcacagttgatatcccaaaggttttgatgctaagaagctacagttattctaaatgcactaaaatgtttgaggcaaatctaccttagaggcttttttggtatggtattttttaaaatatttagattttatttaaatttcctgtgagttattctgtatttgaaaagatgttcgtgtcttcccctctgtattgaatgtttcactcattttatttttaatcaaatattttatagaaatgagttgttgggaagagtttaacatgcactatttatagtactttgccgttaacaggcaatgttctgaaactaaatttatttttgttcagtgaacataagtttagggaaggtgcgaataagcggggaaattcttctcggctgactcagtcatttcatttcttcatgtttgagccgattttttctcccgtaaatgccttgaatcagcctatttagaccgtttcttcgccatttaaggcgttatccccagtttttagtgagatctctcccactgacgtatcatttggtccgcccgaaacaggttggccagcgtgaataacatcgccagttggttatcgtttttcagcaaccccttgtatctggctttcacgaagccgaactgtcgcttgatgatgcgaaatgggtgctccaccctggcccggatgctggctttcatgtattcgatgttgatggccgttttgttcttgcgtggatgctgtttcaaggttcttaccttgccggggcgctcggcgatcagccagtccacatccacctcggccagctcctcgcgctgtggcgccccttggtagccggcatcggctgagacaaattgctcctctccatgcagcagattacccagctgattgaggtcatgctcgttggccgcggtggtgaccaggctgtgggtcaggccactcttggcatcgacaccaatgtgggccttcatgccaaagtgccactgattgcctttcttggtctgatgcatctccggatcgcgttgctgctctttgttcttggtcgagctgggtgcctcaatgatggtggcatcgaccaaggtgccttgagtcatcatgacgcctgcttcggccagccagcgattgatggtcttgaacaattggcgggccagttgatgctgctccagcaggtggcggaaattcatgatggtggtgcggtccggcaaggcgctatccagggataaccgggcaaacagacgcatggaggcgatttcgtacagagcatcttccatcgcgccatcgctcaggttgtaccaatgctgcatgcagtgaatgcgtagcatggtttccagcggataaggtcgccggccattaccagccttggggtaaaacggctcgatgacttccaccatgttttgccatggcagaatctgctccatgcgggacaagaaaatctcttttctggtctgacggcgcttactgctgaattcactgtcggcgaaggtaagttgatgactcatgatgaaccctgttctatggctccagatgacaaacatgatctcatatcagggacttgttcgcaccttccttagatttttaaagttggtagataatttatctccactaatatttttttaagaaactgtgaagagattaactgggaataattttatttcagattttactaatgtagtatgtagctacaacttcttgaacttcaagttaaggctagacatttactttgaaaaaattccactgggtgtttccagggctatttcattttagaaataagtgtttgccattcttctgcaaaaactggacaaggggaatactacaaaaaatactcagagataaaatcctcatttcaagttctacaaaatatttatcaaatgaatgttaatttttttttaattccctgctaaagacgttttcattagtcttagagggtatatgctttctagaacttgtttttgttaacatgtgctttgatgtaaagaacatattttgtatgcaaaacataacttgcattatggttgtacaatacactatattgtttagggattccggaaagcagtttaatgcagaaataactatatctagtatgcagttcatattgtgaatgaagctttgcttttgtaataaataaataagactttctaatgac

SEQ ID NO: 451137 - DNA, 2266 bp, Homo sapiens
tattcctttgatgaccaaagagataggaagaataagagattctcattatagttatccacctcacctaacagtaatgatatataatgagaatctcttattcttcctattcctttgatgaccaaagagataaagtgaagtcatccttattattaaaatgcagcctccaaacaaatttctcaagattccttttccttccttctatccattttctgcccataatttccaagaaaaggtgggtatggaaacacatgagagaatgtgatagtgaagtcatatttacaaaactgagaacatgtccaaaatggattcttgtctcctcttcagaattagccatttaaaatattttctgtgacttcaaattgtaattcttatttgcagttttaccagtcttcatgtacagtgacgaaactgtgtagaaactaaatcatcgctttagtaagaaaggataaaaaggtgtggaagtgaatataaaatgcatctaaacatgacatttaatttgtttataaaaataagacttactaaatatagagtaattcattttgaataggaggctattgtttttatattgtgtaataactcacgtactctgaagagagcttggtcaaacaataaaatacattgttactaacttggtttcttttctgtgtactttgcaaaaattctatttttaattttgttcatatgttgaatgtgcccctaattggcatcttaaagagaatagtaagcatctattaaccaaaaaagaactctaatagtaaaggaaagggaaatattggtggtatgtacccacaaaacccccaagtgccaagttaatggaatctctgctttccctttcagatgctagaaagccactgtaatgagttcttgcagtttagcatccagtctaagctactgcattgtttaaagagcagcatcaaggacactttctccaaactggaactctcttctttgtcaaatcttgtactttaaaattctacaattctgttacattgttgtttaaatcacagactgctcagatccattttactgcagtagtttccaagtgtgtaacttggctttagtatttatcagttgccagaaagaaacaggttgtcatttggaagtttttgtggttattttttcccatttttattcttcagataaaagcagtaccccaaaatagaaaatgaaaattttcatgaaacaaagagaactcccttgttaaaaccagcttattaactctgtattctgtcaaatgcatttttttctaacaactgaccatggatgttgtgaaggtgcattttaatttaaacatggaaaagatttttttcataattacatactagaatgtaaaattataattttgccatgacttaaagagcacagttgatatcccaaaggttttgatgctaagaagctacagttattctaaatgcactaaaatgtttgaggcaaatctaccttagaggcttttttggtatggtattttttaaaatatttagattttatttaaatttcctgtgagttattctgtatttgaaaagatgttcgtgtcttcccctctgtattgaatgtttcactcattttatttttaatcaaatattttatagaaatgagttgttgggaagagtttaacatgcactatttatagtactttgccgttaacaggcaatgttctgaaactaaatttatttttgttcagtgaacataagtttagatttttaaagttggtagataatttatctccactaatatttttttaagaaactgtgaagagattaactgggaataattttatttcagattttactaatgtagtatgtagctacaacttcttgaacttcaagttaaggctagacatttactttgaaaaaattccactgggtgtttccagggctatttcattttagaaataagtgtttgccattcttctgcaaaaactggacaaggggaatactacaaaaaatactcagagataaaatcctcatttcaagttctacaaaatatttatcaaatgaatgttaatttttttttaattccctgctaaagacgttttcattagtcttagagggtatatgctttctagaacttgtttttgttaacatgtgctttgatgtaaagaacatattttgtatgcaaaacataacttgcattatggttgtacaatacactatattgtttagggattccggaaagcagtttaatgcagaaataactacccacttcagaaagccttgagacaaacattgtagcacatgagaccttgtcttaaaaaaataaaaaattt

SEQ ID NO: 451138 - DNA, 3539 bp, Homo sapiens
  misc_feature (2)..(4): n is a, c, g, or t
  misc_feature (8)..(8): n is a, c, g, or t
  misc_feature (13)..(13): n is a, c, g, or t
annntccnctttnagttcctggtccagaactttacacagaaaaggtgctcaaaggatatttgtttaatgaatgtggtatgctgacatttaaacaggacaaaacttgtagaacttcatggaggaacacggagtgacccaaaccgaacatatggctaccatagaagcacatgcagtggcccagcaagtgcagcaggtccatgtggctacttacaccgagcatagtatgctgagtgctgatgaagactcgccttcttcgcccgaggacacctcttacgatgactcagatatactcaactccacagcagctgatgaggtgacagctcatctggcagctgcaggtcctgtgggaatggccgctgctgctgctgtggcaacaggaaagaaacggaaacggcctcatgtatttgagtctaatccatctatccggaagaggcaacaaacacgtttgcttcggaaacttcgagccacgttagatgaatatactactcgtgtgggacagcaagctattgtcctctgtatctcaccctccaaacctaaccctgtctttaaagtgtttggtgcagcacctttggagaatgtggtgcgtaagtacaagagcatgatcctggaagacctggagtctgctctggcagaacacgcccctgcgccacaggaggttaactcagaactgccgcctctcaccatcgacggaattccagtctctgtggacaaaatgacccaggcccagcttcgggcatttatcccagagatgctcaagtactctacaggtcggggaaaaccaggctgggggaaagaaagctgcaagcccatctggtggcctgaagatatcccctgggcaaatgtccggagtgatgtccgcacagaagagcaaaagcagagggtttcatggacccaggcactacggaccatagttaaaaactgttataaacagcatgggcgggaagaccttttgtatgcctttgaagatcagcaaacgcaaacacaggccacagccacacatagtatagctcatcttgtaccatcacagactgtagtccagacttttagtaaccctgatggcactgtctcacttatccaggttggtacgggggcaacagtagccacattggctgatgcttcagaattgccaaccacggtcaccgttgcccaagtgaattattctgccgtggctgatggagaggtggaacaaaattgggccacgttacagggaggtgagatgaccatccagacgacgcaagcatcagaggccacccaggcggtggcatcgttggcagaggccgcagtggcagcttctcaggagatgcagcagggagctacagtcactatggcgcttaacagcgaagctgccgcccatgctgtcgccaccctggctgaggccaccttacaaggtgggggacagatcgtcttgtctggggaaaccgcagcagccgtcggagcacttactggagtccaagatgctaatggcctggtccagatccctgtgagcatgtaccagactgtggtgaccagcctcgcccagggcaacggaccagtgcaggtggccatggcccctgtgaccaccaggatatcagacagcgcagtcaccatggacggccaagctgtggaggtggtgacattggaacagtgacatacagccatattatggcatcgttttctagtctacttcaaaattttttacacgtttgcagaggtgcaatcaaatggaattaagtctctcgactttggaaggaaagttttgttaacctttttttttttaaaaggaagaaagcggattttggaattgcattttttaaagcaccactcttgattttctgggattggtgaagaaactgcattgtcaatttcactgtcccaaaaaagccaaattgtggcaggacttctttctgcggaaatgtgtgtgtatacttatgtgtgtgtatgtgtgagtgtgaatatatgtatatgtgtacatatggacatacacatttacatatatataaagtatatatatacatatatatatatatatgtatgaaacccgcatggaattatctgtatgaaatcaaggtgcgctgtggaaacaataattcacccagtttagtgggtggtagggtacgtggccagacacagtcacccagtttttgttcataccagggtcatgcgttgagctactgacaaactcaggcggaggtgaccatgcccttcaccaaagctgcctcccagtggccacacagaactctccctgctggactcacctgaggaaagaggctccagcatggggtgggtcagagatgtgcttgcaaggtccagggactgcgtggtctgccagctgagatgctcctcgggctggcccaggtgctgaccttgccacaggcagatgaatgtcttgaaagctcccgggcctcagcctcccatctcctctccttcccaggaatccttgatctcatgactattaaaatgttgctctggttttaaggtcagtcctgaattgctcgtatatatgaactgaaggtaaccgaagtattaggggtttgaggagtgcgtgcgtgtaagtgtgcttgtgtgtgtgcgtgcatggtgggggagaggatgggaagggggcgggggcagtggaagggaaaggaaggaaagaaaaatcgtcctagaccaggatacacccgtgggagcaattttctctactgtctgtagcttcacagaggaggcgctggaatgaacaagaagagacatctggtctgtggccacagcaccctgaacgcccctgatcttgtgtgatcttggaagctaagcttggttgggcccggtcagtacgcggaagggaagaagggacacctggccatagaaaacagctgagggtgtttgctgtgttcctggatcaggccctgcttcagaagggactcctggaggcccatgttccttgatgcaacctcgtggcccaggccgggagcagcttgcctcctcagaggtgttgactatctgggtgttcttggtaaccgttaactctgtctttctcagctgcaagccctgagtctccagtagctgaattcacctgacttttcaacaggccaaatctctgaaccttgagtacagggacagctcctcctccctcctcccagctctccccatgtgtgtgatggtgtatttaatgtgtttttttaatgcgacattaaaagattctccacgtcttgctcaacctttgagagaagtttcagattcttgtatttgcttgttttatataaaactatctaatgttctttatatgttcttttctgtacgtaatggggggaggggagggaaatttacatataaatagtcctagttctacaatttgttatttttttaattattattttttatcgtcattgtgaagttgtccagggactttaaagtccatgttcctttgtggtgaaataacctccaaatagtttgagaagttgccaagacgaagaaaaaagcaaaaccccagtagcagagcatggattctgtgttgtttcccattctgtctttgactgcctcattcaataaatagttaaaaatgtggcaacaaaagtggaattgttcat

SEQ ID NO: 451139 - DNA, 4554 bp, Homo sapiens
taaggtatttataccaattgacgtttaaaacgtctctaacgtgccttaaattgcgtttaaacgatactatgagctaatacactctgacaaacttcttgtcagcacgttcaaactcttcaacataatcaattgccacaacataattatacgtgtcaatcttagcaactgacatattgccgtcaaattcttgcaactctgcaatcaattctgctactgtcatcattctacctccaaatattcaaattttacgcccttgtgagacttcagtcttcccttaagtacgttgacaattgtgcttggcagaatacctcgctccttagcgtaaatggtagcactgtcaaatacttcatacgtaccgtcttcatggattgctttaataggtttttgattagttggctttaattgtttgtttgttttaacaaaattcttctctgcgtaattgttaatctcatctagtctgttgctgtctttaaacgcgttataaatcagagttttaactgattttgtttttgatttaccttttttagacagtgccactactagccaaccagacccactacgacccggctttaaaattcttccgtaacgaacactctttacacgtccatgtgtacttacttgataatatccttcgtagccttcgatatctttccatacttcaatcatttattttctcatttctatttattaactaacttatgttctgctttgttgagtacaacgtgccagttatctaagttcatgttagttttgtatccgtctattggctctaaaaactcccgatactccaacttgcggacaaacgtttcaaacatcaacttcttaactaacacattcaatcgtcgatcgcttttcgacgtttttccaattgtgacgtaaacgtttcctttaattcttacgcatgtttttaattctatatcgacaccgtgtgatactttctttacgtggtcctttatttgatattaaaatatattccgtcgcagtctccacggcgcaggcccacggtagcgcagccgctctgaggctggagtgcagtggtgtgatctcggctctctgcaacttccacatcccgggttcaagcgattctactgcctcagcctcccgagtagttgggactacagtagaacttcatggaggaacacggagtgacccaaaccgaacatatggctaccatagaagcacatgcagtggcccagcaagtgcagcaggtccatgtggctacttacaccgagcatagtatgctgagtgctgatgaagactcgccttcttcgcccgaggacacctcttacgatgactcagatatactcaactccacagcagctgatgaggtgacagctcatctggcagctgcaggtcctgtgggaatggccgctgctgctgctgtggcaacaggaaagaaacggaaacggcctcatgtatttgagtctaatccatctatccggaagaggcaacaaacacgtttgcttcggaaacttcgagccacgttagatgaatatactactcgtgtgggacagcaagctattgtcctctgtatctcaccctccaaacctaaccctgtctttaaagtgtttggtgcagcacctttggagaatgtggtgcgtaagtacaagagcatgatcctggaagacctggagtctgctctggcagaacacgcccctgcgccacaggaggttaactcagaactgccgcctctcaccatcgacggaattccagtctctgtggacaaaatgacccaggcccagcttcgggcatttatcccagagatgctcaagtactctacaggtcggggaaaaccaggctgggggaaagaaagctgcaagcccatctggtggcctgaagatatcccctgggcaaatgtccggagtgatgtccgcacagaagagcaaaagcagagggtttcatggacccaggcactacggaccatagttaaaaactgttataaacagcatgggcgggaagaccttttgtatgcctttgaagatcagcaaacgcaaacacaggccacagccacacatagtatagctcatcttgtaccatcacagactgtagtccagacttttagtaaccctgatggcactgtctcacttatccaggttggtacgggggcaacagtagccacattggctgatgcttcagaattgccaaccacggtcaccgttgcccaagtgaattattctgccgtggctgatggagaggtggaacaaaattgggccacgttacagggaggtgagatgaccatccagacgacgcaagcatcagaggccacccaggcggtggcatcgttggcagaggccgcagtggcagcttctcaggagatgcagcagggagctacagtcactatggcgcttaacagcgaagctgccgcccatgctgtcgccaccctggctgaggccaccttacaaggtgggggacagatcgtcttgtctggggaaaccgcagcagccgtcggagcacttactggagtccaagatgctaatggcctggtccagatccctgtgagcatgtaccagactgtggtgaccagcctcgcccagggcaacggaccagtgcaggtggccatggcccctgtgaccaccaggatatcagacagcgcagtcaccatggacggccaagctgtggaggtggtgacattggaacagtgacatacagccatattatggcatcgttttctagtctacttcaaaattttttacacgtttgcagaggtgcaatcaaatggaattaagtctctcgactttggaaggaaagttttgttaacctttttttttttaaaaggaagaaagcggattttggaattgcattttttaaagcaccactcttgattttctgggattggtgaagaaactgcattgtcaatttcactgtcccaaaaaagccaaattgtggcaggacttctttctgcggaaatgtgtgtgtatacttatgtgtgtgtatgtgtgagtgtgaatatatgtatatgtgtacatatggacatacacatttacatatatataaagtatatatatacatatatatatatatatgtatgaaacccgcatggaattatctgtatgaaatcaaggtgcgctgtggaaacaataattcacccagtttagtgggtggtagggtacgtggccagacacagtcacccagtttttgttcataccagggtcatgcgttgagctactgacaaactcaggcggaggtgaccatgcccttcaccaaagctgcctcccagtggccacacagaactctccctgctggactcacctgaggaaagaggctccagcatggggtgggtcagagatgtgcttgcaaggtccagggactgcgtggtctgccagctgagatgctcctcgggctggcccaggtgctgaccttgccacaggcagatgaatgtcttgaaagctcccgggcctcagcctcccatctcctctccttcccaggaatccttgatctcatgactattaaaatgttgctctggttttaaggtcagtcctgaattgctcgtatatatgaactgaaggtaaccgaagtattaggggtttgaggagtgcgtgcgtgtaagtgtgcttgtgtgtgtgcgtgcatggtgggggagaggatgggaagggggcgggggcagtggaagggaaaggaaggaaagaaaaatcgtcctagaccaggatacacccgtgggagcaattttctctactgtctgtagcttcacagaggaggcgctggaatgaacaagaagagacatctggtctgtggccacagcaccctgaacgcccctgatcttgtgtgatcttggaagctaagcttggttgggcccggtcagtacgcggaagggaagaagggacacctggccatagaaaacagctgagggtgtttgctgtgttcctggatcaggccctgcttcagaagggactcctggaggcccatgttccttgatgcaacctcgtggcccaggccgggagcagcttgcctcctcagaggtgttgactatctgggtgttcttggtaaccgttaactctgtctttctcagctgcaagccctgagtctccagtagctgaattcacctgacttttcaacaggccaaatctctgaaccttgagtacagggacagctcctcctccctcctcccagctctccccatgtgtgtgatggtgtatttaatgtgtttttttaatgcgacattaaaagattctccacgtcttgctcaacctttgagagaagtttcagattcttgtatttgcttgttttatataaaactatctaatgttctttatatgttcttttctgtacgtaatggggggaggggagggaaatttacatataaatagtcctagttctacaatttgttatttttttaattattattttttatcgtcattgtgaagttgtccagggactttaaagtccatgttcctttgtggtgaaataacctccaaatagtttgagaagttgccaagacgaagaaaaaagcaaaaccccagtagcagagcatggattctgtgttgtttcccattctgtctttgactgcctcattcaataaatagttaaaaatgtggcaacaaaagtggaattgttcat

SEQ ID NO: 451140 - DNA, 3301 bp, Homo sapiens
gcggcagcgctcgccattgccgctggtggcaggaggctgcgaggagccggcgcggtcgcagtctccacggcgcaggcccacggtagcgcagccgctctgagtagaacttcatggaggaacacggagtgacccaaaccgaacatatggctaccatagaagcacatgcagtggcccagcaagtgcagcaggtccatgtggctacttacaccgagcatagtatgctgagtgctgatgaagactcgccttcttcgcccgaggacacctcttacgatgactcagatatactcaactccacagcagctgatgaggtgacagctcatctggcagctgcaggtcctgtgggaatggccgctgctgctgctgtggcaacaggaaagaaacggaaacggcctcatgtatttgagtctaatccatctatccggaagaggcaacaaacacgtttgcttcggaaacttcgagccacgttagatgaatatactactcgtgtgggacagcaagctattgtcctctgtatctcaccctccaaacctaaccctgtctttaaagtgtttggtgcagcacctttggagaatgtggtgcgtaagtacaagagcatgatcctggaagacctggagtctgctctggcagaacacgcccctgcgccacaggaggttaactcagaactgccgcctctcaccatcgacggaattccagtctctgtggacaaaatgacccaggcccagcttcgggcatttatcccagagatgctcaagtactctacaggtcggggaaaaccaggctgggggaaagaaagctgcaagcccatctggtggcctgaagatatcccctgggcaaatgtccggagtgatgtccgcacagaagagcaaaagcagagggtttcatggacccaggcactacggaccatagttaaaaactgttataaacagcatgggcgggaagaccttttgtatgcctttgaagatcagcaaacgcaaacacaggccacagccacacatagtatagctcatcttgtaccatcacagactgtagtccagacttttagtaaccctgatggcactgtctcacttatccaggttggtacgggggcaacagtagccacattggctgatgcttcagaattgccaaccacggtcaccgttgcccaagtgaattattctgccgtggctgatggagaggtggaacaaaattgggccacgttacagggaggtgagatgaccatccagacgacgcaagcatcagaggccacccaggcggtggcatcgttggcagaggccgcagtggcagcttctcaggagatgcagcagggagctacagtcactatggcgcttaacagcgaagctgccgcccatgctgtcgccaccctggctgaggccaccttacaaggtgggggacagatcgtcttgtctggggaaaccgcagcagccgtcggagcacttactggagtccaagatgctaatggcctggtccagatccctgtgagcatgtaccagactgtggtgaccagcctcgcccagggcaacggaccagtgcaggtggccatggcccctgtgaccaccaggatatcagacagcgcagtcaccatggacggccaagctgtggaggtggtgacattggaacagtgacatacagccatattatggcatcgttttctagtctacttcaaaattttttacacgtttgcagaggtgcaatcaaatggaattaagtctctcgactttggaaggaaagttttgttaacctttttttttttaaaaggaagaaagcggattttggaattgcattttttaaagcaccactcttgattttctgggattggtgaagaaactgcattgtcaatttcactgtcccaaaaaagccaaattgtggcaggacttctttctgcggaaatgtgtgtgtatacttatgtgtgtgtatgtgtgagtgtgaatatatgtatatgtgtacatatggacatacacatttacatatatataaagtatatatatacatatatatatatatatgtatgaaacccgcatggaattatctgtatgaaatcaaggtgcgctgtggaaacaataattcacccagtttagtgggtggtagggtacgtggccagacacagtcacccagtttttgttcataccagggtcatgcgttgagctactgacaaactcaggcggaggtgaccatgcccttcaccaaagctgcctcccagtggccacacagaactctccctgctggactcacctgaggaaagaggctccagcatggggtgggtcagagatgtgcttgcaaggtccagggactgcgtggtctgccagctgagatgctcctcgggctggcccaggtgctgaccttgccacaggcagatgaatgtcttgaaagctcccgggcctcagcctcccatctcctctccttcccaggaatccttgatctcatgactattaaaatgttgctctggttttaaggtcagtcctgaattgctcgtatatatgaactgaaggtaaccgaagtattaggggtttgaggagtgcgtgcgtgtaagtgtgcttgtgtgtgtgcgtgcatggtgggggagaggatgggaagggggcgggggcagtggaagggaaaggaaggaaagaaaaatcgtcctagaccaggatacacccgtgggagcaattttctctactgtctgtagcttcacagaggaggcgccgggagcagcttgcctcctcagaggtgttgactatctgggtgttcttggtaaccgttaactctgtctttctcagctgcaagccctgagtctccagtagctgaattcacctgacttttcaacaggccaaatctctgaaccttgagtacagggacagctcctcctccctcctcccagctctccccatgtgtgtgatggtgtatttaatgtgtttttttaatgcgacattaaaagattctccacgtcttgctcaacctttgagagaagtttcagattcttgtatttgcttgttttatataaaactatctaatgttctttatatgttcttttctgtacgtaatggggggaggggagggaaatttacatataaatagtcctagttctacaatttgttatttttttaattattattttttatcgtcattgtgaagttgtccagggactttaaagtccatgttcctttgtggtgaaataacctccaaatagtttgagaagttgccaagacgaagaaaaaagcaaaaccccagtagcagagcatggattctgtgttgtttcccattctgtctttgactgcctcattcaataaatagttaaaaatgtggcaacaaaagtggaattgttcat

SEQ ID NO: 451141 - DNA, 3214 bp, Homo sapiens
gcggcagcgctcgccattgccgctggtggcaggaggctgcgaggagccggcgcggtcgcagtctccacggcgcaggcccacggtagcgcagccgctctgagtagaacttcatggaggaacacggagtgacccaaaccgaacatatggctaccatagaagcacatgcagtggcccagcaagtgcagcaggtccatgtggctacttacaccgagcatagtatgctgagtgctgatgaagactcgccttcttcgcccgaggacacctcttacgatgactcagatatactcaactccacagcagctgatgaggtgacagctcatctggcagctgcaggtcctgtgggaatggccgctgctgctgctgtggcaacaggaaagaaacggaaacggcctcatgtatttgagtctaatccatctatccggaagaggcaacaaacacgtttgcttcggaaacttcgagccacgttagatgaatatactactcgtgtgggacagcaagctattgtcctctgtatctcaccctccaaacctaaccctgtctttaaagtgtttggtgcagcacctttggagaatgtggtgcgtaagtacaagagcatgatcctggaagacctggagtctgctctggcagaacacgcccctgcgccacaggaggttaactcagaactgccgcctctcaccatcgacggaattccagtctctgtggacaaaatgacccaggcccagcttcgggcatttatcccagagatgctcaagtactctacaggtcggggaaaaccaggctgggggaaagaaagctgcaagcccatctggtggcctgaagatatcccctgggcaaatgtccggagtgatgtccgcacagaagagcaaaagcagagggtttcatggacccaggcactacggaccatagttaaaaactgttataaacagcatgggcgggaagaccttttgtatgcctttgaagatcagcaaacgcaaacacaggccacagccacacatagtatagctcatcttgtaccatcacagactgtagtccagacttttagtaaccctgatggcactgtctcacttatccaggttggtacgggggcaacagtagccacattggctgatgcttcagaattgccaaccacggtcaccgttgcccaagtgaattattctgccgtggctgatggagaggtggaacaaaattgggccacgttacagggaggtgagatgaccatccagacgacgcaagcatcagaggccacccaggcggtggcatcgttggcagaggccgcagtggcagcttctcaggagatgcagcagggagctacagtcactatggcgcttaacagcgaagctgccgcccatgctgtcgccaccctggctgaggccaccttacaaggtgggggacagatcgtcttgtctggggaaaccgcagcagccgtcggagcacttactggagtccaagatgctaatggcctggtccagatccctgtgagcatgtaccagactgtggtgaccagcctcgcccagggcaacggaccagtgcaggtggccatggcccctgtgaccaccaggatatcagacagcgcagtcaccatggacggccaagctgtggaggtggtgacattggaacagtgacatacagccatattatggcatcgttttctagtctacttcaaaattttttacacgtttgcagaggtgcaatcaaatggaattaagtctctcgactttggaaggaaagttttgttaacctttttttttttaaaaggaagaaagcggattttggaattgcattttttaaagcaccactcttgattttctgggattggtgaagaaactgcattgtcaatttcactgtcccaaaaaagccaaattgtggcaggacttctttctgcggaaatgtgtgtgtatacttatgtgtgtgtatgtgtgagtgtgaatatatgtatatgtgtacatatggacatacacatttacatatatataaagtatatatatacatatatatatatatatgtatgaaacccgcatggaattatctgtatgaaatcaaggtgcgctgtggaaacaataattcacccagtttagtgggtggtagggtacgtggccagacacagtcacccagtttttgttcataccagggtcatgcgttgagctactgacaaactcaggcggaggtgaccatgcccttcaccaaagctgcctcccagtggccacacagaactctccctgctggactcacctgaggaaagaggctccagcatggggtgggtcagagatgtgcttgcaaggtccagggactgcgtggtctgccagctgagatgctcctcgggctggcccaggtgctgaccttgccacaggcagatgaatgtcttgaaagctcccgggcctcagcctcccatctcctctccttcccaggaatccttgatctcatgactattaaaatgttgctctggttttaaggtcagtcctgaattgctcgtatatatgaactgaaggtaaccgaagtattaggggtttgaggagtgcgtgcgtgtaagtgtgcttgtgtgtgtgcgtgcatggtgggggagaggatgggaagggggcgggggcagtggaagggaaaggaaggaaagaaaaatcgtcctagaccaggatacacccgtgggagcaattttctctatctgtctttctcagctgcaagccctgagtctccagtagctgaattcacctgacttttcaacaggccaaatctctgaaccttgagtacagggacagctcctcctccctcctcccagctctccccatgtgtgtgatggtgtatttaatgtgtttttttaatgcgacattaaaagattctccacgtcttgctcaacctttgagagaagtttcagattcttgtatttgcttgttttatataaaactatctaatgttctttatatgttcttttctgtacgtaatggggggaggggagggaaatttacatataaatagtcctagttctacaatttgttatttttttaattattattttttatcgtcattgtgaagttgtccagggactttaaagtccatgttcctttgtggtgaaataacctccaaatagtttgagaagttgccaagacgaagaaaaaagcaaaaccccagtagcagagcatggattctgtgttgtttcccattctgtctttgactgcctcattcaataaatagttaaaaatgtggcaacaaaagtggaattgttcat

SEQ ID NO: 451142 - DNA, 1593 bp, Homo sapiens
gcggcagcgctcgccattgccgctggtggcaggaggctgcgaggagccggcgcggtcgcagtctccacggcgcaggcccacggtagcgcagccgctctgagtagaacttcatggaggaacacggagtgacccaaaccgaacatatggctaccatagaagcacatgcagtggcccagcaagtgcagcaggtccatgtggctacttacaccgagcatagtatgctgagtgctgatgaagactcgccttcttcgcccgaggacacctcttacgatgactcagatatactcaactccacagcagctgatgaggtgacagctcatctggcagctgcaggtcctgtgggaatggccgctgctgctgctgtggcaacaggaaagaaacggaaacggcctcatgtatttgagtctaatccatctatccggaagaggcaacaaacacgtttgcttcggaaacttcgagccacgttagatgaatatactactcgtgtgggacagcaagctattgtcctctgtatctcaccctccaaacctaaccctgtctttaaagtgtttggtgcagcacctttggagaatgtggtgcgtaagtacaagagcatgatcctggaagacctggagtctgctctggcagaacacgcccctgcgccacaggaggttaactcagaactgccgcctctcaccatcgacggaattccagtctctgtggacaaaatgacccaggcccagcttcgggcatttatcccagagatgctcaagtactctacaggtcggggaaaaccaggctgggggaaagaaagctgcaagcccatctggtggcctgaagatatcccctgggcaaatgtccggagtgatgtccgcacagaagagcaaaagcagagggtttcatggacccaggcactacggaccatagttaaaaactgttataaacagcatgggcgggaagaccttttgtatgcctttgaagatcagcaaacgcaaacacaggccacagccacacatagtatagctcatcttgtaccatcacagactgtagtccagacttttagtaaccctgatggcactgtctcacttatccaggttggtacgggggcaacagtagccacattggctgatgcttcagaattgccaaccacggtcaccgttgcccaagtgaattattctgccgtggctgatggagaggtggaacaaaattgggccacgttacagggaggtgagatgaccatccagacgacgcaagcatcagaggccacccaggcggtggcatcgttggcagaggccgcagtggcagcttctcaggagatgcagcagggagctacagtcactatggcgcttaacaggtggtggcaagagtgtgggaataagtgaggatcgcaaatctgtccctgcagatatgggtggaggccccttaaagagaaatgtgtctctgtttgccacagttggcagttggaacttaacactcttggcccatacgatattgtagtttggcctataataggtcagtccttaccaagaaaaattaaacttctttccttcaggtgtgcttaggaaaggtgatgtgaaatggaatcctccagtaaaaggtagtttccaaaactca

SEQ ID NO: 451143 - DNA, 360 bp, Homo sapiens
gtagcaattattagaaaaattacttgtaaaattgtacttttgtggctttgtttttttactatcttgtcctttctgcctcaggtggaacaaaattgggccacgttacagggaggtgagatgaccatccagacgacgcaagcatcagaggccacccaggcggtggcatcgttggcagaggccgcagtggcagcttctcaggagatgcagcagggagctacagtcactatggcgcttaacaggtggtggcaagagtgtgggaataagtgaggatcgcaaatctgtccctgcagatatgggtggaggccccttaaagagaaatgtgtctctgtttgccacagttggcagttggaacttaacact

SEQ ID NO: 451144 - DNA, 3369 bp, Homo sapiens
taaggtatttataccaattgacgtttaaaacgtctctaacgtgccttaaattgcgtttaaacgatactatgagctaatacactctgacaaacttcttgtcagcacgttcaaactcttcaacataatcaattgccacaacataattatacgtgtcaatcttagcaactgacatattgccgtcaaattcttgcaactctgcaatcaattctgctactgtcatcattctacctccaaatattcaaattttacgcccttgtgagacttcagtcttcccttaagtacgttgacaattgtgcttggcagaatacctcgctccttagcgtaaatggtagcactgtcaaatacttcatacgtaccgtcttcatggattgctttaataggtttttgattagttggctttaattgtttgtttgttttaacaaaattcttctctgcgtaattgttaatctcatctagtctgttgctgtctttaaacgcgttataaatcagagttttaactgattttgtttttgatttaccttttttagacagtgccactactagccaaccagacccactacgacccggctttaaaattcttccgtaacgaacactctttacacgtccatgtgtacttacttgataatatccttcgtagccttcgatatctttccatacttcaatcatttattttctcatttctatttattaactaacttatgttctgctttgttgagtacaacgtgccagttatctaagttcatgttagttttgtatccgtctattggctctaaaaactcccgatactccaacttgcggacaaacgtttcaaacatcaacttcttaactaacacattcaatcgtcgatcgcttttcgacgtttttccaattgtgacgtaaacgtttcctttaattcttacgcatgtttttaattctatatcgacaccgtgtgatactttctttacgtggtcctttatttgatattaaaatatattccgtcgcagtctccacggcgcaggcccacggtagcgcagccgctctgagtagaacttcatggaggaacacggagtgacccaaaccgaacatatggctaccatagaagcacatgcagtggcccagcaagtgcagcaggtccatgtggctacttacaccgagcatagtatgctgagtgctgatgaagactcgccttcttcgcccgaggacacctcttacgatgactcagatatactcaactccacagcagctgatgaggtgacagctcatctggcagctgcaggtcctgtgggaatggccgctgctgctgctgtggcaacaggaaagaaacggaaacggcctcatgtatttgagtctaatccatctatccggaagaggcaacaaacacgtttgcttcggaaacttcgagccacgttagatgaatatactactcgtgtgggacagcaagctattgtcctctgtatctcaccctccaaacctaaccctgtctttaaagtgtttggtgcagcacctttggagaatgtggtgcgtaagtacaagagcatgatcctggaagacctggagtctgctctggcagaacacgcccctgcgccacaggaggttaactcagaactgccgcctctcaccatcgacggaattccagtctctgtggacaaaatgacccaggcccagcttcgggcatttatcccagagatgctcaagtactctacaggtcggggaaaaccaggctgggggaaagaaagctgcaagcccatctggtggcctgaagatatcccctgggcaaatgtccggagtgatgtccgcacagaagagcaaaagcagagggtttcatggacccaggcactacggaccatagttaaaaactgttataaacagcatgggcgggaagaccttttgtatgcctttgaagatcagcaaacgcaaacacaggccacagccacacatagtatagctcatcttgtaccatcacagactgtagtccagacttttagtaaccctgatggcactgtctcacttatccaggttggtacgggggcaacagtagccacattggctgatgcttcagaattgccaaccacggtcaccgttgcccaagtgaattattctgccgtggctgatggagaggtggaacaaaattgggccacgttacagggaggtgagatgaccatccagacgacgcaagcatcagaggccacccaggcggtggcatcgttggcagaggccgcagtggcagcttctcaggagatgcagcagggagctacagtcactatggcgcttaacagcgaagctgccgcccatgctgtcgccaccctggctgaggccaccttacaaggtgggggacagatcgtcttgtctggggaaaccgcagcagccgtcggagcacttactggagtccaagatgctaatggcctggtccagatccctgtgagcatgtaccagactgtggtgaccagcctcgcccagggcaacggaccagtgcaggtggccatggcccctgtgaccaccaggatatcagacagcgcagtcaccatggacggccaagctgtggaggtggtgacattggaacagtgacatacagccatattatggcatcgttttctagtctacttcaaaattttttacacgtttgcagaggtgcaatcaaatggaattaagtctctcgactttggaaggaaagttttgttaacctttttttttttaaaaggaagaaagcggattttggaattgcattttttaaagcaccactcttgattttctgggattggtgaagaaactgcattgtcaatttcactgtcccaaaaaagccaaattgtggcaggacttctttctgcggaaatgtgtgtgtatacttatgtgtgtgtatgtgtgagtgtgaatatatgtatatgtgtacatatggacatacacatttacatatatataaagtatatatatacatatatatatatatatgtatgaaacccgcatggaattatctgtatgaaatcaaggtgcgctgtggaaacaataattcacccagtttagtgggtggtagggtacgtggccagacacagtcacccagtttttgttcataccagggtcatgcgttgagctactgacaaactcaggcggaggtgaccatgcccttcaccaaagctgcctcccagtggccacacagaactctccctgctggactcacctgaggaaagaggctccagcatggggtgggtcagagatgtgcttgcaaggtccagggactgcgtggtctgccagctgagatgctcctcgggctggcccaggtgctgaccttgccacaggcagatgaatgtcttgaaagctcccgggcctcagcctcccatctcctctccttcccaggaatccttgatctcatgactattaaaatgttgctctggtttt

SEQ ID NO: 451145 - DNA, 3534 bp, Homo sapiens
gcggcagcgctcgccattgccgctggtggcaggaggctgcgaggagccggcgcggtcgcagtctccacggcgcaggcccacggtagcgcagccgctctgagtagaacttcatggaggaacacggagtgacccaaaccgaacatatggctaccatagaagcacatgcagtggcccagcaagtgcagcaggtccatgtggctacttacaccgagcatagtatgctgagtgctgatgaagactcgccttcttcgcccgaggacacctcttacgatgactcagatatactcaactccacagcagctgatgaggtgacagctcatctggcagctgcaggtcctgtgggaatggccgctgctgctgctgtggcaacaggaaagaaacggaaacggcctcatgtatttgagtctaatccatctatccggaagaggcaacaaacacgtttgcttcggaaacttcgagccacgttagatgaatatactactcgtgtgggacagcaagctattgtcctctgtatctcaccctccaaacctaaccctgtctttaaagtgtttggtgcagcacctttggagaatgtggtgcgtaagtacaagagcatgatcctggaagacctggagtctgctctggcagaacacgcccctgcgccacaggaggttaactcagaactgccgcctctcaccatcgacggaattccagtctctgtggacaaaatgacccaggcccagcttcgggcatttatcccagagatgctcaagtactctacaggtcggggaaaaccaggctgggggaaagaaagctgcaagcccatctggtggcctgaagatatcccctgggcaaatgtccggagtgatgtccgcacagaagagcaaaagcagagggtttcatggacccaggcactacggaccatagttaaaaactgttataaacagcatgggcgggaagaccttttgtatgcctttgaagatcagcaaacgcaaacacaggccacagccacacatagtatagctcatcttgtaccatcacagactgtagtccagacttttagtaaccctgatggcactgtctcacttatccaggttggtacgggggcaacagtagccacattggctgatgcttcagaattgccaaccacggtcaccgttgcccaagtgaattattctgccgtggctgatggagaggtggaacaaaattgggccacgttacagggaggtgagatgaccatccagacgacgcaagcatcagaggccacccaggcggtggcatcgttggcagaggccgcagtggcagcttctcaggagatgcagcagggagctacagtcactatggcgcttaacagcgaagctgccgcccatgctgtcgccaccctggctgaggccaccttacaaggtgggggacagatcgtcttgtctggggaaaccgcagcagccgtcggagcacttactggagtccaagatgctaatggcctggtccagatccctgtgagcatgtaccagactgtggtgaccagcctcgcccagggcaacggaccagtgcaggtggccatggcccctgtgaccaccaggatatcagacagcgcagtcaccatggacggccaagctgtggaggtggtgacattggaacagtgacatacagccatattatggcatcgttttctagtctacttcaaaattttttacacgtttgcagaggtgcaatcaaatggaattaagtctctcgactttggaaggaaagttttgttaacctttttttttttaaaaggaagaaagcggattttggaattgcattttttaaagcaccactcttgattttctgggattggtgaagaaactgcattgtcaatttcactgtcccaaaaaagccaaattgtggcaggacttctttctgcggaaatgtgtgtgtatacttatgtgtgtgtatgtgtgagtgtgaatatatgtatatgtgtacatatggacatacacatttacatatatataaagtatatatatacatatatatatatatatgtatgaaacccgcatggaattatctgtatgaaatcaaggtgcgctgtggaaacaataattcacccagtttagtgggtggtagggtacgtggccagacacagtcacccagtttttgttcataccagggtcatgcgttgagctactgacaaactcaggcggaggtgaccatgcccttcaccaaagctgcctcccagtggccacacagaactctccctgctggactcacctgaggaaagaggctccagcatggggtgggtcagagatgtgcttgcaaggtccagggactgcgtggtctgccagctgagatgctcctcgggctggcccaggtgctgaccttgccacaggcagatgaatgtcttgaaagctcccgggcctcagcctcccatctcctctccttcccaggaatccttgatctcatgactattaaaatgttgctctggttttaaggtcagtcctgaattgctcgtatatatgaactgaaggtaaccgaagtattaggggtttgaggagtgcgtgcgtgtaagtgtgcttgtgtgtgtgcgtgcatggtgggggagaggatgggaagggggcgggggcagtggaagggaaaggaaggaaagaaaaatcgtcctagaccaggatacacccgtgggagcaattttctctactgtctgtagcttcacagaggaggcgctggaatgaacaagaagagacatctggtctgtggccacagcaccctgaacgcccctgatcttgtgtgatcttggaagctaagcttggttgggcccggtcagtacgcggaagggaagaagggacacctggccatagaaaacagctgagggtgtttgctgtgttcctggatcaggccctgcttcagaagggactcctggaggcccatgttccttgatgcaacctcgtggcccaggccgggagcagcttgcctcctcagaggtgttgactatctgggtgttcttggtaaccgttaactctgtctttctcagctgcaagccctgagtctccagtagctgaattcacctgacttttcaacaggccaaatctctgaaccttgagtacagggacagctcctcctccctcctcccagctctccccatgtgtgtgatggtgtatttaatgtgtttttttaatgcgacattaaaagattctccacgtcttgctcaacctttgagagaagtttcagattcttgtatttgcttgttttatataaaactatctaatgttctttatatgttcttttctgtacgtaatggggggaggggagggaaatttacatataaatagtcctagttctacaatttgttatttttttaattattattttttatcgtcattgtgaagttgtccagggactttaaagtccatgttcctttgtggtgaaataacctccaaatagtttgagaagttgccaagacgaagaaaaaagcaaaaccccagtagcagagcatggattctgtgttgtttcccattctgtctttgactgcctcattcaataaatagttaaaaatgtggcaacaaaagtggaattgttcat

SEQ ID NO: 451146 - DNA, 3481 bp, Homo sapiens
gcggcagcgctcgccattgccgctggtggcaggaggctgcgaggagccggcgcggtcgcagtctccacggcgcaggcccacggtagcgcagccgctctgagtagaacttcatggaggaacacggagtgacccaaaccgaacatatggctaccatagaagcacatgcagtggcccagcaagtgcagcaggtccatgtggctacttacaccgagcatagtatgctgagtgctgatgaagactcgccttcttcgcccgaggacacctcttacgatgactcagatatactcaactccacagcagctgatgaggtgacagctcatctggcagctgcaggtcctgtgggaatggccgctgctgctgctgtggcaacaggaaagaaacggaaacggcctcatgtatttgagtctaatccatctatccggaagaggcaacaaacacgtttgcttcggaaacttcgagccacgttagatgaatatactactcgtgtgggacagcaagctattgtcctctgtatctcaccctccaaacctaaccctgtctttaaagtgtttggtgcagcacctttggagaatgtggtgcgtaagtacaagagcatgatcctggaagacctggagtctgctctggcagaacacgcccctgcgccacaggaggttaactcagaactgccgcctctcaccatcgacggaattccagtctctgtggacaaaatgacccaggcccagcttcgggcatttatcccagagatgctcaagtactctacaggtcggggaaaaccaggctgggggaaagaaagctgcaagcccatctggtggcctgaagatatcccctgggcaaatgtccggagtgatgtccgcacagaagagcaaaagcagagggtttcatggacccaggcactacggaccatagttaaaaactgttataaacagcatgggcgggaagaccttttgtatgcctttgaagatcagcaaacgcaaacacaggccacagccacacatagtatagctcatcttgtaccatcacagactgtagtccagacttttagtaaccctgatggcactgtctcacttatccaggttggtacgggggcaacagtagccacattggctgatgcttcagaattgccaaccacggtcaccgttgcccaagtgaattattctgccgtggctgatggagaggtggaacaaaattgggccacgttacagggaggtgagatgaccatccagacgacgcaagcatcagaggccacccaggcggtggcatcgttggcagaggccgcagtggcagcttctcaggagatgcagcagggagctacagtcactatggcgcttaacagcgaagctgccgcccatgctgtcgccaccctggctgaggccaccttacaaggtgggggacagatcgtcttgtctggggaaaccgcagcagccgtcggagcacttactggagtccaagatgctaatggcctggtccagatccctgtgagcatgtaccagactgtggtgaccagcctcgcccagggcaacggaccagtgcaggtggccatggcccctgtgaccaccaggatatcagacagcgcagtcaccatggacggccaagctgtggaggtggtgacattggaacagtgacatacagccatattatggcatcgttttctagtctacttcaaaattttttacacgtttgcagaggtgcaatcaaatggaattaagtctctcgactttggaaggaaagttttgttaacctttttttttttaaaaggaagaaagcggattttggaattgcattttttaaagcaccactcttgattttctgggattggtgaagaaactgcattgtcaatttcactgtcccaaagtgtgtgtatgtgtgagtgtgaatatatgtatatgtgtacatatggacatacacatttacatatatataaagtatatatatacatatatatatatatatgtatgaaacccgcatggaattatctgtatgaaatcaaggtgcgctgtggaaacaataattcacccagtttagtgggtggtagggtacgtggccagacacagtcacccagtttttgttcataccagggtcatgcgttgagctactgacaaactcaggcggaggtgaccatgcccttcaccaaagctgcctcccagtggccacacagaactctccctgctggactcacctgaggaaagaggctccagcatggggtgggtcagagatgtgcttgcaaggtccagggactgcgtggtctgccagctgagatgctcctcgggctggcccaggtgctgaccttgccacaggcagatgaatgtcttgaaagctcccgggcctcagcctcccatctcctctccttcccaggaatccttgatctcatgactattaaaatgttgctctggttttaaggtcagtcctgaattgctcgtatatatgaactgaaggtaaccgaagtattaggggtttgaggagtgcgtgcgtgtaagtgtgcttgtgtgtgtgcgtgcatggtgggggagaggatgggaagggggcgggggcagtggaagggaaaggaaggaaagaaaaatcgtcctagaccaggatacacccgtgggagcaattttctctactgtctgtagcttcacagaggaggcgctggaatgaacaagaagagacatctggtctgtggccacagcaccctgaacgcccctgatcttgtgtgatcttggaagctaagcttggttgggcccggtcagtacgcggaagggaagaagggacacctggccatagaaaacagctgagggtgtttgctgtgttcctggatcaggccctgcttcagaagggactcctggaggcccatgttccttgatgcaacctcgtggcccaggccgggagcagcttgcctcctcagaggtgttgactatctgggtgttcttggtaaccgttaactctgtctttctcagctgcaagccctgagtctccagtagctgaattcacctgacttttcaacaggccaaatctctgaaccttgagtacagggacagctcctcctccctcctcccagctctccccatgtgtgtgatggtgtatttaatgtgtttttttaatgcgacattaaaagattctccacgtcttgctcaacctttgagagaagtttcagattcttgtatttgcttgttttatataaaactatctaatgttctttatatgttcttttctgtacgtaatggggggaggggagggaaatttacatataaatagtcctagttctacaatttgttatttttttaattattattttttatcgtcattgtgaagttgtccagggactttaaagtccatgttcctttgtggtgaaataacctccaaatagtttgagaagttgccaagacgaagaaaaaagcaaaaccccagtagcagagcatggattctgtgttgtttcccattctgtctttgactgcctcattcaataaatagttaaaaatgtggcaacaaaagtggaattgttcat

SEQ ID NO: 451147 - DNA, 1862 bp, Homo sapiens
gcggcagcgctcgccattgccgctggtggcaggaggctgcgaggagccggcgcggtcgcagtctccacggcgcaggcccacggtagcgcagccgctctgagtagaacttcatggaggaacacggagtgacccaaaccgaacatatggctaccatagaagcacatgcagtggcccagcaagtgcagcaggtccatgtggctacttacaccgagcatagtatgctgagtgctgatgaagactcgccttcttcgcccgaggacacctcttacgatgactcagatatactcaactccacagcagctgatgaggtgacagctcatctggcagctgcaggtcctgtgggaatggccgctgctgctgctgtggcaacaggaaagaaacggaaacggcctcatgtatttgagtctaatccatctatccggaagaggcaacaaacacgtttgcttcggaaacttcgagccacgttagatgaatatactactcgtgtgggacagcaagctattgtcctctgtatctcaccctccaaacctaaccctgtctttaaagtgtttggtgcagcacctttggagaatgtggtgcgtaagtacaagagcatgatcctggaagacctggagtctgctctggcagaacacgcccctgcgccacaggaggttaactcagaactgccgcctctcaccatcgacggaattccagtctctgtggacaaaatgacccaggcccagcttcgggcatttatcccagagatgctcaagtactctacaggtcggggaaaaccaggctgggggaaagaaagctgcaagcccatctggtggcctgaagatatcccctgggcaaatgtccggagtgatgtccgcacagaagagcaaaagcagagggtttcatggacccaggcactacggaccatagttaaaaactgttataaacagcatgggcgggaagaccttttgtatgcctttgaagatcagcaaacgcaaacacaggccacagccacacatagtatagctcatcttgtaccatcacagactgtagtccagacttttagtaaccctgatggcactgtctcacttatccaggttggtacgggggcaacagtagccacattggctgatgcttcagaattgccaaccacggtcaccgttgcccaagtgaattattctgccgtggctgatggagaggtggaacaaaattgggccacgttacagggaggtgagatgaccatccagacgacgcaagcatcagaggccacccaggcggtggcatcgttggcagaggccgcagtggcagcttctcaggagatgcagcagggagctacagtcactatggcgcttaacagcgaagctgccgcccatgctgtcgccaccctggctgaggccaccttacaaggtgggggacagatcgtcttgtctggggaaaccgcagcagccgtcggagcacttactggagtccaagatgctaatggttactgatgtgattgctcaagcccaattctgggactgggaaaacggcacatttgccatatcgattctgcagccagattgaatcagatctaaaagccacacccaggccttggtcctagcagccactcgagaatggctcacgcagatacagaaggtggtcatggcactaacgagactacatgggcgcctcctgtcaacgcctgtatcagggggcaccaaaagtgcgtgcctgacgtgccagaaactggcagaatggcaagctccccaacatcatcggtgggttccccctgatcgggtgctaagctatcctttaacccggatatactggtcgcccaatacatcaagatgtttgtactggatcgcacgataaagtacatgcaacgccgcgcttcaacgcacaactag

SEQ ID NO: 451148 - DNA, 650 bp, Homo sapiens
ggaagcgcgcggcctcgaggcccttccggtgcgggagaaactactactcccataatgccccgcggtcccgcgagctgccagtctcgtcgcgagaagcagcggcccggggcgactgagcggacaaacggaagtgtaggttacggtctgagacatcaccgccaagctgggcatcggggagatggccgagactgaccccaagaccgtgcaggacctcacctcggtggtgcagacactcctgcagcagatgcaagataaatttcagaccatgtctgaccagatcattgggagaattgatgatatgagtagtcgcattgatgatctggaaaagaatatcgcggacctcatgacacaggctggggtggaagaactggaaagtgaaaacaagatacctgccacgcaaaagagttgaaggttgctaataatttatactggaatctggcatttttccaagccaagagaagatcgaatggctttttgcagctaactactatgtgtagacaggttttatattataaagtatgcattcttatcacctagtatatagttagtttgtagagtgatttccccccagtttcttgaacatggtatcttcacatcttggaccttggtcagttgtgctattcattattaaacactaaaactttggcggt

SEQ ID NO: 451149 - DNA, 733 bp, Homo sapiens
  misc_feature (662)..(662): n is a, c, g, or t
  misc_feature (733)..(733): n is a, c, g, or t
ggaagcgcgcggcctcgaggcccttccggtgcgggagaaactactactcccataatgccccgcggtcccgcgagctgccagtctcgtcgcgagaagcagcggcccggggcgactgagcggacaaacggaagtgtaggttacggtctgagacatcaccgccaagctgggcatcggggagatggccgagactgaccccaagaccgtgcaggacctcacctcggtggtgcagacactcctgcagcagatgcaagataaatttcagaccatgtctgaccagatcattgggagaattgatgatatgagtagtcgcattgatgatctggaaaagaatatcgcggacctcatgacacaggctggggtggaagaactggaaagtgaaaacaagatacctgccacgcaaaagagttgaaggttgctaataatttatactggaatctggcatttttccaagccaagagaagatcgaatggctttttgcagctaactactatgtgtagacaggttttatattataaagtatgcattcttatcacctagtatatagttagtttgtagagtgatttccccccagtttcttgaacatggtatcttcacatcttggaccttggtcagttgtgctattcattattaaacactaaaactttggcggtaaaaaaaaaaantttcacaatcatggccgccgtttcgtctgaatcggaaacacctgtgggtacccatctcggctttggggtcn

SEQ ID NO: 451150 - DNA, 746 bp, Homo sapiens
  misc_feature (667)..(667): n is a, c, g, or t
ggaagcgcgcggcctcgaggcccttccggtgcgggagaaactactactcccataatgccccgcggtcccgcgagctgccagtctcgtcgcgagaagcagcggcccggggcgactgagcggacaaacggaagtgtaggttacggtctgagacatcaccgccaagctgggcatcggggagatggccgagactgaccccaagaccgtgcaggacctcacctcggtggtgcagacactcctgcagcagatgcaagataaatttcagaccatgtctgaccagatcattgggagaattgatgatatgagtagtcgcattgatgatctggaaaagaatatcgcggacctcatgacacaggctggggtggaagaactggaaagtgaaaacaagatacctgccacgcaaaagagttgaaggttgctaataatttatactggaatctggcatttttccaagccaagagaagatcgaatggctttttgcagctaactactatgtgtagacaggttttatattataaagtatgcattcttatcacctagtatatagttagtttgtagagtgatttccccccagtttcttgaacatggtatcttcacatcttggaccttggtcagttgtgctattcattattaaacactaaaactttggcggtccaaaaaaaaaatctcntcaattggcgcccgaatttgagcttacttggcaattctgcctaatgggagccgatttccattcaatgcccggcgtttct

SEQ ID NO: 451151 - DNA, 748 bp, Homo sapiens
ggaagcgcgcggcctcgaggcccttccggtgcgggagaaactactactcccataatgccccgcggtcccgcgagctgccagtctcgtcgcgagaagcagcggcccggggcgactgagcggacaaacggaagtgtaggttacggtctgagacatcaccgccaagctgggcatcggggagatggccgagactgaccccaagaccgtgcaggacctcacctcggtggtgcagacactcctgcagcagatgcaagataaatttcagaccatgtctgaccagatcattgggagaattgatgatatgagtagtcgcattgatgatctggaaaagaatatcgcggacctcatgacacaggctggggtggaagaactggaaagtgaaaacaagatacctgccacgcaaaagagttgaaggttgctaataatttatactggaatctggcatttttccaagccaagagaagatcgaatggctttttgcagctaactactatgtgtagacaggttttatattataaagtatgcattcttatcacctagtatatagttagtttgtagagtgatttccccccagtttcttgaacatggtatcttcacatcttggaccttggtcagttgtgctattcattattaaacactaaaactttggcggtatcttctcaccacctatctcttctcccctcttccctctctccacaacaaaccctgtgggcccccttcgcccaatccccttttgacctcgggcaagtca

SEQ ID NO: 451152 - DNA, 765 bp, Homo sapiens
  misc_feature (8)..(8): n is a, c, g, or t
  misc_feature (561)..(561): n is a, c, g, or t
  misc_feature (563)..(563): n is a, c, g, or t
  misc_feature (572)..(572): n is a, c, g, or t
ccgcgcgnactacggctgccgagaagaccaacagaaggggaccaacggaagagcacgacatcaccgccaagctgggcatcggggagatggccgagactgaccccaagaccgtgcaggacctcacctcggtggtgcagacactcctgcagcagatgcaagataaatttcagaccatgtctgaccagatcattgggagaattgatgatatgagtagtcgcattgatgatctggaaaagaatatcgcggacctcatgacacaggctggggtggaagaactggaaagtgaaaacaagatacctgccacgcaaaagagttgaaggttgctaataatttatactggaatctggcatttttccaagccaagagaagatcgaatggctttttgcagctaactactatgtgtagacaggttttatattataaagtatgcattcttatcacctagtatatagttagtttgtagagtgatttccccccagtttcttgaacatggtatcttcacatcttggaccttggtcagttgtgctattcattattaaacactaaaactttggcggtcananaaaaaaaanagaacaataaacacacagaacacaaaaaccactcaaaaacaacgcaaaacaaaacaccgaggacacctatattgggggggaggacacaaaagagcaacagaggacaaagcgaacaacgtatcacacacccacgctggagaaagagaggaaaacggagggccccaaaagggagcaaacccaaacggggacctat

SEQ ID NO: 451153 - DNA, 2017 bp, Homo sapiens
ggaagcgcgcggcctcgaggcccttccggtgcgggagaaactactactcccataatgccccgcggtcccgcgagctgccagtctcgtcgcgagaagcagcggcccggggcgactgagcggacaaacggaagtgtaggttacggtctgagacatcaccgccaagctgggcatcggggagatggccgagactgaccccaagaccgtgcaggacctcacctcggtggtgcagacactcctgcagcagatgcaagataaatttcagaccatgtctgaccagatcattgggagaattgatgatatgagtagtcgcattgatgatctggaaaagaatatcgcggacctcatgacacaggctggggtggaagaactggaaagtgaaaacaagatacctgccacgcaaaagagttgaaggttgctaataatttatactggaatctggcatttttccaagccaagagaagatcgaatggctttttgcagctaactactatgtgtagacaggttttatattataaagtatgcattcttatcacctagtatatagttagtttgtagagtgatttccccccagtttcttgaacatggtatcttcacatcttggaccttggtcagttgtgctattcattattaaacactaaaactttggcggttcttgcataacattgtcagattttttagtgtatttctgtgaagtcattttttttcttgtcattccttttgtagtagttgctgtttggataaaagttgatgtgtgattttttattaaacaaatagtaaacccttcaattatagttagtcttggtgaagtaagatgtttgtagactttagagttctttaattcttggcacaacgtgactgttgagctaacaccaaatagtgtgttggcaatacttttcaaatggctgaaaacacctaaaaattgttcattcagaaatatctgtcactgctctgttgccaaaactcagaatagaacttagacgtatgtctgagtccctgagatcacatgctaaagtcgatgaaaagtaaccactgccactgtcttgtgtcagaacttttacagtacagaaaataacagaatagccttctgtaatgaggcgtttgttagagttttgcatgagattctaatacttcagtaggaccctacctacgtggttcatctacaatggttaccataaaaaatctggcaggattttaaaactcaatcagtctttcctttgagctagtgacttgaaaagaaagagagaaggaaaagagaccatattaagtccatgccagttgcttggctagaatatgatcaacgacttgtagtagactcaagtttttaaaaaacactattttacttaaactgtttcttatctaaattcttgcagagtgtcaatgttatcattgattatagaagacagggataatacctttatctctggccactcaaaaatgcagtgccaggagtgctaaacctagaggccaatactgatgacctggaaggtgatccatatgattgtcaccacaaagtgcttttacacaaaaacttgaaaatttgaaaaacatgatttttttaagtttctcatctcaccagtcttggtgtttatattgcaaatctatcaaagtaagaaataatttgtgctgtatacaaattacatggggaacataaaggagtgagatccttctgtgataaaatgaattcaccactctggttacccaactacagaacctcctttgatcaggccagtaggttgtgatgcaggctggagcccccgaatgccccacacacactgcagcattgaccagaccatccgaaacctgcgtccctggtgatgttctcaagcctcggaagtggcaaatggaaatgatatggccggttgcggttgtaggagagttgtgacttaggcaggagtcgacctcctcaagtaatggaacgatttcaaaggcaggctgccctgaccaaaaatatctgccatgaataaaggtgcctgaaatcctgcaaaaaaaataaaaagatacgaacacacacacaaag

SEQ ID NO: 451154 - DNA, 1939 bp, Homo sapiens
ggaagcgcgcggcctcgaggcccttccggtgcgggagaaactactactcccataatgccccgcggtcccgcgagctgccagtctcgtcgcgagaagcagcggcccggggcgactgagcggacaaacggaagtgtaggttacggtctgagacatcaccgccaagctgggcatcggggagatggccgagactgaccccaagaccgtgcaggacctcacctcggtggtgcagacactcctgcagcagatgcaagataaatttcagaccatgtctgaccagatcattgggagaattgatgatatgagtagtcgcattgatgatctggaaaagaatatcgcggacctcatgacacaggctggggtggaagaactggaaagtgaaaacaagatacctgccacgcaaaagagttgaaggttgctaataatttatactggaatctggcatttttccaagccaagagaagatcgaatggctttttgcagctaactactatgtgtagacaggttttatattataaagtatgcattcttatcacctagtatatagttagtttgtagagtgatttccccccagtttcttgaacatggtatcttcacatcttggaccttggtcagttgtgctattcattattaaacactaaaactttggcggttcattttttttcttgtcattccttttgtagtagttgctgtttggataaaagttgatgtgtgattttttattaaacaaatagtaaacccttcaattatagttagtcttggtgaagtaagatgtttgtagactttagagttctttaattcttggcacaacgtgactgttgagctaacaccaaatagtgtgttggcaatacttttcaaatggctgaaaacacctaaaaattgttcattcagaaatatctgtcactgctctgttgccaaaactcagaatagaacttagacgtatgtctgagtccctgagatcacatgctaaagtcgatgaaaagtaaccactgccactgtcttgtgtcagaacttttacagtacagaaaataacagaatagccttctgtaatgaggcgtttgttagagttttgcatgagattctaatacttcagtaggaccctacctacgtggttcatctacaatggttaccataaaaaatctggcaggattttaaaactcaatcagtctttcctttgagctagtgacttgaaaagaaagagagaaggaaaagagaccatattaagtccatgccagttgcttggctagaatatgatcaacgacttgtagtagactcaagtttttaaaaaacactattttacttaaactgtttcttatctaaattcttgcagagtgtcaatgttatcattgattatagaagacagggataatacctttatctctggccactcaaaaatgcagtgccaggagtgctaaacctagaggccaatactgatgacctggaaggtgatccatatgattgtcaccacaaagtgcttttacacaaaaacttgaaaatttgaaaaacatgatttttttaagtttctcatctcaccagtcttggtgtttatattgcaaatctatcaaagtaagaaataatttgtgctgtatacaaattacatggggaacataaaggagtgagatccttctgtgataaaatgaattcaccactctggttacccaactacagaacctcctttgatcaggccagtaggttgtgatgcaggctggagcccccgaatgccccacacacactgcagcattgaccagaccatccgaaacctgcgtccctggtgatgttctcaagcctcggaagtggcaaatggaaatgatatggccggttgcggttgtaggagagttgtgacttaggcaggagtcgacctcctcaagtaatggaacgatttcaaaggcaggctgccctgaccaaaaatatctgccatgaataaaggtgcctgaaatcctgc

SEQ ID NO: 451155 - DNA, 1948 bp, Homo sapiens
ggaagcgcgcggcctcgaggcccttccggtgcgggagaaactactactcccataatgccccgcggtcccgcgagctgccagtctcgtcgcgagaagcagcggcccggggcgactgagcggacaaacggaagtgtaggttacggtctgagacatcaccgccaagctgggcatcggggagatggccgagactgaccccaagaccgtgcaggacctcacctcggtggtgcagacactcctgcagcagatgcaagataaatttcagaccatgtctgaccagatcattgggagaattgatgatatgagtagtcgcattgatgatctggaaaagaatatcgcggacctcatgacacaggctggggtggaagaactggaaagtgaaaacaagatacctgccacgcaaaagagttgaagtccaagccaagagaagatcgaatggctttttgcagctaactactatgtgtagacaggttttatattataaagtatgcattcttatcacctagtatatagttagtttgtagagtgatttccccccagtttcttgaacatggtatcttcacatcttggaccttggtcagttgtgctattcattattaaacactaaaactttggcggttcttgcataacattgtcagattttttagtgtatttctgtgaagtcattttttttcttgtcattccttttgtagtagttgctgtttggataaaagttgatgtgtgattttttattaaacaaatagtaaacccttcaattatagttagtcttggtgaagtaagatgtttgtagactttagagttctttaattcttggcacaacgtgactgttgagctaacaccaaatagtgtgttggcaatacttttcaaatggctgaaaacacctaaaaattgttcattcagaaatatctgtcactgctctgttgccaaaactcagaatagaacttagacgtatgtctgagtccctgagatcacatgctaaagtcgatgaaaagtaaccactgccactgtcttgtgtcagaacttttacagtacagaaaataacagaatagccttctgtaatgaggcgtttgttagagttttgcatgagattctaatacttcagtaggaccctacctacgtggttcatctacaatggttaccataaaaaatctggcaggattttaaaactcaatcagtctttcctttgagctagtgacttgaaaagaaagagagaaggaaaagagaccatattaagtccatgccagttgcttggctagaatatgatcaacgacttgtagtagactcaagtttttaaaaaacactattttacttaaactgtttcttatctaaattcttgcagagtgtcaatgttatcattgattatagaagacagggataatacctttatctctggccactcaaaaatgcagtgccaggagtgctaaacctagaggccaatactgatgacctggaaggtgatccatatgattgtcaccacaaagtgcttttacacaaaaacttgaaaatttgaaaaacatgatttttttaagtttctcatctcaccagtcttggtgtttatattgcaaatctatcaaagtaagaaataatttgtgctgtatacaaattacatggggaacataaaggagtgagatccttctgtgataaaatgaattcaccactctggttacccaactacagaacctcctttgatcaggccagtaggttgtgatgcaggctggagcccccgaatgccccacacacactgcagcattgaccagaccatccgaaacctgcgtccctggtgatgttctcaagcctcggaagtggcaaatggaaatgatatggccggttgcggttgtaggagagttgtgacttaggcaggagtcgacctcctcaagtaatggaacgatttcaaaggcaggctgccctgaccaaaaatatctgccatgaataaaggtgcctgaaatcctgc

SEQ ID NO: 451156 - DNA, 664 bp, Homo sapiens
ggaagcgcgcggcctcgaggcccttccggtgcgggagaaactactactcccataatgccccgcggtcccgcgagctgccagtctcgtcgcgagaagcagcggcccggggcgactgagcggacaaacggaagtgtaggttacggtctgagacatcaccgccaagctgggcatcggggagatggccgagactgaccccaagaccgtgcaggacctcacctcggtggtgcagacactcctgcagcagatgcaagataaatttcagaccatgtctgaccagatcattgggagaattgatgatatgagtagtcgcattgatgatctggaaaagaatatcgcggacctcatgacacaggctggggtggaagaactggaaagtgaaaacaagatacctgccacgcaaaagagttgaagttctgttttttgtgggggggggggggggttttttttttgttttttttttccaagccaagagaagatcgaatggctttttgcagctaactactatgtgtagacaggttttatattataaagtatgcattcttatcacctagtatatagttagtttgtagagtgatttccccccagtttcttgaacatggtatcttcacatcttggaccttggtcagttgtgctattcattattaaacactaaaactttggcggt

SEQ ID NO: 451157 - DNA, 325 bp, Homo sapiens
gcagattgcagcggacatcccagaagtggttgtttcccttgcatgggacgaaagcttggctccaaagcatcacaggctcaaggaaaaacatggcctgctattggccccacacacactgcagcattgaccagaccatccgaaacctgcgtccctggtgatgttctcaagcctcggaagtggcaaatggaaatgatatggccggttgcggttgtaggagagttgtgacttaggcaggagtcgacctcctcaagtaatggaacgatttcaaaggcaggctgccctgaccaaaaatatctgccatgaataaaggtgcctgaaatcctgc

SEQ ID NO: 451158 - DNA, 448 bp, Homo sapiens
tattgctccatttctgagttggtctcactttccaccccactgacggcgcgctgcgtgaggggcggggcatagagggaggggaggggctatgcgaaagaaggcggggagagtggggtggggccgctccttggaacggaagcgcgcggcctcgaggcccttccggtgcgggagaaactactactcccataatgccccgcggtcccgcgagctgccagtctcgtcgcgagaagcagcggcccggggcgactgagcggacaaacggaagtgtaggttacggtctgagacatcaccgccaagctgggcatcggggagatggccgagactgaccccaagaccgtgcaggacctcacctcggtggtaagggacggctgtgagggccggaggccgcggccttcccgggcggcgccgggccaagccctgctggacagaggcgcgcccaccgcggccg

SEQ ID NO: 451159 - DNA, 359 bp, Homo sapiens
agaaaataagtttaactcagtaggagagtggaaagggatttgtagttgataggtctatatgtcatttttacttgtgctcatataatgaaaaacatgttgatgatttttccttcttcaacagttgctaataatttatactggaatctggcatttttccaagccaagagaagatcgaatggctttttgcagctaactactatgtgtagacaggttttatattataaagtatgcattcttatcacctagtatatagttagtttgtagagtgatttccccccagtttcttgaacatggtatcttcacatcttggaccttggtcagttgtgctattcattattaaacactaaaactttggcggt

SEQ ID NO: 451160 - DNA, 558 bp, Homo sapiens
  misc_feature (8)..(8): n is a, c, g, or t
ccgcgcgnactacggctgccgagaagaccaacagaaggggaccaacggaagagcacgacatcaccgccaagctgggcatcggggagatggccgagactgaccccaagaccgtgcaggacctcacctcggtggtgcagacactcctgcagcagatgcaagataaatttcagaccatgtctgaccagatcattgggagaattgatgatatgagtagtcgcattgatgatctggaaaagaatatcgcggacctcatgacacaggctggggtggaagaactggaaagtgaaaacaagatacctgccacgcaaaagagttgaaggttgctaataatttatactggaatctggcatttttccaagccaagagaagatcgaatggctttttgcagctaactactatgtgtagacaggttttatattataaagtatgcattcttatcacctagtatatagttagtttgtagagtgatttccccccagtttcttgaacatggtatcttcacatcttggaccttggtcagttgtgctattcattattaaacactaaaactttggcggt

SEQ ID NO: 451161 - DNA, 1890 bp, Homo sapiens
  misc_feature (8)..(8): n is a, c, g, or t
ccgcgcgnactacggctgccgagaagaccaacagaaggggaccaacggaagagcacgacatcaccgccaagctgggcatcggggagatggccgagactgaccccaagaccgtgcaggacctcacctcggtggtgcagacactcctgcagcagatgcaagataaatttcagaccatgtctgaccagatcattgggagaattgatgatatgagtagtcgcattgatgatctggaaaagaatatcgcggacctcatgacacaggctggggtggaagaactggaaagtgaaaacaagatacctgccacgcaaaagagttgaaggttgctaataatttatactggaatctggcatttttccaagccaagagaagatcgaatggctttttgcagctaactactatgtgtagacaggttttatattataaagtatgcattcttatcacctagtatatagttagtttgtagagtgatttccccccagtttcttgaacatggtatcttcacatcttggaccttggtcagttgtgctattcattattaaacactaaaactttggcggttcttgcataacattgtcagattttttagtgtatttctgtgaagtcattttttttcttgtcattccttttgtagtagttgctgtttggataaaagttgatgtgtgattttttattaaacaaatagtaaacccttcaattatagttagtcttggtgaagtaagatgtttgtagactttagagttctttaattcttggcacaacgtgactgttgagctaacaccaaatagtgtgttggcaatacttttcaaatggctgaaaacacctaaaaattgttcattcagaaatatctgtcactgctctgttgccaaaactcagaatagaacttagacgtatgtctgagtccctgagatcacatgctaaagtcgatgaaaagtaaccactgccactgtcttgtgtcagaacttttacagtacagaaaataacagaatagccttctgtaatgaggcgtttgttagagttttgcatgagattctaatacttcagtaggaccctacctacgtggttcatctacaatggttaccataaaaaatctggcaggattttaaaactcaatcagtctttcctttgagctagtgacttgaaaagaaagagagaaggaaaagagaccatattaagtccatgccagttgcttggctagaatatgatcaacgacttgtagtagactcaagtttttaaaaaacactattttacttaaactgtttcttatctaaattcttgcagagtgtcaatgttatcattgattatagaagacagggataatacctttatctctggccactcaaaaatgcagtgccaggagtgctaaacctagaggccaatactgatgacctggaaggtgatccatatgattgtcaccacaaagtgcttttacacaaaaacttgaaaatttgaaaaacatgatttttttaagtttctcatctcaccagtcttggtgtttatattgcaaatctatcaaagtaagaaataatttgtgctgtatacaaattacatggggaacataaaggagtgagatccttctgtgataaaatgaattcaccactctggttacccaactacagaacctcctttgatcaggccagtaggttgtgatgcaggctggagcccccgaatgccccacacacactgcagcattgaccagaccatccgaaacctgcgtccctggtgatgttctcaagcctcggaagtggcaaatggaaatgatatggccggttgcggttgtaggagagttgtgacttaggcaggagtcgacctcctcaagtaatggaacgatttcaaaggcaggctgccctgaccaaaaatatctgccatgaataaaggtgcctgaaatcctgc

SEQ ID NO: 451162 - DNA, 857 bp, Homo sapiens
  misc_feature (653)..(653): n is a, c, g, or t
  misc_feature (655)..(655): n is a, c, g, or t
  misc_feature (664)..(664): n is a, c, g, or t
ggaagcgcgcggcctcgaggcccttccggtgcgggagaaactactactcccataatgccccgcggtcccgcgagctgccagtctcgtcgcgagaagcagcggcccggggcgactgagcggacaaacggaagtgtaggttacggtctgagacatcaccgccaagctgggcatcggggagatggccgagactgaccccaagaccgtgcaggacctcacctcggtggtgcagacactcctgcagcagatgcaagataaatttcagaccatgtctgaccagatcattgggagaattgatgatatgagtagtcgcattgatgatctggaaaagaatatcgcggacctcatgacacaggctggggtggaagaactggaaagtgaaaacaagatacctgccacgcaaaagagttgaaggttgctaataatttatactggaatctggcatttttccaagccaagagaagatcgaatggctttttgcagctaactactatgtgtagacaggttttatattataaagtatgcattcttatcacctagtatatagttagtttgtagagtgatttccccccagtttcttgaacatggtatcttcacatcttggaccttggtcagttgtgctattcattattaaacactaaaactttggcggtcananaaaaaaaanagaacaataaacacacagaacacaaaaaccactcaaaaacaacgcaaaacaaaacaccgaggacacctatattgggggggaggacacaaaagagcaacagaggacaaagcgaacaacgtatcacacacccacgctggagaaagagaggaaaacggagggccccaaaagggagcaaacccaaacggggacctat

SEQ ID NO: 451163 - DNA, 1928 bp, Homo sapiens
ggaagcgcgcggcctcgaggcccttccggtgcgggagaaactactactcccataatgccccgcggtcccgcgagctgccagtctcgtcgcgagaagcagcggcccggggcgactgagcggacaaacggaagtgtaggttacggtctgagacatcaccgccaagctgggcatcggggagatggccgagactgaccccaagaccgtgcaggacctcacctcggtggtgcagacactcctgcagcagatgcaagataaatttcagaccatgtctgaccagatcattgggagaattgatgatatgagtagtcgcattgatgatctggaaaagaatatcgcggacctcatgacacaggctggggtggaagaactggaaagtgaaaacaagatacctgccacgcaaaagagttgaaggttgctaataatttatactggaatctggcatttttccaagccaagagaagatcgaatggctttttgcagctaactactatgtgtagacaggttttatattataaagtatgcattcttatcacctagtatatagttagtttgtagagtgatttccccccagtttcttgaacatggtatcttcacatcttggaccttggtcagttgtgctattcattattaaacactaaaactttggcggttcttgcataacattgtcagattttttagtgtatttctgtgaagtcattttttttcttgtcattccttttgtagtagttgctgtttggattagtcttggtgaagtaagatgtttgtagactttagagttctttaattcttggcacaacgtgactgttgagctaacaccaaatagtgtgttggcaatacttttcaaatggctgaaaacacctaaaaattgttcattcagaaatatctgtcactgctctgttgccaaaactcagaatagaacttagacgtatgtctgagtccctgagatcacatgctaaagtcgatgaaaagtaaccactgccactgtcttgtgtcagaacttttacagtacagaaaataacagaatagccttctgtaatgaggcgtttgttagagttttgcatgagattctaatacttcagtaggaccctacctacgtggttcatctacaatggttaccataaaaaatctggcaggattttaaaactcaatcagtctttcctttgagctagtgacttgaaaagaaagagagaaggaaaagagaccatattaagtccatgccagttgcttggctagaatatgatcaacgacttgtagtagactcaagtttttaaaaaacactattttacttaaactgtttcttatctaaattcttgcagagtgtcaatgttatcattgattatagaagacagggataatacctttatctctggccactcaaaaatgcagtgccaggagtgctaaacctagaggccaatactgatgacctggaaggtgatccatatgattgtcaccacaaagtgcttttacacaaaaacttgaaaatttgaaaaacatgatttttttaagtttctcatctcaccagtcttggtgtttatattgcaaatctatcaaagtaagaaataatttgtgctgtatacaaattacatggggaacataaaggagtgagatccttctgtgataaaatgaattcaccactctggttacccaactacagaacctcctttgatcaggccagtaggttgtgatgcaggctggagcccccgaatgccccacacacactgcagcattgaccagaccatccgaaacctgcgtccctggtgatgttctcaagcctcggaagtggcaaatggaaatgatatggccggttgcggttgtaggagagttgtgacttaggcaggagtcgacctcctcaagtaatggaacgatttcaaaggcaggctgccctgaccaaaaatatctgccatgaataaaggtgcctgaaatcctgc

SEQ ID NO: 451164 - DNA, 1982 bp, Homo sapiens
ggaagcgcgcggcctcgaggcccttccggtgcgggagaaactactactcccataatgccccgcggtcccgcgagctgccagtctcgtcgcgagaagcagcggcccggggcgactgagcggacaaacggaagtgtaggttacggtctgagacatcaccgccaagctgggcatcggggagatggccgagactgaccccaagaccgtgcaggacctcacctcggtggtgcagacactcctgcagcagatgcaagataaatttcagaccatgtctgaccagatcattgggagaattgatgatatgagtagtcgcattgatgatctggaaaagaatatcgcggacctcatgacacaggctggggtggaagaactggaaagtgaaaacaagatacctgccacgcaaaagagttgaaggttgctaataatttatactggaatctggcatttttccaagccaagagaagatcgaatggctttttgcagctaactactatgtgtagacaggttttatattataaagtatgcattcttatcacctagtatatagttagtttgtagagtgatttccccccagtttcttgaacatggtatcttcacatcttggaccttggtcagttgtgctattcattattaaacactaaaactttggcggttcttgcataacattgtcagattttttagtgtatttctgtgaagtcattttttttcttgtcattccttttgtagtagttgctgtttggataaaagttgatgtgtgattttttattaaacaaatagtaaacccttcaattatagttagtcttggtgaagtaagatgtttgtagactttagagttctttaattcttggcacaacgtgactgttgagctaacaccaaatagtgtgttggcaatacttttcaaatggctgaaaacacctaaaaattgttcattcagaaatatctgtcactgctctgttgccaaaactcagaatagaacttagacgtatgtctgagtccctgagatcacatgctaaagtcgatgaaaagtaaccactgccactgtcttgtgtcagaacttttacagtacagaaaataacagaatagccttctgtaatgaggcgtttgttagagttttgcatgagattctaatacttcagtaggaccctacctacgtggttcatctacaatggttaccataaaaaatctggcaggattttaaaactcaatcagtctttcctttgagctagtgacttgaaaagaaagagagaaggaaaagagaccatattaagtccatgccagttgcttggctagaatatgatcaacgacttgtagtagactcaagtttttaaaaaacactattttacttaaactgtttcttatctaaattcttgcagagtgtcaatgttatcattgattatagaagacagggataatacctttatctctggccactcaaaaatgcagtgccaggagtgctaaacctagaggccaatactgatgacctggaaggtgatccatatgattgtcaccacaaagtgcttttacacaaaaacttgaaaatttgaaaaacatgatttttttaagtttctcatctcaccagtcttggtgtttatattgcaaatctatcaaagtaagaaataatttgtgctgtatacaaattacatggggaacataaaggagtgagatccttctgtgataaaatgaattcaccactctggttacccaactacagaacctcctttgatcaggccagtaggttgtgatgcaggctggagcccccgaatgccccacacacactgcagcattgaccagaccatccgaaacctgcgtccctggtgatgttctcaagcctcggaagtggcaaatggaaatgatatggccggttgcggttgtaggagagttgtgacttaggcaggagtcgacctcctcaagtaatggaacgatttcaaaggcaggctgccctgaccaaaaatatctgccatgaataaaggtgcctgaaatcctgc

SEQ ID NO: 451165 - DNA, 829 bp, Homo sapiens
ggaagcgcgcggcctcgaggcccttccggtgcgggagaaactactactcccataatgccccgcggtcccgcgagctgccagtctcgtcgcgagaagcagcggcccggggcgactgagcggacaaacggaagtgtaggttacggtctgagacatcaccgccaagctgggcatcggggagatggccgagactgaccccaagaccgtgcaggacctcacctcggtggtgcagacactcctgcagcagatgcaagataaatttcagaccatgtctgaccagatcattgggagaattgatgatatgagtagtcgcattgatgatctggaaaagaatatcgcggacctcatgacacaggctggggtggaagaactggaaagtgaaaacaagatacctgccacgcaaaagagttgaaggttgctaataatttatactggaatctggcatttttccaagccaagagaagatcgaatggctttttgcagctaactactatgtgtagacaggttttatattataaagtatgcattcttatcacctagtatatagttagtttgtagagtgatttccccccagtttcttgaacatggtatcttcacatcttggaccttggtcagttgtgctattcattattaaacactaaaactttggcggtcgaagccctttttttacttggcattcttttttgagggattttttgttggattaaagtggaggcgcgagtttttattaaacaaatattcaaccccttgatacatgagataatattattccatcattacctggttttcctccttgtcctatgcaatttagaatgtacaagttttcttgccc

SEQ ID NO: 451166 - DNA, 815 bp, Homo sapiens
ggaagcgcgcggcctcgaggcccttccggtgcgggagaaactactactcccataatgccccgcggtcccgcgagctgccagtctcgtcgcgagaagcagcggcccggggcgactgagcggacaaacggaagtgtaggttacggtctgagacatcaccgccaagctgggcatcggggagatggccgagactgaccccaagaccgtgcaggacctcacctcggtggtgcagacactcctgcagcagatgcaagataaatttcagaccatgtctgaccagatcattgggagaattgatgatatgagtagtcgcattgatgatctggaaaagaatatcgcggacctcatgacacaggctggggtggaagaactggaaagtgaaaacaagatacctgccacgcaaaagagttgaaggttgctaataatttatactggaatctggcatttttccaagccaagagaagatcgaatggctttttgcagctaactactatgtgtagacaggttttatattataaagtatgcattcttatcacctagtatatagttagtttgtagagtgatttccccccagtttcttgaacatggtatcttcacatcttggaccttggtcagttgtgctattcattattaaacactaaaactttggcggttcttgcataacattgtcagattttttagtgtatttctgtgaagtcattttttttcttgtcattccttttgtagtagttgctgtttggatccttggggaagaagatgtttgagacttaagagttttaattttggcacaacggactgttggttacaccaataggggg

SEQ ID NO: 451167 - DNA, 623 bp, Homo sapiens
agtggcagcatgatgtagtgaaaagagcctggactttggagacatgccgagtggggtgacagctttctcacccgctggctctgtgaccacagcccagccatgtcctgggtgcttcagctgccaaatgcaaatatctgccgtgcagagtcacgttgcatattgagtgagctattttaagcatagagtatggcatgtagtaggttctcagtatagggtaatcattattgttattattcctgtaatattttcaaaatgtttcttttagaatattttgattgatgcctgtgttttagactccgactcagggctcctccaacaggtatgttttaaaaccatgctttgtgtcggtggttatgacaattagtgatttttatattgattacaatttaaaatgaaagctttgggtatattgggttaaataaaatatgttattcagcctaattttatctatgtctttcccccttacgtatggagctactggaaaattttaaattacatattgcttgcgttatatttccgttgggcagcactaaaagacaaaaactgaattttactttaacccgaaagggaaacaaaaccctaaagtaagtctgaagaaattactgagtttttgttagatgttt

SEQ ID NO: 451168 - DNA, 2420 bp, Homo sapiens
  misc_feature (1929)..(1929): n is a, c, g, or t
acttggcggcgccggacgttgggctgcgcaggatttgagacgctcccctgaccaccacttgctctgcgctgaggtgctgggacagccatggtttcagacgaagatgaattgaatcttctggttattgtagttgatgccaacccaatttggtggggaaagcaagcattaaaggaatctcagttcactttatccaaatgcatagatgccgtgatggtgctgggaaattcgcatttattcatgaatcgttccaacaaacttgctgtgatagcaagtcacattcaagaaagccgattcttatatcctggaaagaatggcagacttggagacttcttcggagaccctggcaaccctcctgaatttaatccctctgggagtaaagatggaaaatacgaacttttaacctcagcaaatgaagttattgttgaagagattaaagatctaatgaccaaaagtgacataaagggtcaacatacagaaactttgctggcaggatccctggccaaagccctttgctacattcatagaatgaacaaggaagttaaagacaatcaggaaatgaaatcaaggatattggtgattaaggctgcagaagacagtgcgttgcagtatatgaacttcatgaatgtcatctttgcagcacagaaacagaatattttgattgatgcctgtgttttagactccgactcagggctcctccaacaggcttgtgacatcacgggaggactgtacctgaaggtgcctcagatgccttctcttctgcagtatttgctgtgggtgtttcttcccgatcaagatcagagatctcagttaatcctcccacccccggttcatgttgactacagggctgcttgcttctgtcatcgaaatctcattgaaattggttatgtctgttctgtgtgtttgtcaatattctgcaatttcagccccatttgtactacgtgcgagacagcctttaaaatttctctgcctccagtgctgaaagccaagaaaaagaaactgaaagtgtctgcctgaggataaaatattttccccatcttttagagctgttaatagaaattatatagcagattctttgttgggaagactgaaaaaaataaagataggtataggataatttttaatatggtgaccttacagaaaatatttcccaaacatccttttcatcctgtgcttctggaggactgatttgtttgagggaatcattctatgcattatatcctaaaatattctatgactggtttctgtccatgtttgtggctttcatttttttaatgggatgactattagtcaaagtcagcttgtcatgactcatcataggctttctaacctactccctgaatccgggtcctcattgtgaaatgcatgccatacgaaatttgaacgtagctttggaaaaagggactatttgtggagtaatggcattaatcaacatagaacatcttatttgaatcaacagttaacttcagtagtcatgtgaataaaattcttattgtctaaattgagacagcctcagatatttgcagatatttactttttgtctgatatcagtacatatttggacaaagtcatctaaataatagtttgtcaccaaataactacaaaatctcattttaaatgagtaaggagaacgtgtacagaagcaaattttcttcaaaatagttgtgggaagagcttatatgtgaaagcttatgactggttttgagggagaacttactggagaaaatggactctatgttaagtatggttttcagatagaattctttccttttttaatgaggaaaaaaaatccacattaatattgaaactgcacctgtaatcccagcactttgggaggctgaggacagaggattgcttgagcccaggagttcgagagcagcctgggcagcaaagtgagaccccatctctactaaaaatttaaatgtatttatnaaaactgttctctagaagctttggactgaatcccaaaagtgtttataagttcaaaagcaaaagtatttgtaatttcaacaacaaaaaatgtatttctttatgtaatcttgaaattattaaaagtccttttagcttctagcacatatttgtacaaagagtttaaggaatggtggctggtttggtttgttttttaaaaatgtttactgacgaggccgggcgtggtggctcacccctgcaatcccagcactttgggaggccgaggcaggcagatcacaaggtcaggagttcaagatcagcctggccagtatggtgaaaccctgtctctactaaaaatagaaaaattagccatgcgaagtagcaggtgcctgtagttccagctactcgggaggctgaggcaagagaattgcttgaatccaggaggcagaggttgcagtgagccaagatagcgcctctgtactccagcctgggtgacagagcgagactctgtatca

SEQ ID NO: 451169 - DNA, 2340 bp, Homo sapiens
  misc_feature (1849)..(1849): n is a, c, g, or t
acttggcggcgccggacgttgggctgcgcaggatttgagacgctcccctgaccaccacttgctctgcgctgaggtgctgggacagccatggtttcagacgttcactttatccaaatgcatagatgccgtgatggtgctgggaaattcgcatttattcatgaatcgttccaacaaacttgctgtgatagcaagtcacattcaagaaagccgattcttatatcctggaaagaatggcagacttggagacttcttcggagaccctggcaaccctcctgaatttaatccctctgggagtaaagatggaaaatacgaacttttaacctcagcaaatgaagttattgttgaagagattaaagatctaatgaccaaaagtgacataaagggtcaacatacagaaactttgctggcaggatccctggccaaagccctttgctacattcatagaatgaacaaggaagttaaagacaatcaggaaatgaaatcaaggatattggtgattaaggctgcagaagacagtgcgttgcagtatatgaacttcatgaatgtcatctttgcagcacagaaacagaatattttgattgatgcctgtgttttagactccgactcagggctcctccaacaggcttgtgacatcacgggaggactgtacctgaaggtgcctcagatgccttctcttctgcagtatttgctgtgggtgtttcttcccgatcaagatcagagatctcagttaatcctcccacccccggttcatgttgactacagggctgcttgcttctgtcatcgaaatctcattgaaattggttatgtctgttctgtgtgtttgtcaatattctgcaatttcagccccatttgtactacgtgcgagacagcctttaaaatttctctgcctccagtgctgaaagccaagaaaaagaaactgaaagtgtctgcctgaggataaaatattttccccatcttttagagctgttaatagaaattatatagcagattctttgttgggaagactgaaaaaaataaagataggtataggataatttttaatatggtgaccttacagaaaatatttcccaaacatccttttcatcctgtgcttctggaggactgatttgtttgagggaatcattctatgcattatatcctaaaatattctatgactggtttctgtccatgtttgtggctttcatttttttaatgggatgactattagtcaaagtcagcttgtcatgactcatcataggctttctaacctactccctgaatccgggtcctcattgtgaaatgcatgccatacgaaatttgaacgtagctttggaaaaagggactatttgtggagtaatggcattaatcaacatagaacatcttatttgaatcaacagttaacttcagtagtcatgtgaataaaattcttattgtctaaattgagacagcctcagatatttgcagatatttactttttgtctgatatcagtacatatttggacaaagtcatctaaataatagtttgtcaccaaataactacaaaatctcattttaaatgagtaaggagaacgtgtacagaagcaaattttcttcaaaatagttgtgggaagagcttatatgtgaaagcttatgactggttttgagggagaacttactggagaaaatggactctatgttaagtatggttttcagatagaattctttccttttttaatgaggaaaaaaaatccacattaatattgaaactgcacctgtaatcccagcactttgggaggctgaggacagaggattgcttgagcccaggagttcgagagcagcctgggcagcaaagtgagaccccatctctactaaaaatttaaatgtatttatnaaaactgttctctagaagctttggactgaatcccaaaagtgtttataagttcaaaagcaaaagtatttgtaatttcaacaacaaaaaatgtatttctttatgtaatcttgaaattattaaaagtccttttagcttctagcacatatttgtacaaagagtttaaggaatggtggctggtttggtttgttttttaaaaatgtttactgacgaggccgggcgtggtggctcacccctgcaatcccagcactttgggaggccgaggcaggcagatcacaaggtcaggagttcaagatcagcctggccagtatggtgaaaccctgtctctactaaaaatagaaaaattagccatgcgaagtagcaggtgcctgtagttccagctactcgggaggctgaggcaagagaattgcttgaatccaggaggcagaggttgcagtgagccaagatagcgcctctgtactccagcctgggtgacagagcgagactctgtatca

SEQ ID NO: 451170 - DNA, 2256 bp, Homo sapiens
  misc_feature (1765)..(1765): n is a, c, g, or t
acttggcggcgccggacgttgggctgcgcaggatttgagacgctcccctgaccaccacttgctctgcgctgaggtgctgggacagccatggtttcagacgaagatgaattgaatcttctggttattgtagttgatgccaacccaatttggtggggaaagcaagcattaaaggaatctcagttcactttatccaaatgcatagatgccgtgatggtgctgggaaattcgcatttattcatgaatcgttccaacaaacttgctgtgatagcaagtcacattcaagaaaggtgacataaagggtcaacatacagaaactttgctggcaggatccctggccaaagccctttgctacattcatagaatgaacaaggaagttaaagacaatcaggaaatgaaatcaaggatattggtgattaaggctgcagaagacagtgcgttgcagtatatgaacttcatgaatgtcatctttgcagcacagaaacagaatattttgattgatgcctgtgttttagactccgactcagggctcctccaacaggcttgtgacatcacgggaggactgtacctgaaggtgcctcagatgccttctcttctgcagtatttgctgtgggtgtttcttcccgatcaagatcagagatctcagttaatcctcccacccccggttcatgttgactacagggctgcttgcttctgtcatcgaaatctcattgaaattggttatgtctgttctgtgtgtttgtcaatattctgcaatttcagccccatttgtactacgtgcgagacagcctttaaaatttctctgcctccagtgctgaaagccaagaaaaagaaactgaaagtgtctgcctgaggataaaatattttccccatcttttagagctgttaatagaaattatatagcagattctttgttgggaagactgaaaaaaataaagataggtataggataatttttaatatggtgaccttacagaaaatatttcccaaacatccttttcatcctgtgcttctggaggactgatttgtttgagggaatcattctatgcattatatcctaaaatattctatgactggtttctgtccatgtttgtggctttcatttttttaatgggatgactattagtcaaagtcagcttgtcatgactcatcataggctttctaacctactccctgaatccgggtcctcattgtgaaatgcatgccatacgaaatttgaacgtagctttggaaaaagggactatttgtggagtaatggcattaatcaacatagaacatcttatttgaatcaacagttaacttcagtagtcatgtgaataaaattcttattgtctaaattgagacagcctcagatatttgcagatatttactttttgtctgatatcagtacatatttggacaaagtcatctaaataatagtttgtcaccaaataactacaaaatctcattttaaatgagtaaggagaacgtgtacagaagcaaattttcttcaaaatagttgtgggaagagcttatatgtgaaagcttatgactggttttgagggagaacttactggagaaaatggactctatgttaagtatggttttcagatagaattctttccttttttaatgaggaaaaaaaatccacattaatattgaaactgcacctgtaatcccagcactttgggaggctgaggacagaggattgcttgagcccaggagttcgagagcagcctgggcagcaaagtgagaccccatctctactaaaaatttaaatgtatttatnaaaactgttctctagaagctttggactgaatcccaaaagtgtttataagttcaaaagcaaaagtatttgtaatttcaacaacaaaaaatgtatttctttatgtaatcttgaaattattaaaagtccttttagcttctagcacatatttgtacaaagagtttaaggaatggtggctggtttggtttgttttttaaaaatgtttactgacgaggccgggcgtggtggctcacccctgcaatcccagcactttgggaggccgaggcaggcagatcacaaggtcaggagttcaagatcagcctggccagtatggtgaaaccctgtctctactaaaaatagaaaaattagccatgcgaagtagcaggtgcctgtagttccagctactcgggaggctgaggcaagagaattgcttgaatccaggaggcagaggttgcagtgagccaagatagcgcctctgtactccagcctgggtgacagagcgagactctgtatca

SEQ ID NO: 451171 - DNA, 2291 bp, Homo sapiens
  misc_feature (1800)..(1800): n is a, c, g, or t
acttggcggcgccggacgttgggctgcgcaggatttgagacgctcccctgaccaccacttgctctgcgctgaggtgctgggacagccatggtttcagacgaagatgaattgaatcttctggttattgtagttgatgccaacccaatttggtggggaaagcaagcattaaaggaatctcagttcactttatccaaatgcatagatgccgtgatggtgctgggaaattcgcatttattcatgaatcgttccaacaaacttgctgtgatagcaagtcacattcaagaaagccgattcttatatcctggaaagaatggcagacttggagacttcttcggagaccctggcaaccctcctgaatttaatccctctgggagtaaagatggaaaatacgaacttttaacctcagcaaatgaagttattgttgaagagattaaagatctaatgaccaaaagtgacataaagggtcaacatacagaaactttgctggcaggatccctggccaaagccctttgctacattcatagaatgaacaaggaagttaaagacaatcaggaaatgaaatcaaggatattggcttgtgacatcacgggaggactgtacctgaaggtgcctcagatgccttctcttctgcagtatttgctgtgggtgtttcttcccgatcaagatcagagatctcagttaatcctcccacccccggttcatgttgactacagggctgcttgcttctgtcatcgaaatctcattgaaattggttatgtctgttctgtgtgtttgtcaatattctgcaatttcagccccatttgtactacgtgcgagacagcctttaaaatttctctgcctccagtgctgaaagccaagaaaaagaaactgaaagtgtctgcctgaggataaaatattttccccatcttttagagctgttaatagaaattatatagcagattctttgttgggaagactgaaaaaaataaagataggtataggataatttttaatatggtgaccttacagaaaatatttcccaaacatccttttcatcctgtgcttctggaggactgatttgtttgagggaatcattctatgcattatatcctaaaatattctatgactggtttctgtccatgtttgtggctttcatttttttaatgggatgactattagtcaaagtcagcttgtcatgactcatcataggctttctaacctactccctgaatccgggtcctcattgtgaaatgcatgccatacgaaatttgaacgtagctttggaaaaagggactatttgtggagtaatggcattaatcaacatagaacatcttatttgaatcaacagttaacttcagtagtcatgtgaataaaattcttattgtctaaattgagacagcctcagatatttgcagatatttactttttgtctgatatcagtacatatttggacaaagtcatctaaataatagtttgtcaccaaataactacaaaatctcattttaaatgagtaaggagaacgtgtacagaagcaaattttcttcaaaatagttgtgggaagagcttatatgtgaaagcttatgactggttttgagggagaacttactggagaaaatggactctatgttaagtatggttttcagatagaattctttccttttttaatgaggaaaaaaaatccacattaatattgaaactgcacctgtaatcccagcactttgggaggctgaggacagaggattgcttgagcccaggagttcgagagcagcctgggcagcaaagtgagaccccatctctactaaaaatttaaatgtatttatnaaaactgttctctagaagctttggactgaatcccaaaagtgtttataagttcaaaagcaaaagtatttgtaatttcaacaacaaaaaatgtatttctttatgtaatcttgaaattattaaaagtccttttagcttctagcacatatttgtacaaagagtttaaggaatggtggctggtttggtttgttttttaaaaatgtttactgacgaggccgggcgtggtggctcacccctgcaatcccagcactttgggaggccgaggcaggcagatcacaaggtcaggagttcaagatcagcctggccagtatggtgaaaccctgtctctactaaaaatagaaaaattagccatgcgaagtagcaggtgcctgtagttccagctactcgggaggctgaggcaagagaattgcttgaatccaggaggcagaggttgcagtgagccaagatagcgcctctgtactccagcctgggtgacagagcgagactctgtatca

SEQ ID NO: 451172 - DNA, 840 bp, Homo sapiens
acttggcggcgccggacgttgggctgcgcaggatttgagacgctcccctgaccaccacttgctctgcgctgaggtgctgggacagccatggtttcagacgaagatgaattgaatcttctggttattgtagttgatgccaacccaatttggtggggaaagcaagcattaaaggaatctcagttcactttatccaaatgcatagatgccgtgatggtgctgggaaattcgcatttattcatgaatcgttccaacaaacttgctgtgatagcaagtcacattcaagaaagccgattcttatatcctggaaagaatggcagacttggagacttcttcggagaccctggcaaccctcctgaatttaatccctctgggagtaaagatggaaaatacgaacttttaacctcagcaaatgaagttattgttgaagagattaaagatctaatgaccaaaagtgacataaagggtcaacatacagaaactttgctggcaggatccctggccaaagccctttgctacattcatagaatgaacaaggaagttaaagacaatcaggaaatgaaatcaaggatattggcttgtgacatcacgggaggactgtacctgaaggtgcctcagatgccttctcttctgcagtatttgctgtgggtgtttcttcccgatcaagatcagagatctcagttaatcctcccacccccggttcatgttgactacagggctgcttgcttctgtcatcgaaatctcattgaaattggttatgtctgttctgtgtgtttgtcaatattctgcaatttcagccccatttgtactacgtgagagagggaagggggtaccgagctaaag

SEQ ID NO: 451173 - DNA, 580 bp, Homo sapiens
acttggcggcgccggacgttgggctgcgcaggatttgagacgctcccctgaccaccacttgctctgcgctgaggtgctgggacagccatggtttcagacgaagatgaattgaatcttctggttattgtagttgatgccaacccaatttggtggggaaagcaagcattaaaggaatctcagttcactttatccaaatgcatagatgccgtgatggtgctgggaaattcgcatttattcatgaatcgttccaacaaacttgctgtgatagcaagtcacattcaagaaagccgattcttatatcctggaaagaatggcagacttggagacttcttcggagaccctggcaaccctcctgaatttaatccctctgggagtaaagatggaaaatacgaacttttaacctcagcaaatgaagttattgttgaagagattaaagatctaatgaccaaaagtgacataaagggtcaacatacagaaactttgctggcaggatccctggccaaagccctttgctgtatccttggtgtctgaatcatttagaaggtgtcttctgtaataaacatatcttaacttgtgacat

SEQ ID NO: 451174 - DNA, 1910 bp, Homo sapiens
acttggcggcgccggacgttgggctgcgcaggatttgagacgctcccctgaccaccacttgctctgcgctgaggtgctgggacagccatggtttcagacgaagatgaattgaatcttctggttattgtagttgatgccaacccaatttggtggggaaagcaagcattaaaggaatctcagttcactttatccaaatgcatagatgccgtgatggtgctgggaaattcgcatttattcatgaatcgttccaacaaacttgctgtgatagcaagtcacattcaagaaagccgattcttatatcctggaaagaatggcagacttggagacttcttcggagaccctggcaaccctcctgaatttaatccctctgggagtaaagatggaaaatacgaacttttaacctcagcaaatgaagttattgttgaagagattaaagatctaatgaccaaaagtgacataaagggtcaacatacagaaactttgctggcaggatccctggccaaagccctttgctacattcatagaatgaacaaggaagttaaagacaatcaggaaatgaaatcaaggatattggtgattaaggctgcagaagacagtgcgttgcagtatatgaacttcatgaatgtcatctttgcagcacagaaacagaatattttgattgatgcctgtgttttagactccgactcagggctcctccaacaggcttgtgacatcacgggaggactgtacctgaaggtgcctcagatgccttctcttctgcagtatttgctgtgggtgtttcttcccgatcaagatcagagatctcagttaatcctcccacccccggttcatgttgactacagggctgcttgcttctgtcatcgaaatctcattgaaattggttatgtctgttctgtgtgtttgtcaatattctgcaatttcagccccatttgtactacgtgcgagacagcctttaaaatttctctgcctccagtgctgaaagccaagaaaaagaaactgaaagtgtctgcctgaggataaaatattttccccatcttttagagctgttaatagaaattatatagcagattctttgttgggaagactgaaaaaaataaagataggtataggataatttttaatatggtgaccttacagaaaatatttcccaaacatccttttcatcctgtgcttctggaggactgatttgtttgagggaatcattctatgcattatatcctaaaatattctatgactggtttctgtccatgtttgtggctttcatttttttaatgggatgactattagtcaaagtcagcttgtcatgactcatcataggctttctaacctactccctgaatccgggtcctcattgtgaaatgcatgccatacgaaatttgaacgtagctttggaaaaagggactatttgtggagtaatggcattaatcaacatagaacatcttatttgaatcaacagttaacttcagtagtcatgtgaataaaattcttattgtctaaattgagacagcctcagatatttgcagatatttactttttgtctgatatcagtacatatttggacaaagtcatctaaataatagtttgtcaccaaataactacaaaatctcattttaaatgagtaaggagaacgtgtacagaagcaaattttcttcaaaatagttgtgggaagagcttatatgtgaaagcttatgactggttttgagggagaacttactggagaaaatggactctatgttaagtatggttttcagatagaattctttccttttttaatgaggaaaaaaaatccacattaatattgaaactgcacctgtaatcccagcactttgggaggctgaggcagaggttgcagtgagccaagatagcgcctctgtactccagcctgggtgacagagcgagactctgtatca

SEQ ID NO: 451175 - DNA, 1493 bp, Homo sapiens
acttggcggcgccggacgttgggctgcgcaggatttgagacgctcccctgaccaccacttgctctgcgctgaggtgctgggacagccatggtttcagacgaagatgaattgaatcttctggttattgtagttgatgccaacccaatttggtggggaaagcaagcattaaaggaatctcagttcactttatccaaatgcatagatgccgtgatggtgctgggaaattcgcatttattcatgaatcgttccaacaaacttgctgtgatagcaagtcacattcaagaaagccgattcttatatcctggaaagaatggcagacttggagacttcttcggagaccctggcaaccctcctgaatttaatccctctgggagtaaagatggaaaatacgaacttttaacctcagcaaatgaagttattgttgaagagattaaagatctaatgaccaaaagtgacataaagggtcaacatacagaaactttgctggcaggatccctggccaaagccctttgctacattcatagaatgaacaaggaagttaaagacaatcaggaaatgaaatcaaggatattggtgattaaggctgcagaagacagtgcgttgcagtatatgaacttcatgaatgtcatctttgcagcacagaaacagaatattttgattgatgcctgtgttttagactccgactcagggctcctccaacaggcttgtgacatcacgggaggactgtacctgaaggtgcctcagatgccttctcttctgcagtatttgctgtgggtgtttcttcccgatcaagatcagagatctcagttaatcctcccacccccggttcatgttgactacagggctgcttgcttctgtcatcgaaatctcattgaaattggttatgtctgttctgtgtgtttgtcaatattctgcaatttcagccccatttgtactacgtgcgagacagcctttaaaatttctctgcctccagtgctgaaagccaagaaaaagaaactgaaagtgtctgcctgaggataaaatattttccccatcttttagagctgttaatagaaattatatagcagattctttgttgggaagactgaaaaaaataaagataggtataggataatttttaatatggtgaccttacagaaaatatttcccaaacatccttttcatcctgtgcttctggaggactgatttgtttgagggaatcattctatgcattatatcctaaaatattctatgactggtttctgtccatgtttgtggctttcatttttttaatgggatgactattagtcaaagtcagcttgtcatgactcatcataggctttctaacctactccctgaatccgggtcctcattgtgaaatgcatgccatacgaaatttgaacgtagctttggaaaaagggactatttgtggagtaatggcattaatcaacatagaacatcttatttgaatcaacagttaacttcagtagtcatgtgaataaaattcttattgt

SEQ ID NO: 451176 - DNA, 2397 bp, Homo sapiens
  misc_feature (1906)..(1906): n is a, c, g, or t
acttggcggcgccggacgttgggctgcgcaggatttgagacgctcccctgaccaccacttgctctgcgctgaggtgctgggacagccatggtttcagacgaagatgaattgaatcttctggttattgtagttgatgccaacccaatttggtggggaaagcaagcattaaaggaatctcagttcactttatccaaatgcatagatgccgtgatggtgctgggaaattcgcatttattcatgaatcgttccaacaaacttgctgtgatagcaagtcacattcaagaaagccgattcttatatcctggaaagaatggcagacttggagacttcttcggagaccctggcaaccctcctgaatttaatccctctgggagtaaagatggaaaatacgaacttttaacctcagcaaatgaagttattgttgaagagattaaagatctaatgaccaaaagtgacataaagggtcaacatacagaaactttgctggcaggatccctggccaaagccctttgctacattcatagaatgaacaaggaagttaaagacaatcaggaaatgaaatcaaggatattggtgattaaggctgcagaagacagtgcgttgcagtatatgaacttcatgaatgtcatctttgcagcacagaaacagaatattttgattgatgcctgtgttttagactccgactcagggctcctccaacaggcccaaggcattgctcatgagaacctcattcctctggaaaccctagtgggtgtttcttcccgatcaagatcagagatctcagttaatcctcccacccccggttcatgttgactacagggctgcttgcttctgtcatcgaaatctcattgaaattggttatgtctgttctgtgtgtttgtcaatattctgcaatttcagccccatttgtactacgtgcgagacagcctttaaaatttctctgcctccagtgctgaaagccaagaaaaagaaactgaaagtgtctgcctgaggataaaatattttccccatcttttagagctgttaatagaaattatatagcagattctttgttgggaagactgaaaaaaataaagataggtataggataatttttaatatggtgaccttacagaaaatatttcccaaacatccttttcatcctgtgcttctggaggactgatttgtttgagggaatcattctatgcattatatcctaaaatattctatgactggtttctgtccatgtttgtggctttcatttttttaatgggatgactattagtcaaagtcagcttgtcatgactcatcataggctttctaacctactccctgaatccgggtcctcattgtgaaatgcatgccatacgaaatttgaacgtagctttggaaaaagggactatttgtggagtaatggcattaatcaacatagaacatcttatttgaatcaacagttaacttcagtagtcatgtgaataaaattcttattgtctaaattgagacagcctcagatatttgcagatatttactttttgtctgatatcagtacatatttggacaaagtcatctaaataatagtttgtcaccaaataactacaaaatctcattttaaatgagtaaggagaacgtgtacagaagcaaattttcttcaaaatagttgtgggaagagcttatatgtgaaagcttatgactggttttgagggagaacttactggagaaaatggactctatgttaagtatggttttcagatagaattctttccttttttaatgaggaaaaaaaatccacattaatattgaaactgcacctgtaatcccagcactttgggaggctgaggacagaggattgcttgagcccaggagttcgagagcagcctgggcagcaaagtgagaccccatctctactaaaaatttaaatgtatttatnaaaactgttctctagaagctttggactgaatcccaaaagtgtttataagttcaaaagcaaaagtatttgtaatttcaacaacaaaaaatgtatttctttatgtaatcttgaaattattaaaagtccttttagcttctagcacatatttgtacaaagagtttaaggaatggtggctggtttggtttgttttttaaaaatgtttactgacgaggccgggcgtggtggctcacccctgcaatcccagcactttgggaggccgaggcaggcagatcacaaggtcaggagttcaagatcagcctggccagtatggtgaaaccctgtctctactaaaaatagaaaaattagccatgcgaagtagcaggtgcctgtagttccagctactcgggaggctgaggcaagagaattgcttgaatccaggaggcagaggttgcagtgagccaagatagcgcctctgtactccagcctgggtgacagagcgagactctgtatca

SEQ ID NO: 451177 - DNA, 2232 bp, Homo sapiens
  misc_feature (1741)..(1741): n is a, c, g, or t
ggaatttaggatgctccagctccgccgccagctccagaccttgctccgcctttcctgaggttactcgtaccttgatgccaacccaatttggtggggaaagcaagcattaaaggaatctcagttcactttatccaaatgcatagatgccgtgatggtgctgggaaattcgcatttattcatgaatcgttccaacaaacttgctgtgatagcaagtcacattcaagaaagccgattcttatatcctggaaagaatggcagacttggagacttcttcggagaccctggcaaccctcctgaatttaatccctctgggagtaaagatggaaaatacgaacttttaacctcagcaaatgaagttattgttgaagagattaaagatctaatgaccaaaagtgacataaagggtcaacatacagaaactttgctggcaggatccctggccaaagccctttgctacattcatagaatgaacaaggaagttaaagacaatcaggaaatgaaatcaaggatattggcttgtgacatcacgggaggactgtacctgaaggtgcctcagatgccttctcttctgcagtatttgctgtgggtgtttcttcccgatcaagatcagagatctcagttaatcctcccacccccggttcatgttgactacagggctgcttgcttctgtcatcgaaatctcattgaaattggttatgtctgttctgtgtgtttgtcaatattctgcaatttcagccccatttgtactacgtgcgagacagcctttaaaatttctctgcctccagtgctgaaagccaagaaaaagaaactgaaagtgtctgcctgaggataaaatattttccccatcttttagagctgttaatagaaattatatagcagattctttgttgggaagactgaaaaaaataaagataggtataggataatttttaatatggtgaccttacagaaaatatttcccaaacatccttttcatcctgtgcttctggaggactgatttgtttgagggaatcattctatgcattatatcctaaaatattctatgactggtttctgtccatgtttgtggctttcatttttttaatgggatgactattagtcaaagtcagcttgtcatgactcatcataggctttctaacctactccctgaatccgggtcctcattgtgaaatgcatgccatacgaaatttgaacgtagctttggaaaaagggactatttgtggagtaatggcattaatcaacatagaacatcttatttgaatcaacagttaacttcagtagtcatgtgaataaaattcttattgtctaaattgagacagcctcagatatttgcagatatttactttttgtctgatatcagtacatatttggacaaagtcatctaaataatagtttgtcaccaaataactacaaaatctcattttaaatgagtaaggagaacgtgtacagaagcaaattttcttcaaaatagttgtgggaagagcttatatgtgaaagcttatgactggttttgagggagaacttactggagaaaatggactctatgttaagtatggttttcagatagaattctttccttttttaatgaggaaaaaaaatccacattaatattgaaactgcacctgtaatcccagcactttgggaggctgaggacagaggattgcttgagcccaggagttcgagagcagcctgggcagcaaagtgagaccccatctctactaaaaatttaaatgtatttatnaaaactgttctctagaagctttggactgaatcccaaaagtgtttataagttcaaaagcaaaagtatttgtaatttcaacaacaaaaaatgtatttctttatgtaatcttgaaattattaaaagtccttttagcttctagcacatatttgtacaaagagtttaaggaatggtggctggtttggtttgttttttaaaaatgtttactgacgaggccgggcgtggtggctcacccctgcaatcccagcactttgggaggccgaggcaggcagatcacaaggtcaggagttcaagatcagcctggccagtatggtgaaaccctgtctctactaaaaatagaaaaattagccatgcgaagtagcaggtgcctgtagttccagctactcgggaggctgaggcaagagaattgcttgaatccaggaggcagaggttgcagtgagccaagatagcgcctctgtactccagcctgggtgacagagcgagactctgtatca

SEQ ID NO: 451178 - DNA, 746 bp, Homo sapiens
  misc_feature (716)..(716): n is a, c, g, or t
  misc_feature (721)..(721): n is a, c, g, or t
  misc_feature (726)..(726): n is a, c, g, or t
acttggcggcgccggacgttgggctgcgcaggatttgagacgctcccctgaccaccacttgctctgcgctgaggtgctgggacagccatggtttcagacgaagatgaattgaatcttctggttattgtagttgatgccaacccaatttggtggggaaagcaagcattaaaggaatctcagttcactttatccaaatgcatagatgccgtgatggtgctgggaaattcgcatttattcatgaatcgttccaacaaacttgctgtgatagcaagtcacattcaagaaagccgattcttatatcctggaaagaatggcagacttggagacttcttcggagaccctggcaaccctcctgaatttaatccctctgggagtaaagatggaaaatacgaacttttaacctcagcaaatgaagttattgttgaagagattaaagatctaatgaccaaaagtgacataaagggtcaacatacagaaactttgctggcaggatccctggccaaagccctttgctacattcatagaatgaacaaggaagttaaagacaatcaggaaatgaaatcaaggatattggcttgtgacatcacgggaggactgtacctgaaggtgcctcagatgccttctcttctgcagtatttgctgtgggtgtttcttcccgaccaagatcagagatctcgatgacagaagcaagcagccctgtagtcaacatgaaccgngggtnggagnattaacgggtacgagctagg

SEQ ID NO: 451179 - DNA, 386 bp, Homo sapiens
aagattgtgccactgcactctagcctgggtgacagaactagactcggtctcaaaaaaaataaaataagggaataaatgcagaacgaattttaatacaaaaggccttatctccaattgatggctctttttgccctgttaatgattgaatataattaaggatccatgttaacttcgacttttttataatcccatgtatccatcatttttctaatcccataattgattttagaatactgtcttctatggacctaaaatctttttctgtcagaaatttcagtgagaaggtatgtacattctctcataggacatgtgctaaaattttgatgatgaagattaatatggcctttttacaagattgcgtgttggggatcctgctagagtcagct

SEQ ID NO: 451180 - DNA, 2153 bp, Homo sapiens
aagcagtggtatcaacgcagagtgcccattacggcgggctgctgggactcgcgtcggttggcgactcccggacgtaggtagtttgttgggccgggttctgaggccttgcttctctttacttttccactctaggccacgatgccgcagtaccagacctgggaggagttcagccgcgctgccgagaagctttacctcgctgaccctatgaaggcacgtgtggttctcaaatataggcattctgatgggaacttgtgtgttaaagtaacagatgatttagtttgtttggtgtataaaacagaccaagctcaagatgtaaagaagattgagaaattccacagtcaactaatgcgacttatggtagccaaggaagcccgcaatgttaccatggaaactgagtgaatggtttgaaatgaagactttgtcgtgtacttaggaagtaaatatcttttgaattagagaaagtgttgggacagaaagtactttatgtaactaagtgggctgttcagaagcttagaggtcattttttgtaattttctttttaattactttagagagctagggatgcaaatgttttcagttagaaagcctttatttacttttggaaattgaacaagaaatgcatctgtcttagaaactggagattatttgatgttaggtaaaacatgtaattgtttctctggcaaatttgtatcagtaatttgaaaatgagatattaggaaaaaccaattcttcttaaatttagttcatctttctttaaaagaacattaaatgtaaccattttgtcagatccatgtattttggagcataaaatgtatgctgttgtgaccaataaatataaaatatggtaattggaattaactccacaccatagtatgcattgttatacatactgtgtacctaattatgtatagcagtgtagtctcaattatatctgaaagtaattgtgactaacaagtatgctttgccttatttccacatttaaactacctgttaatataagggatttgtagtatcagcttgttgagcaatgactttgaatctagttttcagtgatcagaagcagcagttatttgagtgtatgaatggaatgatgatcactgtgctataatgtactgaaaccaccatattacagaaatatttactacatattttccatctgtagtttctcagaagggctatggattagtttgaactgtcaaatccttgcatacttctgtgacacccctgcccattttctgtctttaattaaccaaggtgttaggtgtgactgtcacaactgttatgttttccagtaaactagaagtacgatatttgataattatatttgtatttcaccacctaaatgtaatgttgattcctcaagaatgaaatgaaggcactacattgaaatatgttttgtataaatttgtcatgttgaacagcattttagcatggtaagttcccttagctatatgaattttggcatgtttcagagagatcagtaaataaaatattagataaaataaaaaaaaaaaaaaaagggcggccgcccttttctagtgttcgttaacttcattaaaatactgagttttatttcacatgtatatagtgggtctccccaccaggtatccatgtctgaccaccgctactactatgtcctatcataacattccatacatacttaaaacgcaagcaaaggggggcgtcccatctttaaaaactaagacgaggcattgtgggaccaacacatatctgggcaactagacaccgtgggaccaaacatttatcaaacacggtagggaaagttctcactctggcattatacaaaggacagccagatatcaacgggttacagacaactgaactaagacggaaaaattttacaccaaattgtttacactattctcttacagagacttcctccatgtgccagagatctggaatagcctctggacagtcatccggaagcaattcttccacattaatgcggacattgggcttccacattgggaagagaaccacgcttatttctatactctgcaagcatttcggctaaaggtattctacagaacaggtcctttggagtctaggaactgattccgggttttcgaagaatctggcctttgacctgatgtgcatacagaccagagatctccacggactgcacatgggac

SEQ ID NO: 451181 - DNA, 1543 bp, Homo sapiens
aagcagtggtatcaacgcagagtgcccattacggcgggctgctgggactcgcgtcggttggcgactcccggacgtaggtagtttgttgggccgggttctgaggccttgcttctctttacttttccactctaggccacgatgccgcagtaccagacctgggaggagttcagccgcgctgccgagaagctttacctcgctgaccctatgaaggcacgtgtggttctcaaatataggcattctgatgggaacttgtgtgttaaagtaacagatgatttagtttgtttggtgtataaaacagaccaagctcaagatgtaaagaagattgagaaattccacagtcaactaatgcgacttatggtagccaaggaagcccgcaatgttaccatggaaactgagtgaatggtttgaaatgaagactttgtcgtgtacttaggaagtaaatatcttttgaattagagaaagtgttgggacagaaagtactttatgtaactaagtgggctgttcagaagcttagaggtcattttttgtaattttctttttaattactttagagagctagggatgcaaatgttttcagttagaaagcctttatttacttttggaaattgaacaagaaatgcatctgtcttagaaactggagattatttgatgttaggtaaaacatgtaattgtttctctggcaaatttgtatcagtaatttgaaaatgagatattaggaaaaaccaattcttcttaaatttagttcatctttctttaaaagaacattaaatgtaaccattttgtcagatccatgtattttggagcataaaatgtatgctgttgtgaccaataaatataaaatatggtaattggaattaactccacaccatagtatgcattgttatacatactgtgtacctaattatgtatagcagtgtagtctcaattatatctgaaagtaattgtgactaacaagtatgctttgccttatttccacatttaaactacctgttaatataagggatttgtagtatcagcttgttgagcaatgactttgaatctagttttcagtgatcagaagcagcagttatttgagtgtatgaatggaatgatgatcactgtgctataatgtactgaaaccaccatattacagaaatatttactacatattttccatctgtagtttctcagaagggctatggattagtttgaactgtcaaatccttgcatacttctgtgacacccctgcccattttctgtctttaattaaccaaggtgttaggtgtgactgtcacaactgttatgttttccagtaaactagaagtacgatatttgataattatatttgtatttcaccacctaaatgtaatgttgattcctcaagaatgaaatgaaggcactacattgaaatatgttttgtataaatttgtcatgttgaacagcattttagcatggtaagttcccttagctatatgaattttggcatgtttcagagagatcagtatcaattggcgttgtgtggtttttctggttgtcggtgtggttctggcgggccggtgggggt

SEQ ID NO: 451182 - DNA, 1377 bp, Homo sapiens
aagcagtggtatcaacgcagagtgcccattacggcgggctgctgggactcgcgtcggttggcgactcccggacgtaggtagtttgttgggccgggttctgaggccttgcttctctttacttttccactctaggccacgatgccgcagtaccagacctgggaggagttcagccgcgctgccgagaagctttacctcgctgaccctatgaaggcacgtgtggttctcaaatataggcattctgatgggaacttgtgtgttaaagtaacagatgatttagtttgtttggtgtataaaacagaccaagctcaagatgtaaagaagattgagaaattccacagtcaactaatgcgacttatggtagccaaggaagcccgcaatgttaccatggaaactgagtgaatggtttgaaatgaagactttgtcgtgtacttaggaagtaaatatcttttgaattagagaaagtgttgggacagaaagtactttatgtaactaagtgggctgttcagaagcttagaggtcattttttgtaattttctttttaattactttagagagctagggatgcaaatgttttcagttagaaagcctttatttacttttggaaattgaacaagaaatgcatctgtcttagaaactggagattatttgatgttaggtaaaacatgtaattgtttctctggcaaatttgtatcagtaatttgaaaatgagatattaggaaaaaccaattcttcttaaatttagttcatctttctttaaaagaacattaaatgtaaccattttgtcagatccatgtattttggagcataaaatgtatgctgttgtgaccaataaatataaaatatggtaattggaattaactccacaccatagtatgcattgttatacatactgtgtacctaattatgtatagcagtgtagtctcaattatatctgaaagtaattgtgactaacaagtatgctttgccttatttccacatttaaactacctgttaatataagggatttgtagtatcagcttgttgagcaatgactttgaatctagttttcagtgatcagaagcagcagttatttgagtgtatgaatggaatgatgatcactgtgctataatgtactgaaaccaccatattacagaaatatttactacatattttccatctgtagtttctcagaagggctatggattagtttgaactgtcaaatccttgcatacttctgtgacacccctgcccattttctgtctttaattaaccaaggtgttaggtgtgactgtcacaactgttatgttttccagtaaactagaagtacgatatttgataattatatttgtatttcaccacctaaatgtaatgttagagatacgggatcctctgacagcc

SEQ ID NO: 451183 - DNA, 1170 bp, Homo sapiens
aagcagtggtatcaacgcagagtgcccattacggcgggctgctgggactcgcgtcggttggcgactcccggacgtaggtagtttgttgggccgggttctgaggccttgcttctctttacttttccactctaggccacgatgccgcagtaccagacctgggaggagttcagccgcgctgccgagaagctttacctcgctgaccctatgaaggcacgtgtggttctcaaatataggcattctgatgggaacttgtgtgttaaagtaacagatgatttagtttgtttggtgtataaaacagaccaagctcaagatgtaaagaagattgagaaattccacagtcaactaatgcgacttatggtagccaaggaagcccgcaatgttaccatggaaactgagtgaatggtttgaaatgaagactttgtcgtgtacttaggaagtaaatatcttttgaattagagaaagtgttgggacagaaagtactttatgtaactaagtgggctgttcagaagcttagaggtcattttttgtaattttctttttaattactttagagagctagggatgcaaatgttttcagttagaaagcctttatttacttttggaaattgaacaagaaatgcatctgtcttagaaactggagattatttgatgttaggtaaaacatgtaattgtttctctggcaaatttgtatcagtaatttgaaaatgagatattaggaaaaaccaattcttcttaaatttagttcatctttctttaaaagaacattaaatgtaaccattttgtcagatccatgtattttggagcataaaatgtatgctgttgtgaccaataaatataaaatatggttttacttgtggggaattaactccacacccataagggttcatttttgggcccaaatttttttccggggggggctttccccacacatttttttttaaaaccccccaaaaaaacttttttttttttttcacaacacaacccccccccgccatgcccctgtcctgcgcggcgcggcgggccactcctcacgcagccggccgagcgcctactcttctctcctccacacaaacgccccccacccccaccaccccccatcattagtccttcttcttcccaacaccacacacccacaccacaccatccaccaccccaccctccttctaacag

SEQ ID NO: 451184 - DNA, 1915 bp, Homo sapiens
aagcagtggtatcaacgcagagtgcccattacggcgggctgctgggactcgcgtcggttggcgactcccggacgtaggtagtttgttgggccgggttctgaggccttgcttctctttacttttccactctaggccacgatgccgcagtaccagacctgggaggagttcagccgcgctgccgagaagctttacctcgctgaccctatgaaggcacgtgtggttctcaaatataggcattctgatgggaacttgtgtgttaaagtaacagatgatttagtttgtttggtgtataaaacagaccaagctcaagatgtaaagaagattgagaaattccacagtcaactaatgcgacttatggtagccaaggaagcccgcaatgttaccatggaaactgagtgaatggtttgaaatgaagactttgtcgtgtacttaggaagtaaatatcttttgaattagagaaagtgttgggacagaaagtactttatgtaactaagtgggctgttcagaagcttagaggtcattttttgtaattttctttttaattactttagagagctagggatgcaaatgttttcagttagaaagcctttatttacttttggaaattgaacaagaaatgcatctgtcttagaaactggagattatttgatgttaggtaaaacatgtaattgtttctctggcaaatttgtatcagtaatttgaaaatttgcacactgagatattaggaagaattggtttttcctaatatctcatttcaaattactgatacaaatgagatattaggaaaaaccaattcttcttaaatttagttcatctttctttaaaagaacattaaatgtaaccattttgtcagatccatgtattttggagcataaaatgtatgctgttgtgaccaataaatataaaatatggtaattggaattaactccacaccatagtatgcattgttatacatactgtgtacctaattatgtatagcagtgtagtctcaattatatctgaaagtaattgtgactaacaagtatgctttgccttatttccacatttaaactacctgttaatataagggatttgtagtatcagcttgttgagcaatgactttgaatctagttttcagtgatcagaagcagcagttatttgagtgtatgaatggaatgatgatcactgtgctataatgtactgaaaccaccatattacagaaatatttactacatattttccatctgtagtttctcagaagggctatggattagtttgaactgtcaaatccttgcatacttctgtgacacccctgcccattttctgtctttaattaaccaaggtgttaggtgtgactgtcacaactgttatgttttccagtaaactagaagtacgatatttgataattatatttgtatttcaccacctaaatgtaatgttgattcctcaagaatgaaatgaaggcactacattgaaatatgttttgtataaatttgtcatgttgaacagcattttagcatggtaagttcccttagctatatgaattttggcatgtttcagagagatcagtaaataaaatattagataaaataaaaaaaaaaaaaaaaaaaaaaaaaaaaaaaaaaaaaaaaaaaaaaaaaaaaaaaaaaaaaaaaaaaaaaaaaaaaaaaaaaaaaaaaaaaaaaaaaggggggggcgcccgcaaattaaaacaacgagggaggagcaaatagccaaccaccatcggtagtaaaacggggcacaacgagagacgaaacaaaaaaaagagagccgcaagtaaaaaaagcgaaaggaaacaacacacgcgagtgtagacggagacccaccacgggagagaaagggaacactaaacgaaagccgcaggacaaaaaacatgagcgtggaacacgtcaccgcgaagacgccgaataaatca

SEQ ID NO: 451185 - DNA, 920 bp, Homo sapiens
  misc_feature (743)..(743): n is a, c, g, or t
  misc_feature (797)..(797): n is a, c, g, or t
  misc_feature (805)..(805): n is a, c, g, or t
  misc_feature (810)..(810): n is a, c, g, or t
  misc_feature (814)..(814): n is a, c, g, or t
  misc_feature (820)..(820): n is a, c, g, or t
  misc_feature (824)..(824): n is a, c, g, or t
  misc_feature (833)..(833): n is a, c, g, or t
  misc_feature (920)..(920): n is a, c, g, or t
aagcagtggtatcaacgcagagtgcccattacggcgggctgctgggactcgcgtcggttggcgactcccggacgtaggtagtttgttgggccgggttctgaggccttgcttctctttacttttccactctaggccacgatgccgcagtaccagacctgggaggagttcagccgcgctgccgagaagctttacctcgctgaccctatgaaggcacgtgtggttctcaaatataggcattctgatgggaacttgtgtgttaaagtaacagatgatttagtttgtttggtgtataaaacagaccaagctcaagatgtaaagaagattgagaaattccacagtcaactaatgcgacttatggtagccaaggaagcccgcaatgttaccatggaaactgagtgaatggtttgaaatgaagactttgtcgtgtacttaggaagtaaatatcttttgaattagagaaagtgttgggacagaaagtactttatgtaactaagtgggctgttcagaagcttagaggtcattttttgtaattttctttttaattactttagagagctagggatgcaaatgttttcagttagaaagcctttatttacttttggaaattgaacaagaaatgcatctgtcttagaaactggagattatttgatgttaggtaaaacatgtaattgtttctctggcaaatttgtatcagtaatttgaaccatttttttaattagtcacttttttaagaacttaatgtnccttgggaccggtttggggcaaagtggggggggcacacataaatggtgtggggngtccccantgggntgtntgggcnattnagggggcantagaggagaaggggttccaaaagcgtagaggaggggggggatctgagtggtgagtgtcaaaacatgagcgtgatatggagaagtttn

SEQ ID NO: 451186 - DNA, 1829 bp, Homo sapiens
aagcagtggtatcaacgcagagtgcccattacggcgggctgctgggactcgcgtcggttggcgactcccggacgtaggtagtttgttgggccgggttctgaggccttgcttctctttacttttccactctaggccacgatgccgcagtaccagacctgggaggagttcagccgcgctgccgagaagctttacctcgctgaccctatgaaggcacgtgtggttctcaaatataggcattctgatgggaacttgtgtgttaaagtaacagatgatttagttaccaagctcaagatgtaaagaagattgagaaattccacagtcaactaatgcgacttatggtagccaaggaagcccgcaatgttaccatggaaactgagtgaatggtttgaaatgaagactttgtcgtgtacttaggaagtaaatatcttttgaattagagaaagtgttgggacagaaagtactttatgtaactaagtgggctgttcagaagcttagaggtcattttttgtaattttctttttaattactttagagagctagggatgcaaatgttttcagttagaaagcctttatttacttttggaaattgaacaagaaatgcatctgtcttagaaactggagattatttgatgttaggtaaaacatgtaattgtttctctggcaaatttgtatcagtaatttgaaaatgagatattaggaaaaaccaattcttcttaaatttagttcatctttctttaaaagaacattaaatgtaaccattttgtcagatccatgtattttggagcataaaatgtatgctgttgtgaccaataaatataaaatatggtaattggaattaactccacaccatagtatgcattgttatacatactgtgtacctaattatgtatagcagtgtagtctcaattatatctgaaagtaattgtgactaacaagtatgctttgccttatttccacatttaaactacctgttaatataagggatttgtagtatcagcttgttgagcaatgactttgaatctagttttcagtgatcagaagcagcagttatttgagtgtatgaatggaatgatgatcactgtgctataatgtactgaaaccaccatattacagaaatatttactacatattttccatctgtagtttctcagaagggctatggattagtttgaactgtcaaatccttgcatacttctgtgacacccctgcccattttctgtctttaattaaccaaggtgttaggtgtgactgtcacaactgttatgttttccagtaaactagaagtacgatatttgataattatatttgtatttcaccacctaaatgtaatgttgattcctcaagaatgaaatgaaggcactacattgaaatatgttttgtataaatttgtcatgttgaacagcattttagcatggtaagttcccttagctatatgaattttggcatgtttcagagagatcagtaaataaaatattagataaaataaaaaaaaaaaaaaaaaaaaaaaaaaaaaaaaaaaaaaaaaaaaaaaaaaaaaaaaaaaaaaaaaaaaaaaaaaaaaaaaaaaaaaaaaaaaaaaaaggggggggcgcccgcaaattaaaacaacgagggaggagcaaatagccaaccaccatcggtagtaaaacggggcacaacgagagacgaaacaaaaaaaagagagccgcaagtaaaaaaagcgaaaggaaacaacacacgcgagtgtagacggagacccaccacgggagagaaagggaacactaaacgaaagccgcaggacaaaaaacatgagcgtggaacacgtcaccgcgaagacgccgaataaatca

SEQ ID NO: 451187 - DNA, 2018 bp, Homo sapiens
gcttttttggcctgctgccattccagtaggatgtgacttgcttctcctggccatggttgtgaggcctccccagctatgtggaactgtaagtccggtaaacctctttcttttataaattgcccagtctcgggtatatcttcattagcagcgtgaaaacggacaaatacagcttcagtttcccctcactccactccccattaggggatagttttgtccagattaaagaaaaacctatggtttatggtggtgctaggggaaatgaagaggaaagtcttgcctctccattttcttccgttcatgaggccacgatgccgcagtaccagacctgggaggagttcagccgcgctgccgagaagctttacctcgctgaccctatgaaggcacgtgtggttctcaaatataggcattctgatgggaacttgtgtgttaaagtaacagatgatttagtttgtttggtgtataaaacagaccaagctcaagatgtaaagaagattgagaaattccacagtcaactaatgcgacttatggtagccaaggaagcccgcaatgttaccatggaaactgagtgaatggtttgaaatgaagactttgtcgtgtacttaggaagtaaatatcttttgaattagagaaagtgttgggacagaaagtactttatgtaactaagtgggctgttcagaagcttagaggtcattttttgtaattttctttttaattactttagagagctagggatgcaaatgttttcagttagaaagcctttatttacttttggaaattgaacaagaaatgcatctgtcttagaaactggagattatttgatgttaggtaaaacatgtaattgtttctctggcaaatttgtatcagtaatttgaaaatgagatattaggaaaaaccaattcttcttaaatttagttcatctttctttaaaagaacattaaatgtaaccattttgtcagatccatgtattttggagcataaaatgtatgctgttgtgaccaataaatataaaatatggtaattggaattaactccacaccatagtatgcattgttatacatactgtgtacctaattatgtatagcagtgtagtctcaattatatctgaaagtaattgtgactaacaagtatgctttgccttatttccacatttaaactacctgttaatataagggatttgtagtatcagcttgttgagcaatgactttgaatctagttttcagtgatcagaagcagcagttatttgagtgtatgaatggaatgatgatcactgtgctataatgtactgaaaccaccatattacagaaatatttactacatattttccatctgtagtttctcagaagggctatggattagtttgaactgtcaaatccttgcatacttctgtgacacccctgcccattttctgtctttaattaaccaaggtgttaggtgtgactgtcacaactgttatgttttccagtaaactagaagtacgatatttgataattatatttgtatttcaccacctaaatgtaatgttgattcctcaagaatgaaatgaaggcactacattgaaatatgttttgtataaatttgtcatgttgaacagcattttagcatggtaagttcccttagctatatgaattttggcatgtttcagagagatcagtaaataaaatattagataaaataaaaaaaaaaaaaaaaaaaaaaaaaaaaaaaaaaaaaaaaaaaaaaaaaaaaaaaaaaaaaaaaaaaaaaaaaaaaaaaaaaaaaaaaaaaaaaaaaggggggggcgcccgcaaattaaaacaacgagggaggagcaaatagccaaccaccatcggtagtaaaacggggcacaacgagagacgaaacaaaaaaaagagagccgcaagtaaaaaaagcgaaaggaaacaacacacgcgagtgtagacggagacccaccacgggagagaaagggaacactaaacgaaagccgcaggacaaaaaacatgagcgtggaacacgtcaccgcgaagacgccgaataaatca

SEQ ID NO: 451188 - DNA, 2715 bp, Homo sapiens
aagcagtggtatcaacgcagagtgcccattacggcgggctgctgggactcgcgtcggttggcgactcccggacgtaggtagtttgttgggccgggttctgaggccttgcttctctttacttttccactctaggccacgatgccgcagtaccagacctgggaggagttcagccgcgctgccgagaagctttacctcgctgaccctatgaaggcacgtgtggttctcaaatataggcattctgatgggaacttgtgtgttaaagtaacagatgatttagttgatcattagttcctgttgtttaaaactcatgtgaacctttaagatgggctgaagaaaagtggatctgtactacaaaatgaggaaagggctgccagcttaaagttgctgtttttgaagattctacaacagatggctttatgaccaaccataagcagatcttaagtatctagtgaagaatttaactgctaacaaggaagaatttggtttgatttaaaagtaatatcttcaagcacggggtttcaccatattggccaggctggtttcgaactgctgacctggtggtccgcctgcctcggcctcccagagtgctgggattacaggcgtaagccaccacgcctggccaagaaaatcaagatttacctggtttatgtgttgaccagctatacacagagaattctagatttttttctaaaaattattatcaaacccccaatttcaccagtagaaaaagagatcttaagatttctgtgtttttttttccagcataactcagttacttatggctgggagaaaatatgtagggagataatctaatacctaattcgaaggaagaaaatatctaattctaagtcttgagttcttctcatcagaccatagcaggatttaacatttaacatttttcagaagcttctaatagacttcattcagttttttgtccacagcagtggcatttaaattactgtactttaagacatggaattgctggaggcttggaaacttgagtgcaatttccctagtacgacctccaaggagaatagagcaaaacagtggtaggaaaaactctcaaaattttacccaattgtatgttttctacattgtcagtatctagttttatatagttaatatgtacttctaaaatttctgacatgtttggtgtataaaacagaccaagctcaagatgtaaagaagattgagaaattccacagtcaactaatgcgacttatggtagccaaggaagcccgcaatgttaccatggaaactgagtgaatggtttgaaatgaagactttgtcgtgtacttaggaagtaaatatcttttgaattagagaaagtgttgggacagaaagtactttatgtaactaagtgggctgttcagaagcttagaggtcattttttgtaattttctttttaattactttagagagctagggatgcaaatgttttcagttagaaagcctttatttacttttggaaattgaacaagaaatgcatctgtcttagaaactggagattatttgatgttaggtaaaacatgtaattgtttctctggcaaatttgtatcagtaatttgaaaatgagatattaggaaaaaccaattcttcttaaatttagttcatctttctttaaaagaacattaaatgtaaccattttgtcagatccatgtattttggagcataaaatgtatgctgttgtgaccaataaatataaaatatggtaattggaattaactccacaccatagtatgcattgttatacatactgtgtacctaattatgtatagcagtgtagtctcaattatatctgaaagtaattgtgactaacaagtatgctttgccttatttccacatttaaactacctgttaatataagggatttgtagtatcagcttgttgagcaatgactttgaatctagttttcagtgatcagaagcagcagttatttgagtgtatgaatggaatgatgatcactgtgctataatgtactgaaaccaccatattacagaaatatttactacatattttccatctgtagtttctcagaagggctatggattagtttgaactgtcaaatccttgcatacttctgtgacacccctgcccattttctgtctttaattaaccaaggtgttaggtgtgactgtcacaactgttatgttttccagtaaactagaagtacgatatttgataattatatttgtatttcaccacctaaatgtaatgttgattcctcaagaatgaaatgaaggcactacattgaaatatgttttgtataaatttgtcatgttgaacagcattttagcatggtaagttcccttagctatatgaattttggcatgtttcagagagatcagtaaataaaatattagataaaataaaaaaaaaaaaaaaaaaaaaaaaaaaaaaaaaaaaaaaaaaaaaaaaaaaaaaaaaaaaaaaaaaaaaaaaaaaaaaaaaaaaaaaaaaaaaaaaaggggggggcgcccgcaaattaaaacaacgagggaggagcaaatagccaaccaccatcggtagtaaaacggggcacaacgagagacgaaacaaaaaaaagagagccgcaagtaaaaaaagcgaaaggaaacaacacacgcgagtgtagacggagacccaccacgggagagaaagggaacactaaacgaaagccgcaggacaaaaaacatgagcgtggaacacgtcaccgcgaagacgccgaataaatca

SEQ ID NO: 451189 - DNA, 1802 bp, Homo sapiens
aagcagtggtatcaacgcagagtgcccattacggcgggctgctgggactcgcgtcggttggcgactcccggacgtaggtagtttgttgggccgggttctgaggccttgcttctctttacttttccactctaggccacgatgccgcagtaccagacctgggaggagcacgtgtggttctcaaatataggcattctgatgggaacttgtgtgttaaagtaacagatgatttagtttgtttggtgtataaaacagaccaagctcaagatgtaaagaagattgagaaattccacagtcaactaatgcgacttatggtagccaaggaagcccgcaatgttaccatggaaactgagtgaatggtttgaaatgaagactttgtcgtgtacttaggaagtaaatatcttttgaattagagaaagtgttgggacagaaagtactttatgtaactaagtgggctgttcagaagcttagaggtcattttttgtaattttctttttaattactttagagagctagggatgcaaatgttttcagttagaaagcctttatttacttttggaaattgaacaagaaatgcatctgtcttagaaactggagattatttgatgttaggtaaaacatgtaattgtttctctggcaaatttgtatcagtaatttgaaaatgagatattaggaaaaaccaattcttcttaaatttagttcatctttctttaaaagaacattaaatgtaaccattttgtcagatccatgtattttggagcataaaatgtatgctgttgtgaccaataaatataaaatatggtaattggaattaactccacaccatagtatgcattgttatacatactgtgtacctaattatgtatagcagtgtagtctcaattatatctgaaagtaattgtgactaacaagtatgctttgccttatttccacatttaaactacctgttaatataagggatttgtagtatcagcttgttgagcaatgactttgaatctagttttcagtgatcagaagcagcagttatttgagtgtatgaatggaatgatgatcactgtgctataatgtactgaaaccaccatattacagaaatatttactacatattttccatctgtagtttctcagaagggctatggattagtttgaactgtcaaatccttgcatacttctgtgacacccctgcccattttctgtctttaattaaccaaggtgttaggtgtgactgtcacaactgttatgttttccagtaaactagaagtacgatatttgataattatatttgtatttcaccacctaaatgtaatgttgattcctcaagaatgaaatgaaggcactacattgaaatatgttttgtataaatttgtcatgttgaacagcattttagcatggtaagttcccttagctatatgaattttggcatgtttcagagagatcagtaaataaaatattagataaaataaaaaaaaaaaaaaaaaaaaaaaaaaaaaaaaaaaaaaaaaaaaaaaaaaaaaaaaaaaaaaaaaaaaaaaaaaaaaaaaaaaaaaaaaaaaaaaaaggggggggcgcccgcaaattaaaacaacgagggaggagcaaatagccaaccaccatcggtagtaaaacggggcacaacgagagacgaaacaaaaaaaagagagccgcaagtaaaaaaagcgaaaggaaacaacacacgcgagtgtagacggagacccaccacgggagagaaagggaacactaaacgaaagccgcaggacaaaaaacatgagcgtggaacacgtcaccgcgaagacgccgaataaatca

SEQ ID NO: 451190 - DNA, 2080 bp, Homo sapiens
aagcagtggtatcaacgcagagtgcccattacggcgggctgctgggactcgcgtcggttggcgactcccggacgtaggtagtttgttgggccgggttctgaggccttgcttctctttacttttccactctaggccacgatgccgcagtaccagacctgggaggagttcagccgcgctgccgagaagctttacctcgctgaccctatgaaggcacgtgtggttctcaaatataggcattctgatgggaacttgtgtgttaaagtaacagatgatttagttagacagtgtcttgctctattgctcaggctgcagtgcagtggcatgatcatagctcactgcatcctcgacctcctgggctcaagcggtcctcttgcttcagcctcctgaatagcagagactacagcagtggcatttaaattactgtactttaagacatggaattgctggaggcttggaaacttgagtgcaatttccctagtacgacctccaaggagaatagagcaaaacagtgtgtttggtgtataaaacagaccaagctcaagatgtaaagaagattgagaaattccacagtcaactaatgcgacttatggtagccaaggaagcccgcaatgttaccatggaaactgagtgaatggtttgaaatgaagactttgtcgtgtacttaggaagtaaatatcttttgaattagagaaagtgttgggacagaaagtactttatgtaactaagtgggctgttcagaagcttagaggtcattttttgtaattttctttttaattactttagagagctagggatgcaaatgttttcagttagaaagcctttatttacttttggaaattgaacaagaaatgcatctgtcttagaaactggagattatttgatgttaggtaaaacatgtaattgtttctctggcaaatttgtatcagtaatttgaaaatgagatattaggaaaaaccaattcttcttaaatttagttcatctttctttaaaagaacattaaatgtaaccattttgtcagatccatgtattttggagcataaaatgtatgctgttgtgaccaataaatataaaatatggtaattggaattaactccacaccatagtatgcattgttatacatactgtgtacctaattatgtatagcagtgtagtctcaattatatctgaaagtaattgtgactaacaagtatgctttgccttatttccacatttaaactacctgttaatataagggatttgtagtatcagcttgttgagcaatgactttgaatctagttttcagtgatcagaagcagcagttatttgagtgtatgaatggaatgatgatcactgtgctataatgtactgaaaccaccatattacagaaatatttactacatattttccatctgtagtttctcagaagggctatggattagtttgaactgtcaaatccttgcatacttctgtgacacccctgcccattttctgtctttaattaaccaaggtgttaggtgtgactgtcacaactgttatgttttccagtaaactagaagtacgatatttgataattatatttgtatttcaccacctaaatgtaatgttgattcctcaagaatgaaatgaaggcactacattgaaatatgttttgtataaatttgtcatgttgaacagcattttagcatggtaagttcccttagctatatgaattttggcatgtttcagagagatcagtaaataaaatattagataaaataaaaaaaaaaaaaaaaaaaaaaaaaaaaaaaaaaaaaaaaaaaaaaaaaaaaaaaaaaaaaaaaaaaaaaaaaaaaaaaaaaaaaaaaaaaaaaaaaggggggggcgcccgcaaattaaaacaacgagggaggagcaaatagccaaccaccatcggtagtaaaacggggcacaacgagagacgaaacaaaaaaaagagagccgcaagtaaaaaaagcgaaaggaaacaacacacgcgagtgtagacggagacccaccacgggagagaaagggaacactaaacgaaagccgcaggacaaaaaacatgagcgtggaacacgtcaccgcgaagacgccgaataaatca

SEQ ID NO: 451191 - DNA, 1956 bp, Homo sapiens
aagcagtggtatcaacgcagagtgcccattacggcgggctgctgggactcgcgtcggttggcgactcccggacgtaggtagtttgttgggccgggttctgaggccttgcttctctttacttttccactctaggccacgatgccgcagtaccagacctgggaggagttcagccgcgctgccgagaagctttacctcgctgaccctatgaaggcacgtgtggttctcaaatataggcattctgatgggaacttgtgtgttaaagtaacagatgatttagttcagtggcatttaaattactgtactttaagacatggaattgctggaggcttggaaacttgagtgcaatttccctagtacgacctccaaggagaatagagcaaaacagtgtgtttggtgtataaaacagaccaagctcaagatgtaaagaagattgagaaattccacagtcaactaatgcgacttatggtagccaaggaagcccgcaatgttaccatggaaactgagtgaatggtttgaaatgaagactttgtcgtgtacttaggaagtaaatatcttttgaattagagaaagtgttgggacagaaagtactttatgtaactaagtgggctgttcagaagcttagaggtcattttttgtaattttctttttaattactttagagagctagggatgcaaatgttttcagttagaaagcctttatttacttttggaaattgaacaagaaatgcatctgtcttagaaactggagattatttgatgttaggtaaaacatgtaattgtttctctggcaaatttgtatcagtaatttgaaaatgagatattaggaaaaaccaattcttcttaaatttagttcatctttctttaaaagaacattaaatgtaaccattttgtcagatccatgtattttggagcataaaatgtatgctgttgtgaccaataaatataaaatatggtaattggaattaactccacaccatagtatgcattgttatacatactgtgtacctaattatgtatagcagtgtagtctcaattatatctgaaagtaattgtgactaacaagtatgctttgccttatttccacatttaaactacctgttaatataagggatttgtagtatcagcttgttgagcaatgactttgaatctagttttcagtgatcagaagcagcagttatttgagtgtatgaatggaatgatgatcactgtgctataatgtactgaaaccaccatattacagaaatatttactacatattttccatctgtagtttctcagaagggctatggattagtttgaactgtcaaatccttgcatacttctgtgacacccctgcccattttctgtctttaattaaccaaggtgttaggtgtgactgtcacaactgttatgttttccagtaaactagaagtacgatatttgataattatatttgtatttcaccacctaaatgtaatgttgattcctcaagaatgaaatgaaggcactacattgaaatatgttttgtataaatttgtcatgttgaacagcattttagcatggtaagttcccttagctatatgaattttggcatgtttcagagagatcagtaaataaaatattagataaaataaaaaaaaaaaaaaaaaaaaaaaaaaaaaaaaaaaaaaaaaaaaaaaaaaaaaaaaaaaaaaaaaaaaaaaaaaaaaaaaaaaaaaaaaaaaaaaaaggggggggcgcccgcaaattaaaacaacgagggaggagcaaatagccaaccaccatcggtagtaaaacggggcacaacgagagacgaaacaaaaaaaagagagccgcaagtaaaaaaagcgaaaggaaacaacacacgcgagtgtagacggagacccaccacgggagagaaagggaacactaaacgaaagccgcaggacaaaaaacatgagcgtggaacacgtcaccgcgaagacgccgaataaatca

SEQ ID NO: 451192 - DNA, 1877 bp, Homo sapiens
aagcagtggtatcaacgcagagtgcccattacggcgggctgctgggactcgcgtcggttggcgactcccggacgtaggtagtttgttgggccgggttctgaggccttgcttctctttacttttccactctaggccacgatgccgcagtaccagacctgggaggagttcagccgcgctgccgagaagctttacctcgctgaccctatgaaggctgcagtgcagtggcatgatcatagctcactgcatcctcgacctcctgggctcaagcggtcctcttgcttcagcctcctgaatagcagagactacagtgtttggtgtataaaacagaccaagctcaagatgtaaagaagattgagaaattccacagtcaactaatgcgacttatggtagccaaggaagcccgcaatgttaccatggaaactgagtgaatggtttgaaatgaagactttgtcgtgtacttaggaagtaaatatcttttgaattagagaaagtgttgggacagaaagtactttatgtaactaagtgggctgttcagaagcttagaggtcattttttgtaattttctttttaattactttagagagctagggatgcaaatgttttcagttagaaagcctttatttacttttggaaattgaacaagaaatgcatctgtcttagaaactggagattatttgatgttaggtaaaacatgtaattgtttctctggcaaatttgtatcagtaatttgaaaatgagatattaggaaaaaccaattcttcttaaatttagttcatctttctttaaaagaacattaaatgtaaccattttgtcagatccatgtattttggagcataaaatgtatgctgttgtgaccaataaatataaaatatggtaattggaattaactccacaccatagtatgcattgttatacatactgtgtacctaattatgtatagcagtgtagtctcaattatatctgaaagtaattgtgactaacaagtatgctttgccttatttccacatttaaactacctgttaatataagggatttgtagtatcagcttgttgagcaatgactttgaatctagttttcagtgatcagaagcagcagttatttgagtgtatgaatggaatgatgatcactgtgctataatgtactgaaaccaccatattacagaaatatttactacatattttccatctgtagtttctcagaagggctatggattagtttgaactgtcaaatccttgcatacttctgtgacacccctgcccattttctgtctttaattaaccaaggtgttaggtgtgactgtcacaactgttatgttttccagtaaactagaagtacgatatttgataattatatttgtatttcaccacctaaatgtaatgttgattcctcaagaatgaaatgaaggcactacattgaaatatgttttgtataaatttgtcatgttgaacagcattttagcatggtaagttcccttagctatatgaattttggcatgtttcagagagatcagtaaataaaatattagataaaataaaaaaaaaaaaaaaaaaaaaaaaaaaaaaaaaaaaaaaaaaaaaaaaaaaaaaaaaaaaaaaaaaaaaaaaaaaaaaaaaaaaaaaaaaaaaaaaaggggggggcgcccgcaaattaaaacaacgagggaggagcaaatagccaaccaccatcggtagtaaaacggggcacaacgagagacgaaacaaaaaaaagagagccgcaagtaaaaaaagcgaaaggaaacaacacacgcgagtgtagacggagacccaccacgggagagaaagggaacactaaacgaaagccgcaggacaaaaaacatgagcgtggaacacgtcaccgcgaagacgccgaataaatca

SEQ ID NO: 451193 - DNA, 1784 bp, Homo sapiens
aagcagtggtatcaacgcagagtgcccattacggcgggctgctgggactcgcgtcggttggcgactcccggacgtaggtagtttgttgggccgggttctgaggccttgcttctctttacttttccactctaggccacgatgccgcagtaccagacctgggaggagttcagccgcgctgccgagaagctttacctcgctgaccctatgaaggcacgtgtggttctcaaatataggcattctgatgggaacttgtgtgttaaagtaacagatgatttagtttaatgcgacttatggtagccaaggaagcccgcaatgttaccatggaaactgagtgaatggtttgaaatgaagactttgtcgtgtacttaggaagtaaatatcttttgaattagagaaagtgttgggacagaaagtactttatgtaactaagtgggctgttcagaagcttagaggtcattttttgtaattttctttttaattactttagagagctagggatgcaaatgttttcagttagaaagcctttatttacttttggaaattgaacaagaaatgcatctgtcttagaaactggagattatttgatgttaggtaaaacatgtaattgtttctctggcaaatttgtatcagtaatttgaaaatgagatattaggaaaaaccaattcttcttaaatttagttcatctttctttaaaagaacattaaatgtaaccattttgtcagatccatgtattttggagcataaaatgtatgctgttgtgaccaataaatataaaatatggtaattggaattaactccacaccatagtatgcattgttatacatactgtgtacctaattatgtatagcagtgtagtctcaattatatctgaaagtaattgtgactaacaagtatgctttgccttatttccacatttaaactacctgttaatataagggatttgtagtatcagcttgttgagcaatgactttgaatctagttttcagtgatcagaagcagcagttatttgagtgtatgaatggaatgatgatcactgtgctataatgtactgaaaccaccatattacagaaatatttactacatattttccatctgtagtttctcagaagggctatggattagtttgaactgtcaaatccttgcatacttctgtgacacccctgcccattttctgtctttaattaaccaaggtgttaggtgtgactgtcacaactgttatgttttccagtaaactagaagtacgatatttgataattatatttgtatttcaccacctaaatgtaatgttgattcctcaagaatgaaatgaaggcactacattgaaatatgttttgtataaatttgtcatgttgaacagcattttagcatggtaagttcccttagctatatgaattttggcatgtttcagagagatcagtaaataaaatattagataaaataaaaaaaaaaaaaaaaaaaaaaaaaaaaaaaaaaaaaaaaaaaaaaaaaaaaaaaaaaaaaaaaaaaaaaaaaaaaaaaaaaaaaaaaaaaaaaaaaggggggggcgcccgcaaattaaaacaacgagggaggagcaaatagccaaccaccatcggtagtaaaacggggcacaacgagagacgaaacaaaaaaaagagagccgcaagtaaaaaaagcgaaaggaaacaacacacgcgagtgtagacggagacccaccacgggagagaaagggaacactaaacgaaagccgcaggacaaaaaacatgagcgtggaacacgtcaccgcgaagacgccgaataaatca

SEQ ID NO: 451194 - DNA, 1436 bp, Homo sapiens
aagcagtggtatcaacgcagagtgcccattacggcgggctgctgggactcgcgtcggttggcgactcccggacgtaggtagtttgttgggccgggttctgaggccttgcttctctttacttttccactctaggccacgatgccgcagtaccagacctgggaggagttcagccgcgctgccgagaagctttacctcgctgaccctatgaaggcacgtgtggttctcaaatataggcattctgatgggaacttgtgtgttaaagtaacagatgatttagtttgtttggtgtataaaacagaccaagctcaagatgtaaagaagattgagaaattccacagtcaactaatgcgacttatggtagccaaggaagcccgcaatgttacctttggagcataaaatgtatgctgttgtgaccaataaatataaaatatggtaattggaattaactccacaccatagtatgcattgttatacatactgtgtacctaattatgtatagcagtgtagtctcaattatatctgaaagtaattgtgactaacaagtatgctttgccttatttccacatttaaactacctgttaatataagggatttgtagtatcagcttgttgagcaatgactttgaatctagttttcagtgatcagaagcagcagttatttgagtgtatgaatggaatgatgatcactgtgctataatgtactgaaaccaccatattacagaaatatttactacatattttccatctgtagtttctcagaagggctatggattagtttgaactgtcaaatccttgcatacttctgtgacacccctgcccattttctgtctttaattaaccaaggtgttaggtgtgactgtcacaactgttatgttttccagtaaactagaagtacgatatttgataattatatttgtatttcaccacctaaatgtaatgttgattcctcaagaatgaaatgaaggcactacattgaaatatgttttgtataaatttgtcatgttgaacagcattttagcatggtaagttcccttagctatatgaattttggcatgtttcagagagatcagtaaataaaatattagataaaataaaaaaaaaaaaaaaaaaaaaaaaaaaaaaaaaaaaaaaaaaaaaaaaaaaaaaaaaaaaaaaaaaaaaaaaaaaaaaaaaaaaaaaaaaaaaaaaaggggggggcgcccgcaaattaaaacaacgagggaggagcaaatagccaaccaccatcggtagtaaaacggggcacaacgagagacgaaacaaaaaaaagagagccgcaagtaaaaaaagcgaaaggaaacaacacacgcgagtgtagacggagacccaccacgggagagaaagggaacactaaacgaaagccgcaggacaaaaaacatgagcgtggaacacgtcaccgcgaagacgccgaataaatca

SEQ ID NO: 451195 - DNA, 728 bp, Homo sapiens
aagcagtggtatcaacgcagagtgcccattacggcgggctgctgggactcgcgtcggttggcgactcccggacgtaggtagtttgttgggccgggttctgaggccttgcttctctttacttttccactctaggccacgatgccgcagtaccagacctgggaggagttcagccgcgctgccgagaagctttacctcgctgaccctatgaaggcacgtgtggttctcaaatataggcattctgatgggaacttgtgtgttaaagtaacagatgatttagttaccaagctcaagatgtaaagaagattgagaaattccacagtcaactaatgcgacttatggtagccaaggaagcccgcaatgttaccatggaaactgagtgaatggtttgaaatgaagactttgtcgtgtacttaggaagtaaatatcttttgaattagagaaagtgttgggacagaaagtactttatgtaactaagtgggctgttcagaagcttagaggtcattttttgtaattttctttttaattactttagagagctagggatgcaaatgttttcagttagaaagcctttatttacttttggaaattgaacaagaaatgcatctgtcttagaaactggagattatttgatgttaggtaaaacatgtaattgtttctctggcaaatttgtatcagtaatttgaagaaattttatgacttttggaagaacattgaatttggccattaaa

SEQ ID NO: 451196 - DNA, 436 bp, Homo sapiens
aagcagtggtatcaacgcagagtgcccattacggcgggctgctgggactcgcgtcggttggcgactcccggacgtaggtagtttgttgggccgggttctgaggccttgcttctctttacttttccactctaggccacgatgccgcagtaccagacctgggaggagttcagccgcgctgccgagaagctttacctcgctgaccctatgaaggcacgtgtggttctcaaatataggcattctgatgggaacttgtgtgttaaagtaacagatgatttagtttgtttggtgtataaaacagaccaagctcaagatgtaaagaagattgagaaattccacagtcaactaatgcgacttatggtagccaaggaagcccgcaatgttacccatgtggaaaaaaatttgggggtaaaaaaaggaactcttggggggggggcgc

SEQ ID NO: 451197 - DNA, 736 bp, Homo sapiens
aagcagtggtatcaacgcagagtgcccattacggcgggctgctgggactcgcgtcggttggcgactcccggacgtaggtagtttgttgggccgggttctgaggccttgcttctctttacttttccactctaggccacgatgccgcagtaccagacctgggaggagttcagccgcgctgccgagaagctttacctcgctgaccctatgaaggcacgtgtggttctcaaatataggcattctgatgggaacttgtgtgttaaagtaacagatgatttagttgatcattagttcctgttgtttaaaactcatgtgaacctttaagatgggctgaagaaaagtggatctgtactacaaaatgaggaaagggctgccagcttaaagttgctgtttttgaagattctacaacagatggctttatgaccaaccataagcagatcttaagtatctagtgaagaatttaactgctaacaaggaagaatttggtttgatttaaaagtaatatcttcaagcctgggcaacatggagaaaccccgtctctactaaaaatggaaaaattagctaggtgtggttgtgtgtgcctgtagtcccagctactcaggaagctgaggatcgcttgagcccaggacgcaggttgcagtgagctgagattgcaccactacacccccaacctgggccacagagtgagacactgtctcaaaaatacataccttcagcaaatcaagattttttttttttt

SEQ ID NO: 451198 - DNA, 760 bp, Homo sapiens
aagcagtggtatcaacgcagagtgcccattacggcgggctgctgggactcgcgtcggttggcgactcccggacgtaggtagtttgttgggccgggttctgaggccttgcttctctttacttttccactctaggccacgatgccgcagtaccagacctgggaggagttcagccgcgctgccgagaagctttacctcgctgaccctatgaaggcacgtgtggttctcaaatataggcattctgatgggaacttgtgtgttaaagtaacagatgatttagtttagagacggggttttcaccatgttgaccaggatggtctccatctctttacctcatgatccacccaccttggcctcctgaatagcagagactacaggtgtgcaccaccacactcagctaatttttaaatttttttgtcaagacagggtctcattatattgcccaggttgatctggaactcctggactcaagccatctttctgccttagcctcccaaaccactgggattatgggtgtgaaccactaagtacttcttaaatcttgacattccacacagaaaaattttaattgtgattgtcacagagtggttaggtatacttgctgaagaaaaacccctatgtcctgtcttaaaaataggggaataggccgggcgcggtggctcgtgctggtaatcccagcattctgggaggctgaggtgggcggatcatgaggtcaggagttcgagaccagcctgaccaacacagtgaaaccccgtctctacta

SEQ ID NO: 451199 - DNA, 279 bp, Homo sapiens
atgatgaggttgaacttcaagttatttaagttgttgacttttattataggatcattagttcctgttgtttaaaactcatgtgaacctttaagatgggctgaagaaaagtggatctgtactacaaaatgaggaaagggctgccagcttaaagttgctgtttttgaagattctacaacagatggctttatgaccaaccataagcagatcttaagtatctagtgaagaatttaactgctaacaaggaagaatttggtttgatttaaaagtaatatcttcaag

SEQ ID NO: 451200 - DNA, 431 bp, Homo sapiens
caccttataagtctcacagacattccctgaatgtggatgtgttttgagaatgttcagtacatctcttcaaactggctgcaaataaaatatccaactttttaagtcttaaataaatggtagcaaaggaatgaactaaaatagctgattttttttttaacttcatttcggtttagtttatagtaaaaatgcctttagatgtttgggggtatttattctaaaaggatccttttcagcctacctgaagactaaattatttataagaaatgtcatttgtcttcactgtttctaaatatgtatttttgtttcaggcacgtgtggttctcaaatataggcattctgatgggaacttgtgtgttaaagtaacagatgatttagtttgtaagtatacatttttatttgttacatactttcagatttgtttgagttaatta

SEQ ID NO: 451201 - DNA, 1848 bp, Homo sapiens
aagcagtggtatcaacgcagagtgcccattacggcgggctgctgggactcgcgtcggttggcgactcccggacgtaggtagtttgttgggccgggttctgaggccttgcttctctttacttttccactctaggccacgatgccgcagtaccagacctgggaggagttcagccgcgctgccgagaagctttacctcgctgaccctatgaaggcacgtgtggttctcaaatataggcattctgatgggaacttgtgtgttaaagtaacagatgatttagtttgtttggtgtataaaacagaccaagctcaagatgtaaagaagattgagaaattccacagtcaactaatgcgacttatggtagccaaggaagcccgcaatgttaccatggaaactgagtgaatggtttgaaatgaagactttgtcgtgtacttaggaagtaaatatcttttgaattagagaaagtgttgggacagaaagtactttatgtaactaagtgggctgttcagaagcttagaggtcattttttgtaattttctttttaattactttagagagctagggatgcaaatgttttcagttagaaagcctttatttacttttggaaattgaacaagaaatgcatctgtcttagaaactggagattatttgatgttaggtaaaacatgtaattgtttctctggcaaatttgtatcagtaatttgaaaatgagatattaggaaaaaccaattcttcttaaatttagttcatctttctttaaaagaacattaaatgtaaccattttgtcagatccatgtattttggagcataaaatgtatgctgttgtgaccaataaatataaaatatggtaattggaattaactccacaccatagtatgcattgttatacatactgtgtacctaattatgtatagcagtgtagtctcaattatatctgaaagtaattgtgactaacaagtatgctttgccttatttccacatttaaactacctgttaatataagggatttgtagtatcagcttgttgagcaatgactttgaatctagttttcagtgatcagaagcagcagttatttgagtgtatgaatggaatgatgatcactgtgctataatgtactgaaaccaccatattacagaaatatttactacatattttccatctgtagtttctcagaagggctatggattagtttgaactgtcaaatccttgcatacttctgtgacacccctgcccattttctgtctttaattaaccaaggtgttaggtgtgactgtcacaactgttatgttttccagtaaactagaagtacgatatttgataattatatttgtatttcaccacctaaatgtaatgttgattcctcaagaatgaaatgaaggcactacattgaaatatgttttgtataaatttgtcatgttgaacagcattttagcatggtaagttcccttagctatatgaattttggcatgtttcagagagatcagtaaataaaatattagataaaataaaaaaaaaaaaaaaaaaaaaaaaaaaaaaaaaaaaaaaaaaaaaaaaaaaaaaaaaaaaaaaaaaaaaaaaaaaaaaaaaaaaaaaaaaaaaaaaaggggggggcgcccgcaaattaaaacaacgagggaggagcaaatagccaaccaccatcggtagtaaaacggggcacaacgagagacgaaacaaaaaaaagagagccgcaagtaaaaaaagcgaaaggaaacaacacacgcgagtgtagacggagacccaccacgggagagaaagggaacactaaacgaaagccgcaggacaaaaaacatgagcgtggaacacgtcaccgcgaagacgccgaataaatca

SEQ ID NO: 451202 - DNA, 1456 bp, Homo sapiens
aagcagtggtatcaacgcagagtgcccattacggcgggctgctgggactcgcgtcggttggcgactcccggacgtaggtagtttgttgggccgggttctgaggccttgcttctctttacttttccactctaggccacgatgccgcagtaccagacctgggaggagttcagccgcgctgccgagaagctttacctcgctgaccctatgaaggcacgtgtggttctcaaatataggcattctgatgggaacttgtgtgttaaagtaacagatgatttagtttgtttggtgtataaaacagaccaagctcaagatgtaaagaagattgagaaattccacagtcaactaatgcgacttatggtagccaaggaagcccgcaatgttaccatggaaactgagtgaatggtttgaaatgaagactttgtcgtgtacttaggaagtaaatatcttttgaattagagaaagtgttgggacagaaagtactttatgtaactaagtgggctgttcagaagcttagaggtcattttttgtaattttctttttaattactttagagagctagggatgcaaatgttttcagttagaaagcctttatttacttttggaaattgaacaagaaatgcatctgtcttagaaactggagattatttgatgttaggtaaaacatgtaattgtttctctggcaaatttgtatcagtaatttgaaaatgagatattaggaaaaaccaattcttcttaaatttagttcatctttctttaaaagaacattaaatgtaaccattttgtcagatccatgtattttggagcataaaatgtatgctgttgtgaccaataaatataaaatatggtaattggaattaactccacaccatagtatgcattgttatacatactgtgtacctaattatgtatagcagtgtagtctcaattatatctgaaagtaattgtgactaacaagtatgctttgccttatttccacatttaaactacctgttaatataagggatttgtagtatcagcttgttgagcaatgactttgaatctagttttcagtgatcagaagcagcagttatttgagtgtatgaatggaatgatgatcactgtgctataatgtactgaaaccaccatattacagaaatatttactacatattttccatctgtagtttctcagaagggctatggattagtttgaactgtcaaatccttgcatacttctgtgacacccctgcccattttctgtctttaattaaccaaggtgttaggtgtgactgtcacaactgttatgttttccagtaaactagaagtacgatatttgataattatatttgtatttcaccacctaaatgtaatgttgattcctcaagaatgaaatgaaggcactacattgaaatatgttttgtataaatttgtcatgttgaacagcattataacactaccccatggggtaaaaagtttcc

SEQ ID NO: 451203 - DNA, 1795 bp, Homo sapiens
aagcagtggtatcaacgcagagtgcccattacggcgggctgctgggactcgcgtcggttggcgactcccggacgtaggtagtttgttgggccgggttctgaggccttgcttctctttacttttccactctaggccacgatgccgcagtaccagacctgggaggagttcagccgcgctgccgagaagctttacctcgctgaccctatgaaggcacgtgtggttctcaaatataggcattctgatgggaacttgtgtgttaaagtaacagatgatttagtttgtttggtgtataaaacagaccaagctcaagatgtaaagaagattgagaaattccacagtcaactaatgcgacttatggtagccaaggaagcccgcaatgttaccatggaaactgagtgaatggtttgaaatgaagactttgtcgtgtacttaggaagtaaatatcttttgaattagagaaagtgttgggacagaaagtactttatgtaactaagtgggctgttcagaagcttagaggtcattttttgtaattttctttttaattactttagagagctagggatgcaaatgttttcagttagaaagcctttatttacttttggaaattgaacaagaaatgcatctgtcttagaaactggagattatttgatgttaggtaaaacatgtaattgtttctctggcaaatttgtatcagtaatttgaaaatgagatattaggaaaaaccaattcttcttaaatttagttcatctttctttaaaagaacattaaatgtaaccattttgtcagatccatgtattttggagcataaaatgtatgctgttgtgaccaataaatatatgtgtacctaattatgtatagcagtgtagtctcaattatatctgaaagtaattgtgactaacaagtatgctttgccttatttccacatttaaactacctgttaatataagggatttgtagtatcagcttgttgagcaatgactttgaatctagttttcagtgatcagaagcagcagttatttgagtgtatgaatggaatgatgatcactgtgctataatgtactgaaaccaccatattacagaaatatttactacatattttccatctgtagtttctcagaagggctatggattagtttgaactgtcaaatccttgcatacttctgtgacacccctgcccattttctgtctttaattaaccaaggtgttaggtgtgactgtcacaactgttatgttttccagtaaactagaagtacgatatttgataattatatttgtatttcaccacctaaatgtaatgttgattcctcaagaatgaaatgaaggcactacattgaaatatgttttgtataaatttgtcatgttgaacagcattttagcatggtaagttcccttagctatatgaattttggcatgtttcagagagatcagtaaataaaatattagataaaataaaaaaaaaaaaaaaaaaaaaaaaaaaaaaaaaaaaaaaaaaaaaaaaaaaaaaaaaaaaaaaaaaaaaaaaaaaaaaaaaaaaaaaaaaaaaaaaaggggggggcgcccgcaaattaaaacaacgagggaggagcaaatagccaaccaccatcggtagtaaaacggggcacaacgagagacgaaacaaaaaaaagagagccgcaagtaaaaaaagcgaaaggaaacaacacacgcgagtgtagacggagacccaccacgggagagaaagggaacactaaacgaaagccgcaggacaaaaaacatgagcgtggaacacgtcaccgcgaagacgccgaataaatca

SEQ ID NO: 451204 - DNA, 1805 bp, Homo sapiens
aagcagtggtatcaacgcagagtgcccattacggcgggctgctgggactcgcgtcggttggcgactcccggacgtaggtagtttgttgggccgggttctgaggccttgcttctctttacttttccactctaggccacgatgccgcagtaccagacctgggaggagttcagccgcgctgccgagaagctttacctcgctgaccctatgaaggcacgtgtggttctcaaatataggcattctgatgggaacttgtgtgttaaagtaacagatgatttagtttgtttggtgtataaaacagaccaagctcaagatgtaaagaagattgagaaattccacagtcaactaatgcgacttatggtagccaaggaagcccgcaatgttaccatggaaactgagtgaatggtttgaaatgaagactttgtcgtgtacttaggaagtaaatatcttttgaattagagaaagtgttgggacagaaagtactttatgtaactaagtgggctgttcagaagcttagaggtcattttttgtaattttctttttaattactttagagagctagggatgcaaatgttttcagttagaaagcctttatttacttttggaaattgaacaagaaatgcatctgtcttagaaactggagattatttgatgttaggtaaaacatgtaattgtttctctggcaaatttgtatcagtaatttgaaaatgagatattaggaaaaaccaattcttcttaaatttagttcatctttcttttggagcataaaatgtatgctgttgtgaccaataaatataaaatatggtaattggaattaactccacaccatagtatgcattgttatacatactgtgtacctaattatgtatagcagtgtagtctcaattatatctgaaagtaattgtgactaacaagtatgctttgccttatttccacatttaaactacctgttaatataagggatttgtagtatcagcttgttgagcaatgactttgaatctagttttcagtgatcagaagcagcagttatttgagtgtatgaatggaatgatgatcactgtgctataatgtactgaaaccaccatattacagaaatatttactacatattttccatctgtagtttctcagaagggctatggattagtttgaactgtcaaatccttgcatacttctgtgacacccctgcccattttctgtctttaattaaccaaggtgttaggtgtgactgtcacaactgttatgttttccagtaaactagaagtacgatatttgataattatatttgtatttcaccacctaaatgtaatgttgattcctcaagaatgaaatgaaggcactacattgaaatatgttttgtataaatttgtcatgttgaacagcattttagcatggtaagttcccttagctatatgaattttggcatgtttcagagagatcagtaaataaaatattagataaaataaaaaaaaaaaaaaaaaaaaaaaaaaaaaaaaaaaaaaaaaaaaaaaaaaaaaaaaaaaaaaaaaaaaaaaaaaaaaaaaaaaaaaaaaaaaaaaaaggggggggcgcccgcaaattaaaacaacgagggaggagcaaatagccaaccaccatcggtagtaaaacggggcacaacgagagacgaaacaaaaaaaagagagccgcaagtaaaaaaagcgaaaggaaacaacacacgcgagtgtagacggagacccaccacgggagagaaagggaacactaaacgaaagccgcaggacaaaaaacatgagcgtggaacacgtcaccgcgaagacgccgaataaatca

SEQ ID NO: 451205 - DNA, 1972 bp, Homo sapiens
aagcagtggtatcaacgcagagtgcccattacggcgggctgctgggactcgcgtcggttggcgactcccggacgtaggtagtttgttgggccgggttctgaggccttgcttctctttacttttccactctaggccacgatgccgcagtaccagacctgggaggagttcagccgcgctgccgagaagctttacctcgctgaccctatgaaggcacgtgtggttctcaaatataggcattctgatgggaacttgtgtgttaaagtaacagatgatttagttagacagtgtcttgctctattgctcaggctgcagtgcagtggcatgatcatagctcactgcatcctcgacctcctgggctcaagcggtcctcttgcttcagcctcctgaatagcagagactacagtgtttggtgtataaaacagaccaagctcaagatgtaaagaagattgagaaattccacagtcaactaatgcgacttatggtagccaaggaagcccgcaatgttaccatggaaactgagtgaatggtttgaaatgaagactttgtcgtgtacttaggaagtaaatatcttttgaattagagaaagtgttgggacagaaagtactttatgtaactaagtgggctgttcagaagcttagaggtcattttttgtaattttctttttaattactttagagagctagggatgcaaatgttttcagttagaaagcctttatttacttttggaaattgaacaagaaatgcatctgtcttagaaactggagattatttgatgttaggtaaaacatgtaattgtttctctggcaaatttgtatcagtaatttgaaaatgagatattaggaaaaaccaattcttcttaaatttagttcatctttctttaaaagaacattaaatgtaaccattttgtcagatccatgtattttggagcataaaatgtatgctgttgtgaccaataaatataaaatatggtaattggaattaactccacaccatagtatgcattgttatacatactgtgtacctaattatgtatagcagtgtagtctcaattatatctgaaagtaattgtgactaacaagtatgctttgccttatttccacatttaaactacctgttaatataagggatttgtagtatcagcttgttgagcaatgactttgaatctagttttcagtgatcagaagcagcagttatttgagtgtatgaatggaatgatgatcactgtgctataatgtactgaaaccaccatattacagaaatatttactacatattttccatctgtagtttctcagaagggctatggattagtttgaactgtcaaatccttgcatacttctgtgacacccctgcccattttctgtctttaattaaccaaggtgttaggtgtgactgtcacaactgttatgttttccagtaaactagaagtacgatatttgataattatatttgtatttcaccacctaaatgtaatgttgattcctcaagaatgaaatgaaggcactacattgaaatatgttttgtataaatttgtcatgttgaacagcattttagcatggtaagttcccttagctatatgaattttggcatgtttcagagagatcagtaaataaaatattagataaaataaaaaaaaaaaaaaaaaaaaaaaaaaaaaaaaaaaaaaaaaaaaaaaaaaaaaaaaaaaaaaaaaaaaaaaaaaaaaaaaaaaaaaaaaaaaaaaaaggggggggcgcccgcaaattaaaacaacgagggaggagcaaatagccaaccaccatcggtagtaaaacggggcacaacgagagacgaaacaaaaaaaagagagccgcaagtaaaaaaagcgaaaggaaacaacacacgcgagtgtagacggagacccaccacgggagagaaagggaacactaaacgaaagccgcaggacaaaaaacatgagcgtggaacacgtcaccgcgaagacgccgaataaatca

SEQ ID NO: 451206 - DNA, 2821 bp, Homo sapiens
aagcagtggtatcaacgcagagtgcccattacggcgggctgctgggactcgcgtcggttggcgactcccggacgtaggtagtttgttgggccgggttctgaggccttgcttctctttacttttccactctaggccacgatgccgcagtaccagacctgggaggagttcagccgcgctgccgagaagctttacctcgctgaccctatgaaggcacgtgtggttctcaaatataggcattctgatgggaacttgtgtgttaaagtaacagatgatttagttgatcattagttcctgttgtttaaaactcatgtgaacctttaagatgggctgaagaaaagtggatctgtactacaaaatgaggaaagggctgccagcttaaagttgctgtttttgaagattctacaacagatggctttatgaccaaccataagcagatcttaagtatctagtgaagaatttaactgctaacaaggaagaatttggtttgatttaaaagtaatatcttcaagcctgggcaacatggagaaaccccgtctctactaaaaatggaaaaattatagctgggattacaggcacacgccaccacgcccagctaatttttgtatttttagtagagacggggtttcaccatattggccaggctggtttcgaactgctgacctggtggtccgcctgcctcggcctcccagagtgctgggattacaggcgtaagccaccacgcctggccaagaaaatcaagatttacctggtttatgtgttgaccagctatacacagagaattctagatttttttctaaaaattattatcaaacccccaatttcaccagtagaaaaagagatcttaagatttctgtgtttttttttccagcataactcagttacttatggctgggagaaaatatgtagggagataatctaatacctaattcgaaggaagaaaatatctaattctaagtcttgagttcttctcatcagaccatagcaggatttaacatttaacatttttcagaagcttctaatagacttcattcagttttttgtccacagcagtggcatttaaattactgtactttaagacatggaattgctggaggcttggaaacttgagtgcaatttccctagtacgacctccaaggagaatagagcaaaacagtggtaggaaaaactctcaaaattttacccaattgtatgttttctacattgtcagtatctagttttatatagttaatatgtacttctaaaatttctgacatgtttggtgtataaaacagaccaagctcaagatgtaaagaagattgagaaattccacagtcaactaatgcgacttatggtagccaaggaagcccgcaatgttaccatggaaactgagtgaatggtttgaaatgaagactttgtcgtgtacttaggaagtaaatatcttttgaattagagaaagtgttgggacagaaagtactttatgtaactaagtgggctgttcagaagcttagaggtcattttttgtaattttctttttaattactttagagagctagggatgcaaatgttttcagttagaaagcctttatttacttttggaaattgaacaagaaatgcatctgtcttagaaactggagattatttgatgttaggtaaaacatgtaattgtttctctggcaaatttgtatcagtaatttgaaaatgagatattaggaaaaaccaattcttcttaaatttagttcatctttctttaaaagaacattaaatgtaaccattttgtcagatccatgtattttggagcataaaatgtatgctgttgtgaccaataaatataaaatatggtaattggaattaactccacaccatagtatgcattgttatacatactgtgtacctaattatgtatagcagtgtagtctcaattatatctgaaagtaattgtgactaacaagtatgctttgccttatttccacatttaaactacctgttaatataagggatttgtagtatcagcttgttgagcaatgactttgaatctagttttcagtgatcagaagcagcagttatttgagtgtatgaatggaatgatgatcactgtgctataatgtactgaaaccaccatattacagaaatatttactacatattttccatctgtagtttctcagaagggctatggattagtttgaactgtcaaatccttgcatacttctgtgacacccctgcccattttctgtctttaattaaccaaggtgttaggtgtgactgtcacaactgttatgttttccagtaaactagaagtacgatatttgataattatatttgtatttcaccacctaaatgtaatgttgattcctcaagaatgaaatgaaggcactacattgaaatatgttttgtataaatttgtcatgttgaacagcattttagcatggtaagttcccttagctatatgaattttggcatgtttcagagagatcagtaaataaaatattagataaaataaaaaaaaaaaaaaaaaaaaaaaaaaaaaaaaaaaaaaaaaaaaaaaaaaaaaaaaaaaaaaaaaaaaaaaaaaaaaaaaaaaaaaaaaaaaaaaaaggggggggcgcccgcaaattaaaacaacgagggaggagcaaatagccaaccaccatcggtagtaaaacggggcacaacgagagacgaaacaaaaaaaagagagccgcaagtaaaaaaagcgaaaggaaacaacacacgcgagtgtagacggagacccaccacgggagagaaagggaacactaaacgaaagccgcaggacaaaaaacatgagcgtggaacacgtcaccgcgaagacgccgaataaatca

SEQ ID NO: 451207 - DNA, 1787 bp, Homo sapiens
aagcagtggtatcaacgcagagtgcccattacggcgggctgctgggactcgcgtcggttggcgactcccggacgtaggtagtttgttgggccgggttctgaggccttgcttctctttacttttccactctaggccacgatgccgcagtaccagacctgggaggagttcagccgcgctgccgagaagctttacctcgctgaccctatgaaggcacgtgtggttctcaaatataggcattctgatgggaacttgtgtgttaaagtaacagatgatttagtttgtttggtgtataaaacagaccaagctcaagatgtaaagaagattgagaaattccacagtcaactaatgcgacttatggtagccaaggaagcccgcaatgttaccatggaaactgagtgaatggtttgaaatgaagactttgtcgtgtacttaggaagtaaatatcttttgaattagagaaagtgttgggacagaaagtactttatgtaactaagtgggctgttcagaagcttagaggtcattttttgtaattttctttttaattactttagagagctagggatgcaaatgttttcagttagaaagccatgttaggtaaaacatgtaattgtttctctggcaaatttgtatcagtaatttgaaaatgagatattaggaaaaaccaattcttcttaaatttagttcatctttctttaaaagaacattaaatgtaaccattttgtcagatccatgtattttggagcataaaatgtatgctgttgtgaccaataaatataaaatatggtaattggaattaactccacaccatagtatgcattgttatacatactgtgtacctaattatgtatagcagtgtagtctcaattatatctgaaagtaattgtgactaacaagtatgctttgccttatttccacatttaaactacctgttaatataagggatttgtagtatcagcttgttgagcaatgactttgaatctagttttcagtgatcagaagcagcagttatttgagtgtatgaatggaatgatgatcactgtgctataatgtactgaaaccaccatattacagaaatatttactacatattttccatctgtagtttctcagaagggctatggattagtttgaactgtcaaatccttgcatacttctgtgacacccctgcccattttctgtctttaattaaccaaggtgttaggtgtgactgtcacaactgttatgttttccagtaaactagaagtacgatatttgataattatatttgtatttcaccacctaaatgtaatgttgattcctcaagaatgaaatgaaggcactacattgaaatatgttttgtataaatttgtcatgttgaacagcattttagcatggtaagttcccttagctatatgaattttggcatgtttcagagagatcagtaaataaaatattagataaaataaaaaaaaaaaaaaaaaaaaaaaaaaaaaaaaaaaaaaaaaaaaaaaaaaaaaaaaaaaaaaaaaaaaaaaaaaaaaaaaaaaaaaaaaaaaaaaaaggggggggcgcccgcaaattaaaacaacgagggaggagcaaatagccaaccaccatcggtagtaaaacggggcacaacgagagacgaaacaaaaaaaagagagccgcaagtaaaaaaagcgaaaggaaacaacacacgcgagtgtagacggagacccaccacgggagagaaagggaacactaaacgaaagccgcaggacaaaaaacatgagcgtggaacacgtcaccgcgaagacgccgaataaatca

SEQ ID NO: 451208 - DNA, 1945 bp, Homo sapiens
aagcagtggtatcaacgcagagtgcccattacggcgggctgctgggactcgcgtcggttggcgactcccggacgtaggtagtttgttgggccgggttctgaggccttgcttctctttacttttccactctaggccacgatgccgcagtaccagacctgggaggagttcagccgcgctgccgagaagctttacctcgctgaccctatgaaggcacgtgtggttctcaaatataggcattctgatgggaacttgtgtgttaaagtaacagatgatttagtttagagacggggttttcaccatgttgaccaggatggtctccatctctttacctcatgatccacccaccttggcctctgaaagtgctgagattacagggtgtttggtgtataaaacagaccaagctcaagatgtaaagaagattgagaaattccacagtcaactaatgcgacttatggtagccaaggaagcccgcaatgttaccatggaaactgagtgaatggtttgaaatgaagactttgtcgtgtacttaggaagtaaatatcttttgaattagagaaagtgttgggacagaaagtactttatgtaactaagtgggctgttcagaagcttagaggtcattttttgtaattttctttttaattactttagagagctagggatgcaaatgttttcagttagaaagcctttatttacttttggaaattgaacaagaaatgcatctgtcttagaaactggagattatttgatgttaggtaaaacatgtaattgtttctctggcaaatttgtatcagtaatttgaaaatgagatattaggaaaaaccaattcttcttaaatttagttcatctttctttaaaagaacattaaatgtaaccattttgtcagatccatgtattttggagcataaaatgtatgctgttgtgaccaataaatataaaatatggtaattggaattaactccacaccatagtatgcattgttatacatactgtgtacctaattatgtatagcagtgtagtctcaattatatctgaaagtaattgtgactaacaagtatgctttgccttatttccacatttaaactacctgttaatataagggatttgtagtatcagcttgttgagcaatgactttgaatctagttttcagtgatcagaagcagcagttatttgagtgtatgaatggaatgatgatcactgtgctataatgtactgaaaccaccatattacagaaatatttactacatattttccatctgtagtttctcagaagggctatggattagtttgaactgtcaaatccttgcatacttctgtgacacccctgcccattttctgtctttaattaaccaaggtgttaggtgtgactgtcacaactgttatgttttccagtaaactagaagtacgatatttgataattatatttgtatttcaccacctaaatgtaatgttgattcctcaagaatgaaatgaaggcactacattgaaatatgttttgtataaatttgtcatgttgaacagcattttagcatggtaagttcccttagctatatgaattttggcatgtttcagagagatcagtaaataaaatattagataaaataaaaaaaaaaaaaaaaaaaaaaaaaaaaaaaaaaaaaaaaaaaaaaaaaaaaaaaaaaaaaaaaaaaaaaaaaaaaaaaaaaaaaaaaaaaaaaaaaggggggggcgcccgcaaattaaaacaacgagggaggagcaaatagccaaccaccatcggtagtaaaacggggcacaacgagagacgaaacaaaaaaaagagagccgcaagtaaaaaaagcgaaaggaaacaacacacgcgagtgtagacggagacccaccacgggagagaaagggaacactaaacgaaagccgcaggacaaaaaacatgagcgtggaacacgtcaccgcgaagacgccgaataaatca

SEQ ID NO: 451209 - DNA, 1953 bp, Homo sapiens
aagcagtggtatcaacgcagagtgcccattacggcgggctgctgggactcgcgtcggttggcgactcccggacgtaggtagtttgttgggccgggttctgaggccttgcttctctttacttttccactctaggccacgatgccgcagtaccagacctgggaggagttcagccgcgctgccgagaagctttacctcgctgaccctatgaaggcacgtgtggttctcaaatataggcattctgatgggaacttgtgtgttaaagtaacagatgatttagttagacagtgtcttgctctattgctcaggctgcagtgcagtggcatgatcatagctcactgcatcctcgacctcctgggctcaagcggtcctcttgcttcagcctcctgaatagcagagactacagaccaagctcaagatgtaaagaagattgagaaattccacagtcaactaatgcgacttatggtagccaaggaagcccgcaatgttaccatggaaactgagtgaatggtttgaaatgaagactttgtcgtgtacttaggaagtaaatatcttttgaattagagaaagtgttgggacagaaagtactttatgtaactaagtgggctgttcagaagcttagaggtcattttttgtaattttctttttaattactttagagagctagggatgcaaatgttttcagttagaaagcctttatttacttttggaaattgaacaagaaatgcatctgtcttagaaactggagattatttgatgttaggtaaaacatgtaattgtttctctggcaaatttgtatcagtaatttgaaaatgagatattaggaaaaaccaattcttcttaaatttagttcatctttctttaaaagaacattaaatgtaaccattttgtcagatccatgtattttggagcataaaatgtatgctgttgtgaccaataaatataaaatatggtaattggaattaactccacaccatagtatgcattgttatacatactgtgtacctaattatgtatagcagtgtagtctcaattatatctgaaagtaattgtgactaacaagtatgctttgccttatttccacatttaaactacctgttaatataagggatttgtagtatcagcttgttgagcaatgactttgaatctagttttcagtgatcagaagcagcagttatttgagtgtatgaatggaatgatgatcactgtgctataatgtactgaaaccaccatattacagaaatatttactacatattttccatctgtagtttctcagaagggctatggattagtttgaactgtcaaatccttgcatacttctgtgacacccctgcccattttctgtctttaattaaccaaggtgttaggtgtgactgtcacaactgttatgttttccagtaaactagaagtacgatatttgataattatatttgtatttcaccacctaaatgtaatgttgattcctcaagaatgaaatgaaggcactacattgaaatatgttttgtataaatttgtcatgttgaacagcattttagcatggtaagttcccttagctatatgaattttggcatgtttcagagagatcagtaaataaaatattagataaaataaaaaaaaaaaaaaaaaaaaaaaaaaaaaaaaaaaaaaaaaaaaaaaaaaaaaaaaaaaaaaaaaaaaaaaaaaaaaaaaaaaaaaaaaaaaaaaaaggggggggcgcccgcaaattaaaacaacgagggaggagcaaatagccaaccaccatcggtagtaaaacggggcacaacgagagacgaaacaaaaaaaagagagccgcaagtaaaaaaagcgaaaggaaacaacacacgcgagtgtagacggagacccaccacgggagagaaagggaacactaaacgaaagccgcaggacaaaaaacatgagcgtggaacacgtcaccgcgaagacgccgaataaatca

SEQ ID NO: 451210 - DNA, 694 bp, Homo sapiens
aagcagtggtatcaacgcagagtgcccattacggcgggctgctgggactcgcgtcggttggcgactcccggacgtaggtagtttgttgggccgggttctgaggccttgcttctctttacttttccactctaggccacgatgccgcagtaccagacctgggaggagttcagccgcgctgccgagaagctttacctcgctgaccctatgaaggcacgtgtggttctcaaatataggcattctgatgggaacttgtgtgttaaagtaacagatgatttagtttgtttggtgtataaaacagaccaagctcaagatgtaaagaagattgagaaattccacagtcaactaatgcgacttatggtagccaaggaagcccgcaatgttaccatggaaactgagtgaatggtttgaaatgaagactttgtcgtgtacttaggaagtaaatatcttttgaattagagaaagtgttgggacagaaagtactttatgtaactaagtgggctgttcagaagcttagaggtcattttttgtaattttctttttaattactttagagagctagggatgcaaatgttttcagttagaaagcctttatttacttttggaaattgaacaagaaatgcatctgtcttagaaactggagattatttgaaacaggaatggtctctgcattggtcttgtggatattgtctgtttt

SEQ ID NO: 451211 - DNA, 439 bp, Homo sapiens
  misc_feature (392)..(392): n is a, c, g, or t
aagcagtggtatcaacgcagagtgcccattacggcgggctgctgggactcgcgtcggttggcgactcccggacgtaggtagtttgttgggccgggttctgaggccttgcttctctttacttttccactctaggccacgatgccgcagtaccagacctgggaggagttcagccgcgctgccgagaagctttacctcgctgaccctatgaaggcacgtgtggttctcaaatataggcattctgatgggaacttgtgtgttaaagtaacagatgatttagtttgtttggtgtataaaacagaccaagctcaagatgtaaagaagattgagaaattccacagtcaactaatgcgacttatggtagccaaggaagcccgcaatgttaccgtggaaanggggggggggggggcttcctttttttttttgggggggggaaaaaaaa

SEQ ID NO: 451212 - DNA, 789 bp, Homo sapiens
aagcagtggtatcaacgcagagtgcccattacggcgggctgctgggactcgcgtcggttggcgactcccggacgtaggtagtttgttgggccgggttctgaggccttgcttctctttacttttccactctaggccacgatgccgcagtaccagacctgggaggagttcagccgcgctgccgagaagctttacctcgctgaccctatgaaggcacgtgtggttctcaaatataggcattctgatgggaacttgtgtgttaaagtaacagatgatttagttagacagtgtcttgctctattgctcaggctgcagtgcagtggcatgatcatagctcactgcatcctcgacctcctgggctcaagcggtcctcttgcttcagcctcctgaatagcagagactacaggtgtgcaccaccacactcagctaatttttaaatttttttgtcaagacagggtctcattatattgcccaggttgatctggaactcctggactcaagccatctttctgccttagcctcccaaaccactgggattatgggtgtgaaccactaagtacttcttaaatcttgacattccacacagaaaaattttaattgtgattgtcacagagtggttaggtatacttgctgaagaaaaacccctatgtcctgtcttaaaaataggggaataggccgggcgcggtggctcgtgctggtaatcccagcattctgggaggctgaggtgggcggatcatgaggtcaggagttcgagaccagcctgaccaacacagtgaaaccccgtctctacta

SEQ ID NO: 451213 - DNA, 353 bp, Homo sapiens
aagcagtggtatcaacgcagagtgcccattacggcgggctgctgggactcgcgtcggttggcgactcccggacgtaggtagtttgttgggccgggttctgaggccttgcttctctttacttttccactctaggccacgatgccgcagtaccagacctgggaggagttcagccgcgctgccgagaagctttacctcgctgaccctatgaaggcacgtgtggttctcaaatataggcattctgatgggaacttgtgtgttaaagtaacagatgatttagttctatgctcatttggtcattcatgcagaccatagttcaggagtatcacagaagtttgcaggtatccaacaagtct

SEQ ID NO: 451214 - DNA, 371 bp, Homo sapiens
atctcgttttccttcctgtcccctgtaggccttcagccacttcacttttgagcgttccggccatcagctgatagtggtggacatccagggagttggggatctctacactgacccacagatccacacggagacgggcactgactttggagacggcaacctaggtacgtggggaaagccagcctgtttctgcagaaaccacgctccctgctaaaacctctgagttcttcgtacagccaaggaaacaggctgagacactgtacgcgctttttcaagatcatggagatgggagactggatgtctgatgcctcccagcttggcacgttttatacctgccctggccatatgtatgaggcccaccactgcctgtcccc

SEQ ID NO: 451215 - DNA, 5670 bp, Homo sapiens
  misc_feature (2983)..(2983): n is a, c, g, or t
tgtccagtaactctggctgtgccggatactgcttgggtaaaacgggcaccccaggaacatggcagacgaagacctcatcttccgcctggaaggtgttgatggcggccagtccccccgagctggccatgatggtgattctgatggggacagcgacgatgaggaaggttacttcatctgccccatcacggatgacccaagctcgaaccagaatgtcaattccaaggttaataagtactacagcaacctaacaaaaagtgagcggtatagctccagcgggtccccggcaaactccttccacttcaaggaagcctggaagcacgcaatccagaaggccaagcacatgcccgacccctgggctgagttccacctggaagatattgccaccgaacgtgctactcgacacaggtacaacgccgtcaccggggaatggctggatgatgaagttctgatcaagatggcatctcagcccttcggccgaggagcaatgagggagtgcttccggacgaagaagctctccaacttcttgcatgcccagcagtggaagggcgcctccaactacgtggcgaagcgctacatcgagcccgtagaccgggatgtgtactttgaggacgtgcgtctacagatggaggccaagctctggggggaggagtataatcggcacaagccccccaagcaggtggacatcatgcagatgtgcatcatcgagctgaaggacagaccgggcaagcccctcttccacctggagcactacatcgagggcaagtacatcaagtacaactccaactctggctttgtccgcgatgacaacatccgcctgacgccgcaggccttcagccacttcacttttgagcgttccggccatcagctgatagtggtggacatccagggagttggggatctctacactgacccacagatccacacggagacgggcactgactttggagacggcaacctaggtgtccgcgggatggcgctcttcttctactctcatgcctgcaaccggatttgcgagagcatgggccttgctccctttgacctctcgccccgggagagggatgcagtgaatcagaacaccaagctgctgcaatcagccaagaccatcttgagaggaacagaggaaaaatgtgggagcccccgagtaaggaccctctctgggagccggccacccctgctccgtcccctttcagagaactctggagacgagaacatgagcgacgtgaccttcgactctctcccttcttccccatcttcggccacaccacacagccagaagctagaccacctccattggccagtgttcagtgacctcgataacatggcatccagagaccatgatcatctagacaaccaccgggagtctgagaatagtggggacagcggataccccagtgagaagcggggtgagctggatgaccctgagccccgagaacatggccactcatacagtaatcggaagtacgagtctgacgaagacagcctgggcagctctggacgggtatgtgtagagaagtggaatctcctcaactcctcccgcctccacctgccgagggcttcggccgtggccctggaagtgcaaaggcttaatgctctggacctcgaaaagaaaatcgggaagtccattttggggaaggtccatctggccatggtgcgctaccacgagggtgggcgcttctgcgagaagggcgaggagtgggaccaggagtcggctgtcttccacctggagcacgcagccaacctgggcgagctggaggccatcgtgggcctgggactcatgtactcgcagttgcctcatcacatcctagccgatgtctctctgaaggagacagaagagaacaaaaccaaaggatttgattacttactaaaggccgctgaagctggcgacaggcagtccatgatcctagtggcgcgagcttttgactctggccagaacctcagcccggacaggtgccaagactggctagaggccctgcactggtacaacactgccctggagatgacggactgtgatgagggcggtgagtacgacggaatgcaggacgagccccggtacatgatgctggccagggaggccgagatgctgttcacaggaggctacgggctggagaaggacccgcagagatcaggggacttgtatacccaggcagcagaggcagcgatggaagccatgaagggccgactggccaaccagtactaccaaaaggctgaagaggcctgggcccagatggaggagtaaccaggaaaatcactgccggctagtcccaagcaaacgggctaggaggaaagattaaaaaaacaacaacaacaacttatttagtttggggaggggaagcatttttaagtgtgttgtaaaatcaaattttatatttcattttttgactcttgaaaaatgtctttgctccttggcagctaccagcagagactctatagctgtctcttagggcagtattttggggaagtggggcttgaagaagcagcctaatgaaccaacataccgttttgtgtgtggttttttttgtttgtttgtttgtttgttttgagacagagtcttgctctgtcacccaggctggagtgcagtgacatgatcttagctcactgcaacctccgcctcctgggttcaagtgattctcctgcctcagcctcccaagtagctgggattactggtgcacaccaccacactcagctaatttttgcatttttagtagagatggggtttcaccatgttggccaggctggtctcgaactcctaacctcaggtgatccacctgcctcagcctcccaaagtgctgggattacaggtgtgagccaccatgcctgcccattttgtggttctattttcatttttatttctttttttttttgtcacgagatataagaaagtgctttttgccttgaatggacaattttagggctgtgctcactagtcttttcaggctggactgaaatgtcgggcccatggagccctgtgttttgtgcatcgggntgagaaatgaagcacttcacgctggctttcctaagtcacggggcgtgtattgccgtggcttagtgcaaagcattctttctcagagcatttagaggcatgcgtggcattttttcagtgggtgtgagattgcacaatacccaggctcccttctactgtggggaagggcctgcatgttggctgttttttaaacttctagttcaatttccttccataatgctactgattttctggcatacagccgaattccatcttttaagcatgctttctacggtgggcttttcaaaacaggtttgagttttgtatgcacacgtttactacctctaactcctacatcagctagtgtggaagagggtgcacctcaaagcttttacacgtaaggacagcggcttggaatgtgagagccttttctccaagcagacccacactctgcatctcagtggcagctcccacaacgtgactgcaatgtctcttatacagtattccttggtgttttcttagtgtctggatgttcttacgtgaaatctgctccccagccctggtccttggcattttctgcttgaagctgggctgattttcttgtaatttacagcaggacgctttcagcagcagtctcttgggattttatctaagatgtttgaggatgagagggcaagaactataaacactcattaattctagtagtctccccatggccagacaatggcgattgttatttaatgagcttttcctttcaatggaattcagctctcacattagtatgatttcatttgatgtttcaaatagcaaagatgctaggtgcggtggctcccgcctgtaatctcagcactttgaggagggccaaggtgggaggattgcttgagctcaggacttcaagaccagcctgggtaaacatggcgagaccctgtctctaccaaaacaacaaaaaaaagacagactgctttgatcaaccctaaatgcaaaagcagcctatttttctttgtttaaaagtcaaaacataaaaaagcagagtataacatacaaaccattcttaactattcattaaaatgggtccttcaacaccttagtggggtttgttgttgttgcttatgcagagagattattttctttttattattttataatttttgaaatagagatggggtctcactgtgttgcccaggctggtctcgaactcctggacttaagtgagcctcccgcctcagtctcccaaagcgctgggattacaggcaggagccactgagcccagccaagacttcagtgttgactgctttggaggcacaaacccatgcaagcgttagttccaaagttcagtgtgtacccttaaatgaacaatgaagcaggtaaaattacccttgaaaaaaatcccttggaccacccataaatgacagtgactttttcaatatggactcatcatagccagttttccttttgaagttggaactgatcacccttttgtcatctgtaccagatcagtagttggcttgtgttacattttgtgtgtgtgtgtgcgtgttttaaaccagtgcatataaattgtatgttaaatgtaagtaactttaagttgacttatctcttcacagtaatcaagcctcacgtaattcatgctttttaaattcagccagccccccctctctgaaattttattatgtaaataatttgtgttccctgatcactcgtttaagttcttagttgtatgtcatctcttctctagcaggaattggcaaacttttttgtaaaggggtagaaagtgaagattttaggctttgcaggccatatagcctctgctgcaaatgctcagccctgctgttgtaatgtaaaagctgccacagacactacatgaacacgaatgagtgtggctggtgttccaataaaactttatttacacaaacgggtggcccttttgggctgtagtttgtcaacccttgctctaacccttgactgagagctactttattaagccctgagggcaggagctatcccaatttgtgttccccagggcaccaaaacacagtgcttggcatagagtaggcactcaacaagtgtgtgaacagatggagagccagccctagtcagtgcactcaccctttgaggctctggttcctccaaacaatgattcgttgtctggattggctggaactgtcacccccgcaattctactccccacccacccatgtgaccttaatgtcagttgctggtctgttgctcttcggggagggagagatggcctggatacagagctaagcaaatgcttctttaagggcccttaaaagtgaaaagtaacttgcaagaggttgagatccttctgagctaggagaacttattccacctcagcctcccaaagcattggggttacaggcgtgagccactgcacctggccctgttttcatggcttttatttcctttcatcccacacatttgtctgcagtactagacatgttttacaaatcaacaagtttacacaagtatatgcagcttgttttggggggaaaggagacaaaatatgcatattttctgtgtggatttgtgcctcttaattgtgtttctagtctctaaggtgaccctttaacctactcaagatggggcccagagaagtggcctgcgttacagatttattttggcatatgtactaagttccattttctctttacaaataaagtgttttctttcttttctgtctcagactcaaa

SEQ ID NO: 451216 - DNA, 5335 bp, Homo sapiens
  misc_feature (2983)..(2983): n is a, c, g, or t
tgtccagtaactctggctgtgccggatactgcttgggtaaaacgggcaccccaggaacatggcagacgaagacctcatcttccgcctggaaggtgttgatggcggccagtccccccgagctggccatgatggtgattctgatggggacagcgacgatgaggaaggttacttcatctgccccatcacggatgacccaagctcgaaccagaatgtcaattccaaggttaataagtactacagcaacctaacaaaaagtgagcggtatagctccagcgggtccccggcaaactccttccacttcaaggaagcctggaagcacgcaatccagaaggccaagcacatgcccgacccctgggctgagttccacctggaagatattgccaccgaacgtgctactcgacacaggtacaacgccgtcaccggggaatggctggatgatgaagttctgatcaagatggcatctcagcccttcggccgaggagcaatgagggagtgcttccggacgaagaagctctccaacttcttgcatgcccagcagtggaagggcgcctccaactacgtggcgaagcgctacatcgagcccgtagaccgggatgtgtactttgaggacgtgcgtctacagatggaggccaagctctggggggaggagtataatcggcacaagccccccaagcaggtggacatcatgcagatgtgcatcatcgagctgaaggacagaccgggcaagcccctcttccacctggagcactacatcgagggcaagtacatcaagtacaactccaactctggctttgtccgcgatgacaacatccgcctgacgccgcaggccttcagccacttcacttttgagcgttccggccatcagctgatagtggtggacatccagggagttggggatctctacactgacccacagatccacacggagacgggcactgactttggagacggcaacctaggtgtccgcgggatggcgctcttcttctactctcatgcctgcaaccggatttgcgagagcatgggccttgctccctttgacctctcgccccgggagagggatgcagtgaatcagaacaccaagctgctgcaatcagccaagaccatcttgagaggaacagaggaaaaatgtgggagcccccgagtaaggaccctctctgggagccggccacccctgctccgtcccctttcagagaactctggagacgagaacatgagcgacgtgaccttcgactctctcccttcttccccatcttcggccacaccacacagccagaagctagaccacctccattggccagtgttcagtgacctcgataacatggcatccagagaccatgatcatctagacaaccaccgggagtctgagaatagtggggacagcggataccccagtgagaagcggggtgagctggatgaccctgagccccgagaacatggccactcatacagtaatcggaagtacgagtctgacgaagacagcctgggcagctctggacgggtatgtgtagagaagtggaatctcctcaactcctcccgcctccacctgccgagggcttcggccgtggccctggaagtgcaaaggcttaatgctctggacctcgaaaagaaaatcgggaagtccattttggggaaggtccatctggccatggtgcgctaccacgagggtgggcgcttctgcgagaagggcgaggagtgggaccaggagtcggctgtcttccacctggagcacgcagccaacctgggcgagctggaggccatcgtgggcctgggactcatgtactcgcagttgcctcatcacatcctagccgatgtctctctgaaggagacagaagagaacaaaaccaaaggatttgattacttactaaaggccgctgaagctggcgacaggcagtccatgatcctagtggcgcgagcttttgactctggccagaacctcagcccggacaggtgccaagactggctagaggccctgcactggtacaacactgccctggagatgacggactgtgatgagggcggtgagtacgacggaatgcaggacgagccccggtacatgatgctggccagggaggccgagatgctgttcacaggaggctacgggctggagaaggacccgcagagatcaggggacttgtatacccaggcagcagaggcagcgatggaagccatgaagggccgactggccaaccagtactaccaaaaggctgaagaggcctgggcccagatggaggagtaaccaggaaaatcactgccggctagtcccaagcaaacgggctaggaggaaagattaaaaaaacaacaacaacaacttatttagtttggggaggggaagcatttttaagtgtgttgtaaaatcaaattttatatttcattttttgactcttgaaaaatgtctttgctccttggcagctaccagcagagactctatagctgtctcttagggcagtattttggggaagtggggcttgaagaagcagcctaatgaaccaacataccgttttgtgtgtggttttttttgtttgtttgtttgtttgttttgagacagagtcttgctctgtcacccaggctggagtgcagtgacatgatcttagctcactgcaacctccgcctcctgggttcaagtgattctcctgcctcagcctcccaagtagctgggattactggtgcacaccaccacactcagctaatttttgcatttttagtagagatggggtttcaccatgttggccaggctggtctcgaactcctaacctcaggtgatccacctgcctcagcctcccaaagtgctgggattacaggtgtgagccaccatgcctgcccattttgtggttctattttcatttttatttctttttttttttgtcacgagatataagaaagtgctttttgccttgaatggacaattttagggctgtgctcactagtcttttcaggctggactgaaatgtcgggcccatggagccctgtgttttgtgcatcgggntgagaaatgaagcacttcacgctggctttcctaagtcacggggcgtgtattgccgtggcttagtgcaaagcattctttctcagagcatttagaggcatgcgtggcattttttcagtgggtgtgagattgcacaatacccaggctcccttctactgtggggaagggcctgcatgttggctgttttttaaacttctagttcaatttccttccataatgctactgattttctggcatacagccgaattccatcttttaagcatgctttctacggtgggcttttcaaaacaggtttgagttttgtatgcacacgtttactacctctaactcctacatcagctagtgtggaagagggtgcacctcaaagcttttacacgtaaggacagcggcttggaatgtgagagccttttctccaagcagacccacactctgcatctcagtggcagctcccacaacgtgactgcaatgtctcttatacagtattccttggtgttttcttagtgtctggatgttcttacgtgaaatctgctccccagccctggtccttggcattttctgcttgaagctgggctgattttcttgtaatttacagcaggacgctttcagcagcagtctcttgggattttatctaagatgtttgaggatgagagggcaagaactataaacactcattaattctagtagtctccccatggccagacaatggcgattgttatttaatgagcttttcctttcaatggaattcagctctcacattagtatgatttcatttgatgtttcaaatagcaaagatgctaggtgcggtggctcccgcctgtaatctcagcactttgaggagggccaaggtgggaggattgcttgagccaggctggtctcgaactcctggacttaagtgagcctcccgcctcagtctcccaaagcgctgggattacaggcaggagccactgagcccagccaagacttcagtgttgactgctttggaggcacaaacccatgcaagcgttagttccaaagttcagtgtgtacccttaaatgaacaatgaagcaggtaaaattacccttgaaaaaaatcccttggaccacccataaatgacagtgactttttcaatatggactcatcatagccagttttccttttgaagttggaactgatcacccttttgtcatctgtaccagatcagtagttggcttgtgttacattttgtgtgtgtgtgtgcgtgttttaaaccagtgcatataaattgtatgttaaatgtaagtaactttaagttgacttatctcttcacagtaatcaagcctcacgtaattcatgctttttaaattcagccagccccccctctctgaaattttattatgtaaataatttgtgttccctgatcactcgtttaagttcttagttgtatgtcatctcttctctagcaggaattggcaaacttttttgtaaaggggtagaaagtgaagattttaggctttgcaggccatatagcctctgctgcaaatgctcagccctgctgttgtaatgtaaaagctgccacagacactacatgaacacgaatgagtgtggctggtgttccaataaaactttatttacacaaacgggtggcccttttgggctgtagtttgtcaacccttgctctaacccttgactgagagctactttattaagccctgagggcaggagctatcccaatttgtgttccccagggcaccaaaacacagtgcttggcatagagtaggcactcaacaagtgtgtgaacagatggagagccagccctagtcagtgcactcaccctttgaggctctggttcctccaaacaatgattcgttgtctggattggctggaactgtcacccccgcaattctactccccacccacccatgtgaccttaatgtcagttgctggtctgttgctcttcggggagggagagatggcctggatacagagctaagcaaatgcttctttaagggcccttaaaagtgaaaagtaacttgcaagaggttgagatccttctgagctaggagaacttattccactgcacctggccctgttttcatggcttttatttcctttcatcccacacatttgtctgcagtactagacatgttttacaaatcaacaagtttacacaagtatatgcagcttgttttggggggaaaggagacaaaatatgcatattttctgtgtggatttgtgcctcttaattgtgtttctagtctctaaggtgaccctttaacctactcaagatggggcccagagaagtggcctgcgttacagatttattttggcatatgtactaagttccattttctctttacaaataaagtgttttctttcttttctgtctcagactcaaa

SEQ ID NO: 451217 - DNA, 5196 bp, Homo sapiens
  misc_feature (2983)..(2983): n is a, c, g, or t
tgtccagtaactctggctgtgccggatactgcttgggtaaaacgggcaccccaggaacatggcagacgaagacctcatcttccgcctggaaggtgttgatggcggccagtccccccgagctggccatgatggtgattctgatggggacagcgacgatgaggaaggttacttcatctgccccatcacggatgacccaagctcgaaccagaatgtcaattccaaggttaataagtactacagcaacctaacaaaaagtgagcggtatagctccagcgggtccccggcaaactccttccacttcaaggaagcctggaagcacgcaatccagaaggccaagcacatgcccgacccctgggctgagttccacctggaagatattgccaccgaacgtgctactcgacacaggtacaacgccgtcaccggggaatggctggatgatgaagttctgatcaagatggcatctcagcccttcggccgaggagcaatgagggagtgcttccggacgaagaagctctccaacttcttgcatgcccagcagtggaagggcgcctccaactacgtggcgaagcgctacatcgagcccgtagaccgggatgtgtactttgaggacgtgcgtctacagatggaggccaagctctggggggaggagtataatcggcacaagccccccaagcaggtggacatcatgcagatgtgcatcatcgagctgaaggacagaccgggcaagcccctcttccacctggagcactacatcgagggcaagtacatcaagtacaactccaactctggctttgtccgcgatgacaacatccgcctgacgccgcaggccttcagccacttcacttttgagcgttccggccatcagctgatagtggtggacatccagggagttggggatctctacactgacccacagatccacacggagacgggcactgactttggagacggcaacctaggtgtccgcgggatggcgctcttcttctactctcatgcctgcaaccggatttgcgagagcatgggccttgctccctttgacctctcgccccgggagagggatgcagtgaatcagaacaccaagctgctgcaatcagccaagaccatcttgagaggaacagaggaaaaatgtgggagcccccgagtaaggaccctctctgggagccggccacccctgctccgtcccctttcagagaactctggagacgagaacatgagcgacgtgaccttcgactctctcccttcttccccatcttcggccacaccacacagccagaagctagaccacctccattggccagtgttcagtgacctcgataacatggcatccagagaccatgatcatctagacaaccaccgggagtctgagaatagtggggacagcggataccccagtgagaagcggggtgagctggatgaccctgagccccgagaacatggccactcatacagtaatcggaagtacgagtctgacgaagacagcctgggcagctctggacgggtatgtgtagagaagtggaatctcctcaactcctcccgcctccacctgccgagggcttcggccgtggccctggaagtgcaaaggcttaatgctctggacctcgaaaagaaaatcgggaagtccattttggggaaggtccatctggccatggtgcgctaccacgagggtgggcgcttctgcgagaagggcgaggagtgggaccaggagtcggctgtcttccacctggagcacgcagccaacctgggcgagctggaggccatcgtgggcctgggactcatgtactcgcagttgcctcatcacatcctagccgatgtctctctgaaggagacagaagagaacaaaaccaaaggatttgattacttactaaaggccgctgaagctggcgacaggcagtccatgatcctagtggcgcgagcttttgactctggccagaacctcagcccggacaggtgccaagactggctagaggccctgcactggtacaacactgccctggagatgacggactgtgatgagggcggtgagtacgacggaatgcaggacgagccccggtacatgatgctggccagggaggccgagatgctgttcacaggaggctacgggctggagaaggacccgcagagatcaggggacttgtatacccaggcagcagaggcagcgatggaagccatgaagggccgactggccaaccagtactaccaaaaggctgaagaggcctgggcccagatggaggagtaaccaggaaaatcactgccggctagtcccaagcaaacgggctaggaggaaagattaaaaaaacaacaacaacaacttatttagtttggggaggggaagcatttttaagtgtgttgtaaaatcaaattttatatttcattttttgactcttgaaaaatgtctttgctccttggcagctaccagcagagactctatagctgtctcttagggcagtattttggggaagtggggcttgaagaagcagcctaatgaaccaacataccgttttgtgtgtggttttttttgtttgtttgtttgtttgttttgagacagagtcttgctctgtcacccaggctggagtgcagtgacatgatcttagctcactgcaacctccgcctcctgggttcaagtgattctcctgcctcagcctcccaagtagctgggattactggtgcacaccaccacactcagctaatttttgcatttttagtagagatggggtttcaccatgttggccaggctggtctcgaactcctaacctcaggtgatccacctgcctcagcctcccaaagtgctgggattacaggtgtgagccaccatgcctgcccattttgtggttctattttcatttttatttctttttttttttgtcacgagatataagaaagtgctttttgccttgaatggacaattttagggctgtgctcactagtcttttcaggctggactgaaatgtcgggcccatggagccctgtgttttgtgcatcgggntgagaaatgaagcacttcacgctggctttcctaagtcacggggcgtgtattgccgtggcttagtgcaaagcattctttctcagagcatttagaggcatgcgtggcattttttcagtgggtgtgagattgcacaatacccaggctcccttctactgtggggaagggcctgcatgttggctgttttttaaacttctagttcaatttccttccataatgctactgattttctggcatacagccgaattccatcttttaagcatgctttctacggtgggcttttcaaaacaggtttgagttttgtatgcacacgtttactacctctaactcctacatcagctagtgtggaagagggtgcacctcaaagcttttacacgtaaggacagcggcttggaatgtgagagccttttctccaagcagacccacactctgcatctcagtggcagctcccacaacgtgactgcaatgtctcttatacagtattccttggtgttttcttagtgtctggatgttcttacgtgaaatctgctccccagccctggtccttggcattttctgcttgaagctgggctgattttcttgtaatttacagcaggacgctttcagcagcagtctcttgggattttatctaagatgtttgaggatgagagggcaagaactataaacactcattaattctagtagtctccccatggccagacaatggcgattgttatttaatgagcttttcctttcaatggaattcagctctcacattagtatgatttcatttgatgtttcaaatagcaaagatgggcaggagccactgagcccagccaagacttcagtgttgactgctttggaggcacaaacccatgcaagcgttagttccaaagttcagtgtgtacccttaaatgaacaatgaagcaggtaaaattacccttgaaaaaaatcccttggaccacccataaatgacagtgactttttcaatatggactcatcatagccagttttccttttgaagttggaactgatcacccttttgtcatctgtaccagatcagtagttggcttgtgttacattttgtgtgtgtgtgtgcgtgttttaaaccagtgcatataaattgtatgttaaatgtaagtaactttaagttgacttatctcttcacagtaatcaagcctcacgtaattcatgctttttaaattcagccagccccccctctctgaaattttattatgtaaataatttgtgttccctgatcactcgtttaagttcttagttgtatgtcatctcttctctagcaggaattggcaaacttttttgtaaaggggtagaaagtgaagattttaggctttgcaggccatatagcctctgctgcaaatgctcagccctgctgttgtaatgtaaaagctgccacagacactacatgaacacgaatgagtgtggctggtgttccaataaaactttatttacacaaacgggtggcccttttgggctgtagtttgtcaacccttgctctaacccttgactgagagctactttattaagccctgagggcaggagctatcccaatttgtgttccccagggcaccaaaacacagtgcttggcatagagtaggcactcaacaagtgtgtgaacagatggagagccagccctagtcagtgcactcaccctttgaggctctggttcctccaaacaatgattcgttgtctggattggctggaactgtcacccccgcaattctactccccacccacccatgtgaccttaatgtcagttgctggtctgttgctcttcggggagggagagatggcctggatacagagctaagcaaatgcttctttaagggcccttaaaagtgaaaagtaacttgcaagaggttgagatccttctgagctaggagaacttattccactgcacctggccctgttttcatggcttttatttcctttcatcccacacatttgtctgcagtactagacatgttttacaaatcaacaagtttacacaagtatatgcagcttgttttggggggaaaggagacaaaatatgcatattttctgtgtggatttgtgcctcttaattgtgtttctagtctctaaggtgaccctttaacctactcaagatggggcccagagaagtggcctgcgttacagatttattttggcatatgtactaagttccattttctctttacaaataaagtgttttctttcttttctgtctcagactcaaa

SEQ ID NO: 451218 - DNA, 4633 bp, Homo sapiens
  misc_feature (2983)..(2983): n is a, c, g, or t
  misc_feature (4610)..(4610): n is a, c, g, or t
tgtccagtaactctggctgtgccggatactgcttgggtaaaacgggcaccccaggaacatggcagacgaagacctcatcttccgcctggaaggtgttgatggcggccagtccccccgagctggccatgatggtgattctgatggggacagcgacgatgaggaaggttacttcatctgccccatcacggatgacccaagctcgaaccagaatgtcaattccaaggttaataagtactacagcaacctaacaaaaagtgagcggtatagctccagcgggtccccggcaaactccttccacttcaaggaagcctggaagcacgcaatccagaaggccaagcacatgcccgacccctgggctgagttccacctggaagatattgccaccgaacgtgctactcgacacaggtacaacgccgtcaccggggaatggctggatgatgaagttctgatcaagatggcatctcagcccttcggccgaggagcaatgagggagtgcttccggacgaagaagctctccaacttcttgcatgcccagcagtggaagggcgcctccaactacgtggcgaagcgctacatcgagcccgtagaccgggatgtgtactttgaggacgtgcgtctacagatggaggccaagctctggggggaggagtataatcggcacaagccccccaagcaggtggacatcatgcagatgtgcatcatcgagctgaaggacagaccgggcaagcccctcttccacctggagcactacatcgagggcaagtacatcaagtacaactccaactctggctttgtccgcgatgacaacatccgcctgacgccgcaggccttcagccacttcacttttgagcgttccggccatcagctgatagtggtggacatccagggagttggggatctctacactgacccacagatccacacggagacgggcactgactttggagacggcaacctaggtgtccgcgggatggcgctcttcttctactctcatgcctgcaaccggatttgcgagagcatgggccttgctccctttgacctctcgccccgggagagggatgcagtgaatcagaacaccaagctgctgcaatcagccaagaccatcttgagaggaacagaggaaaaatgtgggagcccccgagtaaggaccctctctgggagccggccacccctgctccgtcccctttcagagaactctggagacgagaacatgagcgacgtgaccttcgactctctcccttcttccccatcttcggccacaccacacagccagaagctagaccacctccattggccagtgttcagtgacctcgataacatggcatccagagaccatgatcatctagacaaccaccgggagtctgagaatagtggggacagcggataccccagtgagaagcggggtgagctggatgaccctgagccccgagaacatggccactcatacagtaatcggaagtacgagtctgacgaagacagcctgggcagctctggacgggtatgtgtagagaagtggaatctcctcaactcctcccgcctccacctgccgagggcttcggccgtggccctggaagtgcaaaggcttaatgctctggacctcgaaaagaaaatcgggaagtccattttggggaaggtccatctggccatggtgcgctaccacgagggtgggcgcttctgcgagaagggcgaggagtgggaccaggagtcggctgtcttccacctggagcacgcagccaacctgggcgagctggaggccatcgtgggcctgggactcatgtactcgcagttgcctcatcacatcctagccgatgtctctctgaaggagacagaagagaacaaaaccaaaggatttgattacttactaaaggccgctgaagctggcgacaggcagtccatgatcctagtggcgcgagcttttgactctggccagaacctcagcccggacaggtgccaagactggctagaggccctgcactggtacaacactgccctggagatgacggactgtgatgagggcggtgagtacgacggaatgcaggacgagccccggtacatgatgctggccagggaggccgagatgctgttcacaggaggctacgggctggagaaggacccgcagagatcaggggacttgtatacccaggcagcagaggcagcgatggaagccatgaagggccgactggccaaccagtactaccaaaaggctgaagaggcctgggcccagatggaggagtaaccaggaaaatcactgccggctagtcccaagcaaacgggctaggaggaaagattaaaaaaacaacaacaacaacttatttagtttggggaggggaagcatttttaagtgtgttgtaaaatcaaattttatatttcattttttgactcttgaaaaatgtctttgctccttggcagctaccagcagagactctatagctgtctcttagggcagtattttggggaagtggggcttgaagaagcagcctaatgaaccaacataccgttttgtgtgtggttttttttgtttgtttgtttgtttgttttgagacagagtcttgctctgtcacccaggctggagtgcagtgacatgatcttagctcactgcaacctccgcctcctgggttcaagtgattctcctgcctcagcctcccaagtagctgggattactggtgcacaccaccacactcagctaatttttgcatttttagtagagatggggtttcaccatgttggccaggctggtctcgaactcctaacctcaggtgatccacctgcctcagcctcccaaagtgctgggattacaggtgtgagccaccatgcctgcccattttgtggttctattttcatttttatttctttttttttttgtcacgagatataagaaagtgctttttgccttgaatggacaattttagggctgtgctcactagtcttttcaggctggactgaaatgtcgggcccatggagccctgtgttttgtgcatcgggntgagaaatgaagcacttcacgctggctttcctaagtcacggggcgtgtattgccgtggcttagtgcaaagcattctttctcagagcatttagaggcatgcgtggcattttttcagtgggtgtgagattgcacaatacccaggctcccttctactgtggggaagggcctgcatgttggctgttttttaaacttctagttcaatttccttccataatgctactgattttctggcatacagccgaattccatcttttaagcatgctttctacggtgggcttttcaaaacaggtttgagttttgtatgcacacgtttactacctctaactcctacatcagctagtgtggaagagggtgcacctcaaagcttttacacgtaaggacagcggcttggaatgtgagagccttttctccaagcagacccacactctgcatctcagtggcagctcccacaacgtgactgcaatgtctcttatacagtattccttggtgttttcttagtgtctggatgttcttacgtgaaatctgctccccagccctggtccttggcattttctgcttgaagctgggctgattttcttgtaatttacagcaggacgctttcagcagcagtctcttgggattttatctaagatgtttgaggatgagagggcaagaactataaacactcattaattctagtagtctccccatggccagacaatggcgattgttatttaatgagcttttcctttcaatggaattcagctctcacattagtatgatttcatttgatgtttcaaatagcaaagatgctaggtgcggtggctcccgcctgtaatctcagcactttgaggagggccaaggtgggaggattgcttgagctcaggacttcaagaccagcctgggtaaacatggcgagaccctgtctctaccaaaacaacaaaaaaaagacagactgctttgatcaaccctaaatgcaaaagcagcctatttttctttgtttaaaagtcaaaacataaaaaagcagagtataacatacaaaccattcttaactattcattaaaatgggtccttcaacaccttagtggggtttgttgttgttgcttatgcagagagattattttctttttattattttataatttttgaaatagagatggggtctcactgtgttgcccaggctggtctcgaactcctggacttaagtgagcctcccgcctcagtctcccaaagcgctgggattacaggcaggagccactgagcccagccaagacttcagtgttgactgctttggaggcacaaacccatgcaagcgttagttccaaagttcagtgtgtacccttaaatgaacaatgaagcaggtaaaattacccttgaaaaaaatcccttggaccacccataaatgacagtgactttttcaatatggactcatcatagccagttttccttttgaagttggaactgatcacccttttgtcatctgtaccagatcagtagttggcttgtgttacattttgtgtgtgtgtgtgcgtgttttaaaccagtgcatataaattgtatgttaaatgtaagtaactttaagttgacttatctcttcacagtaatcaagcctcacgtaattcatgctttttaaattccgcaaagaccncaaaagggtatctctctagactc

SEQ ID NO: 451219 - DNA, 2565 bp, Homo sapiens
tgtccagtaactctggctgtgccggatactgcttgggtaaaacgggcaccccaggaacatggcagacgaagacctcatcttccgcctggaaggtgttgatggcggccagtccccccgagctggccatgatggtgattctgatggggacagcgacgatgaggaaggttacttcatctgccccatcacggatgacccaagctcgaaccagaatgtcaattccaaggttaataagtactacagcaacctaacaaaaagtgagcggtatagctccagcgggtccccggcaaactccttccacttcaaggaagcctggaagcacgcaatccagaaggccaagcacatgcccgacccctgggctgagttccacctggaagatattgccaccgaacgtgctactcgacacaggtacaacgccgtcaccggggaatggctggatgatgaagttctgatcaagatggcatctcagcccttcggccgaggagcaatgagggagtgcttccggacgaagaagctctccaacttcttgcatgcccagcagtggaagggcgcctccaactacgtggcgaagcgctacatcgagcccgtagaccgggatgtgtactttgaggacgtgcgtctacagatggaggccaagctctggggggaggagtataatcggcacaagccccccaagcaggtggacatcatgcagatgtgcatcatcgagctgaaggacagaccgggcaagcccctcttccacctggagcactacatcgagggcaagtacatcaagtacaactccaactctggctttgtccgcgatgacaacatccgcctgacgccgcaggccttcagccacttcacttttgagcgttccggccatcagctgatagtggtggacatccagggagttggggatctctacactgacccacagatccacacggagacgggcactgactttggagacggcaacctaggtgtccgcgggatggcgctcttcttctactctcatgcctgcaaccggatttgcgagagcatgggccttgctccctttgacctctcgccccgggagagggatgcagtgaatcagaacaccaagctgctgcaatcagccaagaccatcttgagaggaacagaggaaaaatgtgggagcccccgagtaaggaccctctctgggagccggccacccctgctccgtcccctttcagagaactctggagacgagaacatgagcgacgtgaccttcgactctctcccttcttccccatcttcggccacaccacacagccagaagctagaccacctccattggccagtgttcagtgacctcgataacatggcatccagagaccatgatcatctagacaaccaccgggagtctgagaatagtggggacagcggataccccagtgagaagcggggtgagctggatgaccctgagccccgagaacatggccactcatacagtaatcggaagtacgagtctgacgaagacagcctgggcagctctggacgggtatgtgtagagaagtggaatctcctcaactcctcccgcctccacctgccgagggcttcggccgtggccctggaagtgcaaaggcttaatgctctggacctcgaaaagaaaatcgggaagtccattttggggaaggtccatctggccatggtgcgctaccacgagggtgggcgcttctgcgagaagggcgaggagtgggaccaggagtcggctgtcttccacctggagcacgcagccaacctgggcgagctggaggccatcgtgggcctgggactcatgtactcgcagttgcctcatcacatcctagccgatgtctctctgaaggagacagaagagaacaaaaccaaaggatttgattacttactaaaggccgctgaagctggcgacaggcagtccatgatcctagtggcgcgagcttttgactctggccagaacctcagcccggacaggtgccaagactggctagaggccctgcactggtacaacactgccctggagatgacggactgtgatgagggcggtgagtacgacggaatgcaggacgagccccggtacatgatgctggccagggaggccgagatgctgttcacaggaggctacgggctggagaaggacccgcagagatcaggggacttgtatacccaggcagcagaggcagcgatggaagccatgaagggccgactggccaaccagtactaccaaaaggctgaagaggcctgggcccagatggaggagtaaccaggaaaatcactgccggctagtcccaagcaaacgggctaggaggaaagattaaaaaaacaacaacaacaacttatttagtttggggaggggaagcatttttaagtgtgttgtaaaatcaaattttatatttcattttttgactcttgaaaaatgtctttgctccttggcagctaccagcagagactctatagctgtctcttagggcagtattttggggaagtggggcttgaagaagcagcctaatgaaccaacataccgttttgtgtgtggttttttttgtttgtttgtttgtttgttttgagactccatctcaaaaaaaagaagaa

SEQ ID NO: 451220 - DNA, 2396 bp, Homo sapiens
tgtccagtaactctggctgtgccggatactgcttgggtaaaacgggcaccccaggaacatggcagacgaagacctcatcttccgcctggaaggtgttgatggcggccagtccccccgagctggccatgatggtgattctgatggggacagcgacgatgaggaaggttacttcatctgccccatcacggatgacccaagctcgaaccagaatgtcaattccaaggttaataagtactacagcaacctaacaaaaagtgagcggtatagctccagcgggtccccggcaaactccttccacttcaaggaagcctggaagcacgcaatccagaaggccaagcacatgcccgacccctgggctgagttccacctggaagatattgccaccgaacgtgctactcgacacaggtacaacgccgtcaccggggaatggctggatgatgaagttctgatcaagatggcatctcagcccttcggccgaggagcaatgagggagtgcttccggacgaagaagctctccaacttcttgcatgcccagcagtggaagggcgcctccaactacgtggcgaagcgctacatcgagcccgtagaccgggatgtgtactttgaggacgtgcgtctacagatggaggccaagctctggggggaggagtataatcggcacaagccccccaagcaggtggacatcatgcagatgtgcatcatcgagctgaaggacagaccgggcaagcccctcttccacctggagcactacatcgagggcaagtacatcaagtacaactccaactctggctttgtccgcgatgacaacatccgcctgacgccgcaggccttcagccacttcacttttgagcgttccggccatcagctgatagtggtggacatccagggagttggggatctctacactgacccacagatccacacggagacgggcactgactttggagacggcaacctaggtgtccgcgggatggcgctcttcttctactctcatgcctgcaaccggatttgcgagagcatgggccttgctccctttgacctctcgccccgggagagggatgcagtgaatcagaacaccaagctgctgcaatcagccaagaccatcttgagaggaacagaggaaaaatgtgggagcccccgagtaaggaccctctctgggagccggccacccctgctccgtcccctttcagagaactctggagacgagaacatgagcgacgtgaccttcgactctctcccttcttccccatcttcggccacaccacacagccagaagctagaccacctccattggccagtgttcagtgacctcgataacatggcatccagagaccatgatcatctagacaaccaccgggagtctgagaatagtggggacagcggataccccagtgagaagcggggtgagctggatgaccctgagccccgagaacatggccactcatacagtaatcggaagtacgagtctgacgaagacagcctgggcagctctggacgggtatgtgtagagaagtggaatctcctcaactcctcccgcctccacctgccgagggcttcggccgtggccctggaagtgcaaaggcttaatgctctggacctcgaaaagaaaatcgggaagtccattttggggaaggtccatctggccatggtgcgctaccacgagggtgggcgcttctgcgagaagggcgaggagtgggaccaggagtcggctgtcttccacctggagcacgcagccaacctgggcgagctggaggccatcgtgggcctgggactcatgtactcgcagttgcctcatcacatcctagccgatgtctctctgaaggagacagaagagaacaaaaccaaaggatttgattacttactaaaggccgctgaagctggcgacaggcagtccatgatcctagtggcgcgagcttttgactctggccagaacctcagcccggacaggtgccaagactggctagaggccctgcactggtacaacactgccctggagatgacggactgtgatgagggcggtgagtacgacggaatgcaggacgagccccggtacatgatgctggccagggaggccgagatgctgttcacaggaggctacgggctggagaaggacccgcagagatcaggggacttgtatacccaggcagcagaggcagcgatggaagccatgaaggccgttccgcctcccctcgttcacctcatagagcagtcatggcttttcctcatcactcccctctacagtgcctggtagtcaagtgttgcatcgaacaacccggacctcttgttaagacttgtcctgtagctcgatatttcagatgtgctagtgagggcaatcaggtgaaggctgtctgcccagacaaataagtaatttatataagtgaatctttttcataaat

SEQ ID NO: 451221 - DNA, 1144 bp, Homo sapiens
tgtccagtaactctggctgtgccggatactgcttgggtaaaacgggcaccccaggaacatggcagacgaagacctcatcttccgcctggaaggtgttgatggcggccagtccccccgagctggccatgatggtgattctgatggggacagcgacgatgaggaaggttacttcatctgccccatcacggatgacccaagctcgaaccagaatgtcaattccaaggttaataagtactacagcaacctaacaaaaagtgagcggtatagctccagcgggtccccggcaaactccttccacttcaaggaagcctggaagcacgcaatccagaaggccaagcacatgcccgacccctgggctgagttccacctggaagatattgccaccgaacgtgctactcgacacaggtacaacgccgtcaccggggaatggctggatgatgaagttctgatcaagatggcatctcagcccttcggccgaggagcaatgagggagtgcttccggacgaagaagctctccaacttcttgcatgcccagcagtggaagggcgcctccaactacgtggcgaagcgctacatcgagcccgtagaccgggatgtgtactttgaggacgtgcgtctacagatggaggccaagctctggggggaggagtataatcggcacaagccccccaagcaggtggacatcatgcagatgtgcatcatcgagctgaaggacagaccgggcaagcccctcttccacctggagcactacatcgagggcaagtacatcaagtacaactccaactctggctttgtccgcgatgacaacatccgcctgacgccgcaggtgaggccgagctcacctccaccctctgcccaccacagcccttggggtgagatcctggccaggctcagcccctaaagaggaaggtccctgtgggcttggagtctcacccccagagaagcctcttggagcattcagaaggagacccgtcaccccatgacagcttctgtcacctaaggtggccacaggacctgcagcccaaggtccctgcccaactgaagaggcctttttcctttgtcttttcctctatataactccttgaagagaaagcccctcagcatgggcagaggcgtggccagtgcctgcacagacctcagcctg

SEQ ID NO: 451222 - DNA, 536 bp, Homo sapiens
aggggttgcttggttagagggaacaacaggaagagccctttaattcccagagggtgtgtgcgtgacatgagtatccctattaatgtccctagcaatcagccaagaccatcttgagaggaacagaggaaaaatgtgggagcccccgagtaaggaccctctctgggagccggccacccctgctccgtcccctttcagagaactctggagacgagaacatgagcgacgtgaccttcgactctctcccttcttccccatcttcggccacaccacacagccagaagctagaccacctccgtgagtgacggttcggtccctagtcactgtgattggaggggacaggtggagcagagctaaaccagctttcatttatgttagaaaaatcagacatgctaatcgaaaaggttcatggccccagtggttttataggtgagtttcattgagtgaactttcaaaacagatcatccaaatgctataaaaacaacccctattgtaggaaacaaagtaacttttatcagtgtgttttatgaaaccagcaa

SEQ ID NO: 451223 - DNA, 5630 bp, Homo sapiens
  misc_feature (2983)..(2983): n is a, c, g, or t
tgtccagtaactctggctgtgccggatactgcttgggtaaaacgggcaccccaggaacatggcagacgaagacctcatcttccgcctggaaggtgttgatggcggccagtccccccgagctggccatgatggtgattctgatggggacagcgacgatgaggaaggttacttcatctgccccatcacggatgacccaagctcgaaccagaatgtcaattccaaggttaataagtactacagcaacctaacaaaaagtgagcggtatagctccagcgggtccccggcaaactccttccacttcaaggaagcctggaagcacgcaatccagaaggccaagcacatgcccgacccctgggctgagttccacctggaagatattgccaccgaacgtgctactcgacacaggtacaacgccgtcaccggggaatggctggatgatgaagttctgatcaagatggcatctcagcccttcggccgaggagcaatgagggagtgcttccggacgaagaagctctccaacttcttgcatgcccagcagtggaagggcgcctccaactacgtggcgaagcgctacatcgagcccgtagaccgggatgtgtactttgaggacgtgcgtctacagatggaggccaagctctggggggaggagtataatcggcacaagccccccaagcaggtggacatcatgcagatgtgcatcatcgagctgaaggacagaccgggcaagcccctcttccacctggagcactacatcgagggcaagtacatcaagtacaactccaactctggctttgtccgcgatgacaacatccgcctgacgccgcaggccttcagccacttcacttttgagcgttccggccatcagctgatagtggtggacatccagggagttggggatctctacactgacccacagatccacacggagacgggcactgactttggagacggcaacctaggtgtccgcgggatggcgctcttcttctactctcatgcctgcaaccggatttgcgagagcatgggccttgctccctttgacctctcgccccgggagagggatgcagtgaatcagaacaccaagctgctgcaatcagccaagaccatcttgagaggaacagaggaaaaatgtgggagcccccgagtaaggaccctctctgggagccggccacccctgctccgtcccctttcagagaactctggagacgagaacatgagcgacgtgaccttcgactctctcccttcttccccatcttcggccacaccacacagccagaagctagaccacctccattggccagtgttcagtgacctcgataacatggcatccagagaccatgatcatctagacaaccaccgggagtctgagaatagtggggacagcggataccccagtgagaagcggggtgagctggatgaccctgagccccgagaacatggccactcatacagtaatcggaagtacgagtctgacgaagacagcctgggcagctctggacgggtatgtgtagagaagtggaatctcctcaactcctcccgcctccacctgccgagggcttcggccgtggccctggaagtgcaaaggcttaatgctctggacctcgaaaagaaaatcgggaagtccattttggggaaggtccatctggccatggtgcgctaccacgagggtgggcgcttctgcgagaagggcgaggagtgggaccaggagtcggctgtcttccacctggagcacgcagccaacctgggcgagctggaggccatcgtgggcctgggactcatgtactcgcagttgcctcatcacatcctagccgatgtctctctgaaggagacagaagagaacaaaaccaaaggatttgattacttactaaaggccgctgaagctggcgacaggcagtccatgatcctagtggcgcgagcttttgactctggccagaacctcagcccggacaggtgccaagactggctagaggccctgcactggtacaacactgccctggagatgacggactgtgatgagggcggtgagtacgacggaatgcaggacgagccccggtacatgatgctggccagggaggccgagatgctgttcacaggaggctacgggctggagaaggacccgcagagatcaggggacttgtatacccaggcagcagaggcagcgatggaagccatgaagggccgactggccaaccagtactaccaaaaggctgaagaggcctgggcccagatggaggagtaaccaggaaaatcactgccggctagtcccaagcaaacgggctaggaggaaagattaaaaaaacaacaacaacaacttatttagtttggggaggggaagcatttttaagtgtgttgtaaaatcaaattttatatttcattttttgactcttgaaaaatgtctttgctccttggcagctaccagcagagactctatagctgtctcttagggcagtattttggggaagtggggcttgaagaagcagcctaatgaaccaacataccgttttgtgtgtggttttttttgtttgtttgtttgtttgttttgagacagagtcttgctctgtcacccaggctggagtgcagtgacatgatcttagctcactgcaacctccgcctcctgggttcaagtgattctcctgcctcagcctcccaagtagctgggattactggtgcacaccaccacactcagctaatttttgcatttttagtagagatggggtttcaccatgttggccaggctggtctcgaactcctaacctcaggtgatccacctgcctcagcctcccaaagtgctgggattacaggtgtgagccaccatgcctgcccattttgtggttctattttcatttttatttctttttttttttgtcacgagatataagaaagtgctttttgccttgaatggacaattttagggctgtgctcactagtcttttcaggctggactgaaatgtcgggcccatggagccctgtgttttgtgcatcgggntgagaaatgaagcacttcacgctggctttcctaagtcacggggcgtgtattgccgtggcttagtgcaaagcattctttctcagagcatttagaggcatgcgtggcattttttcagtgggtgtgagattgcacaatacccaggctcccttctactgtggggaagggcctgcatgttggctgttttttaaacttctagttcaatttccttccataatgctactgattttctggcatacagccgaattccatcttttaagcatgctttctacggtgggcttttcaaaacaggtttgagttttgtatgcacacgtttactacctctaactcctacatcagctagtgtggaagagggtgcacctcaaagcttttacacgtaaggacagcggcttggaatgtgagagccttttctccaagcagacccacactctgcatctcagtggcagctcccacaacgtgactgcaatgtctcttatacagtattccttggtgttttcttagtgtctggatgttcttacgtgaaatctgctccccagccctggtccttggcattttctgcttgaagctgggctgattttcttgtaatttacagcaggacgctttcagcagcagtctcttgggattttatctaagatgtttgaggatgagagggcaagaactataaacactcattaattctagtagtctccccatggccagacaatggcgattgttatttaatgagcttttcctttcaatggaattcagctctcacattagtatgatttcatttgatgtttcaaatagcaaagatgctaggtgcggtggctcccgcctgtaatctcagcactttgaggagggccaaggtgggaggattgcttgagctcaggacttcaagaccagcctgggtaaacatggcgagaccctgtctctaccaaaacaacaaaaaaaagacagactgctttgatcaaccctaaatgcaaaagcagcctatttttctttgtttaaaagtcaaaacataaaaaagcagagtataacatacaaaccattcttaactattcattaaaatgggtccttcaacaccttagtggggtttgttgttgttgcttatgcagagagattattttctttttattattttataatttttgaaatagagatggggtctcactgtgttgcccaggctggtctcgaactcctggacttaagtgagcctcccgcctcagtctcccaaagcgctgggattacaggcaggagccactgagcccagccaagacttcagtgttgactgctttggaggcacaaacccatgcaagcgttagttccaaagttcagtgtgtacccttaaatgaacaatgaagcaggtaaaattacccttgaaaaaaatcccttggaccacccataaatgacagtgactttttcaatatggactcatcatagccagttttccttttgaagttggaactgatcacccttttgtcatctgtaccagatcagtagttggcttgtgttacattttgtgtgtgtgtgtgcgtgttttaaaccagtgcatataaattgtatgttaaatgtaagtaactttaagttgacttatctcttcacagtaatcaagcctcacgtaattcatgctttttaaattcagccagccccccctctctgaaattttattatgtaaataatttgtgttccctgatcactcgtttaagttcttagttgtatgtcatctcttctctagcaggaattggcaaacttttttgtaaaggggtagaaagtgaagattttaggctttgcaggccatatagcctctgctgcaaatgctcagccctgctgttgtaatgtaaaagctgccacagacactacatgaacacgaatgagtgtggctggtgttccaataaaactttatttacacaaacgggtggcccttttgggctgtagtttgtcaacccttgctctaacccttgactgagagctactttattaagccctgagggcaggagctatcccaatttgtgttccccagggcaccaaaacacagtgcttggcatagagtaggcactcaacaagtgtgtgaacagatggagagccagccctagtcagtgcactcaccctttgaggctctggttcctccaaacaatgattcgttgtctggattggctggaactgtcacccccgcaattctactccccacccacccatgtgaccttaatgtcagttgctggtctgttgctcttcggggagggagagatggcctggatacagagctaagcaaatgcttctttaagggcccttaaaagtgaaaagtaacttgcaagaggttgagatccttctgagctaggagaacttattccactgcacctggccctgttttcatggcttttatttcctttcatcccacacatttgtctgcagtactagacatgttttacaaatcaacaagtttacacaagtatatgcagcttgttttggggggaaaggagacaaaatatgcatattttctgtgtggatttgtgcctcttaattgtgtttctagtctctaaggtgaccctttaacctactcaagatggggcccagagaagtggcctgcgttacagatttattttggcatatgtactaagttccattttctctttacaaataaagtgttttctttcttttctgtctcagactcaaa

SEQ ID NO: 451224 - DNA, 5560 bp, Homo sapiens
  misc_feature (2983)..(2983): n is a, c, g, or t
tgtccagtaactctggctgtgccggatactgcttgggtaaaacgggcaccccaggaacatggcagacgaagacctcatcttccgcctggaaggtgttgatggcggccagtccccccgagctggccatgatggtgattctgatggggacagcgacgatgaggaaggttacttcatctgccccatcacggatgacccaagctcgaaccagaatgtcaattccaaggttaataagtactacagcaacctaacaaaaagtgagcggtatagctccagcgggtccccggcaaactccttccacttcaaggaagcctggaagcacgcaatccagaaggccaagcacatgcccgacccctgggctgagttccacctggaagatattgccaccgaacgtgctactcgacacaggtacaacgccgtcaccggggaatggctggatgatgaagttctgatcaagatggcatctcagcccttcggccgaggagcaatgagggagtgcttccggacgaagaagctctccaacttcttgcatgcccagcagtggaagggcgcctccaactacgtggcgaagcgctacatcgagcccgtagaccgggatgtgtactttgaggacgtgcgtctacagatggaggccaagctctggggggaggagtataatcggcacaagccccccaagcaggtggacatcatgcagatgtgcatcatcgagctgaaggacagaccgggcaagcccctcttccacctggagcactacatcgagggcaagtacatcaagtacaactccaactctggctttgtccgcgatgacaacatccgcctgacgccgcaggccttcagccacttcacttttgagcgttccggccatcagctgatagtggtggacatccagggagttggggatctctacactgacccacagatccacacggagacgggcactgactttggagacggcaacctaggtgtccgcgggatggcgctcttcttctactctcatgcctgcaaccggatttgcgagagcatgggccttgctccctttgacctctcgccccgggagagggatgcagtgaatcagaacaccaagctgctgcaatcagccaagaccatcttgagaggaacagaggaaaaatgtgggagcccccgagtaaggaccctctctgggagccggccacccctgctccgtcccctttcagagaactctggagacgagaacatgagcgacgtgaccttcgactctctcccttcttccccatcttcggccacaccacacagccagaagctagaccacctccattggccagtgttcagtgacctcgataacatggcatccagagaccatgatcatctagacaaccaccgggagtctgagaatagtggggacagcggataccccagtgagaagcggggtgagctggatgaccctgagccccgagaacatggccactcatacagtaatcggaagtacgagtctgacgaagacagcctgggcagctctggacgggtatgtgtagagaagtggaatctcctcaactcctcccgcctccacctgccgagggcttcggccgtggccctggaagtgcaaaggcttaatgctctggacctcgaaaagaaaatcgggaagtccattttggggaaggtccatctggccatggtgcgctaccacgagggtgggcgcttctgcgagaagggcgaggagtgggaccaggagtcggctgtcttccacctggagcacgcagccaacctgggcgagctggaggccatcgtgggcctgggactcatgtactcgcagttgcctcatcacatcctagccgatgtctctctgaaggagacagaagagaacaaaaccaaaggatttgattacttactaaaggccgctgaagctggcgacaggcagtccatgatcctagtggcgcgagcttttgactctggccagaacctcagcccggacaggtgccaagactggctagaggccctgcactggtacaacactgccctggagatgacggactgtgatgagggcggtgagtacgacggaatgcaggacgagccccggtacatgatgctggccagggaggccgagatgctgttcacaggaggctacgggctggagaaggacccgcagagatcaggggacttgtatacccaggcagcagaggcagcgatggaagccatgaagggccgactggccaaccagtactaccaaaaggctgaagaggcctgggcccagatggaggagtaaccaggaaaatcactgccggctagtcccaagcaaacgggctaggaggaaagattaaaaaaacaacaacaacaacttatttagtttggggaggggaagcatttttaagtgtgttgtaaaatcaaattttatatttcattttttgactcttgaaaaatgtctttgctccttggcagctaccagcagagactctatagctgtctcttagggcagtattttggggaagtggggcttgaagaagcagcctaatgaaccaacataccgttttgtgtgtggttttttttgtttgtttgtttgtttgttttgagacagagtcttgctctgtcacccaggctggagtgcagtgacatgatcttagctcactgcaacctccgcctcctgggttcaagtgattctcctgcctcagcctcccaagtagctgggattactggtgcacaccaccacactcagctaatttttgcatttttagtagagatggggtttcaccatgttggccaggctggtctcgaactcctaacctcaggtgatccacctgcctcagcctcccaaagtgctgggattacaggtgtgagccaccatgcctgcccattttgtggttctattttcatttttatttctttttttttttgtcacgagatataagaaagtgctttttgccttgaatggacaattttagggctgtgctcactagtcttttcaggctggactgaaatgtcgggcccatggagccctgtgttttgtgcatcgggntgagaaatgaagcacttcacgctggctttcctaagtcacggggcgtgtattgccgtggcttagtgcaaagcattctttctcagagcatttagaggcatgcgtggcattttttcagtgggtgtgagattgcacaatacccaggctcccttctactgtggggaagggcctgcatgttggctgttttttaaacttctagttcaatttccttccataatgctactgattttctggcatacagccgaattccatcttttaagcatgctttctacggtgggcttttcaaaacaggtttgagttttgtatgcacacgtttactacctctaactcctacatcagctagtgtggaagagggtgcacctcaaagcttttacacgtaaggacagcggcttggaatgtgagagccttttctccaagcagacccacactctgcatctcagtggcagctcccacaacgtgactgcaatgtctcttatacagtattccttggtgttttcttagtgtctggatgttcttacgtgaaatctgctccccagccctggtccttggcattttctgcttgaagctgggctgattttcttgtaatttacagcaggacgctttcagcagcagtctcttgggattttatctaagatgtttgaggatgagagggcaagaactataaacactcattaattctagtagtctccccatggccagacaatggcgattgttatttaatgagcttttcctttcaatggaattcagctctcacattagtatgatttcatttgatgtttcaaatagcaaagatgctaggtgcggtggctcccgcctgtaatctcagcactttgaggagggccaaggtgggaggattgcttgagctcaggacttcaagaccagcctgggtaaacatggcgagaccctgtctctaccaaaacaacaaaaaaaagacagactgctttgatcaaccctaaatgcaaaagcagcctatttttctttgtttaaaagtcaaaacataaaaaagcagagtataacatacaaaccattcttaactattcattaaaatgggtccttcaacaccttagtggggtttgttgttgttgcttatgcagagagattattttctttttattattttataatttttgaaatagagatggggtctcactgtgttgcccaggctggtctcgaactcctggacttaagtgagcctcccgcctcagtctcccaaagcgctgggattacaggcaggagccactgagcccagccaagacttcagtgttgactgctttggaggcacaaacccatgcaagcgttagttccaaagttcagtgtgtacccttaaatgaacaatgaagcaggtaaaattacccttgaaaaaaatcccttggaccacccataaatgacagtgactttttcaatatggactcatcatagccagttttccttttgaagttggaactgatcacccttttgtcatctgtaccagatcagtagttggcttgtgttacattttgtgtgtgtgtgtgcgtgttttaaaccagtgcatataaattgtatgttaaatgtaagtaactttaagttgacttatctcttcacagtaatcaagcctcacgtaattcatgctttttaaattcagccagccccccctctctgaaattttattatgtaaataatttgtgttccctgatcactcgtttaagttcttagttgtatgtcatctcttctctagcaggaattggcaaacttttttgtaaaggggtagaaagtgaagattttaggctttgcaggccatatagcctctgctgcaaatgctcagccctgctgttgtaatgtaaaagctgccacagacactacatgaacacgaatgagtgtggctggtgttccaataaaactttatttacacaaacgggtggcccttttgggctgtagtttgtcaacccttgctctaacccttgactgagagctactttattaagccctgagggcaggagctatcccaatttgtgttccccagggcaccaaaacacagtgcttggcatagagtaggcactcaacaagtgtgtgaacagatggagagccagccctagtcagtgcactcaccctttgaggctctggttcctccaaacaatgattcgttgtctggattggctggaactgtcacccccgcaattctactccccacccacccatgtgaccttaatgtcagttgctggtctgttgctcttcggggagggagagatggcctggatacagagctaagcaaatgcttctttaagggcccttaaaagtgaaaagtaacttgcaagaggttgagatccttctgagctaggagaacttattccaccttcaaaacctagtttgggctgggtgcagtggctcacgccactttgggaggctgaggtgggcggatcacctgaagtcagctactcgggaggctgaggcaggagaatcgcttgaacccaggaggcagaggttgcagtgagccgagattgcgtcactgcactccagcctgggcgacagagtgagactccgtctcgaaaccaaaaacaagaaaaacccctagttttgtgccttctgaagatagttaggacatct

SEQ ID NO: 451225 - DNA, 4994 bp, Homo sapiens
  misc_feature (2983)..(2983): n is a, c, g, or t
tgtccagtaactctggctgtgccggatactgcttgggtaaaacgggcaccccaggaacatggcagacgaagacctcatcttccgcctggaaggtgttgatggcggccagtccccccgagctggccatgatggtgattctgatggggacagcgacgatgaggaaggttacttcatctgccccatcacggatgacccaagctcgaaccagaatgtcaattccaaggttaataagtactacagcaacctaacaaaaagtgagcggtatagctccagcgggtccccggcaaactccttccacttcaaggaagcctggaagcacgcaatccagaaggccaagcacatgcccgacccctgggctgagttccacctggaagatattgccaccgaacgtgctactcgacacaggtacaacgccgtcaccggggaatggctggatgatgaagttctgatcaagatggcatctcagcccttcggccgaggagcaatgagggagtgcttccggacgaagaagctctccaacttcttgcatgcccagcagtggaagggcgcctccaactacgtggcgaagcgctacatcgagcccgtagaccgggatgtgtactttgaggacgtgcgtctacagatggaggccaagctctggggggaggagtataatcggcacaagccccccaagcaggtggacatcatgcagatgtgcatcatcgagctgaaggacagaccgggcaagcccctcttccacctggagcactacatcgagggcaagtacatcaagtacaactccaactctggctttgtccgcgatgacaacatccgcctgacgccgcaggccttcagccacttcacttttgagcgttccggccatcagctgatagtggtggacatccagggagttggggatctctacactgacccacagatccacacggagacgggcactgactttggagacggcaacctaggtgtccgcgggatggcgctcttcttctactctcatgcctgcaaccggatttgcgagagcatgggccttgctccctttgacctctcgccccgggagagggatgcagtgaatcagaacaccaagctgctgcaatcagccaagaccatcttgagaggaacagaggaaaaatgtgggagcccccgagtaaggaccctctctgggagccggccacccctgctccgtcccctttcagagaactctggagacgagaacatgagcgacgtgaccttcgactctctcccttcttccccatcttcggccacaccacacagccagaagctagaccacctccattggccagtgttcagtgacctcgataacatggcatccagagaccatgatcatctagacaaccaccgggagtctgagaatagtggggacagcggataccccagtgagaagcggggtgagctggatgaccctgagccccgagaacatggccactcatacagtaatcggaagtacgagtctgacgaagacagcctgggcagctctggacgggtatgtgtagagaagtggaatctcctcaactcctcccgcctccacctgccgagggcttcggccgtggccctggaagtgcaaaggcttaatgctctggacctcgaaaagaaaatcgggaagtccattttggggaaggtccatctggccatggtgcgctaccacgagggtgggcgcttctgcgagaagggcgaggagtgggaccaggagtcggctgtcttccacctggagcacgcagccaacctgggcgagctggaggccatcgtgggcctgggactcatgtactcgcagttgcctcatcacatcctagccgatgtctctctgaaggagacagaagagaacaaaaccaaaggatttgattacttactaaaggccgctgaagctggcgacaggcagtccatgatcctagtggcgcgagcttttgactctggccagaacctcagcccggacaggtgccaagactggctagaggccctgcactggtacaacactgccctggagatgacggactgtgatgagggcggtgagtacgacggaatgcaggacgagccccggtacatgatgctggccagggaggccgagatgctgttcacaggaggctacgggctggagaaggacccgcagagatcaggggacttgtatacccaggcagcagaggcagcgatggaagccatgaagggccgactggccaaccagtactaccaaaaggctgaagaggcctgggcccagatggaggagtaaccaggaaaatcactgccggctagtcccaagcaaacgggctaggaggaaagattaaaaaaacaacaacaacaacttatttagtttggggaggggaagcatttttaagtgtgttgtaaaatcaaattttatatttcattttttgactcttgaaaaatgtctttgctccttggcagctaccagcagagactctatagctgtctcttagggcagtattttggggaagtggggcttgaagaagcagcctaatgaaccaacataccgttttgtgtgtggttttttttgtttgtttgtttgtttgttttgagacagagtcttgctctgtcacccaggctggagtgcagtgacatgatcttagctcactgcaacctccgcctcctgggttcaagtgattctcctgcctcagcctcccaagtagctgggattactggtgcacaccaccacactcagctaatttttgcatttttagtagagatggggtttcaccatgttggccaggctggtctcgaactcctaacctcaggtgatccacctgcctcagcctcccaaagtgctgggattacaggtgtgagccaccatgcctgcccattttgtggttctattttcatttttatttctttttttttttgtcacgagatataagaaagtgctttttgccttgaatggacaattttagggctgtgctcactagtcttttcaggctggactgaaatgtcgggcccatggagccctgtgttttgtgcatcgggntgagaaatgaagcacttcacgctggctttcctaagtcacggggcgtgtattgccgtggcttagtgcaaagcattctttctcagagcatttagaggcatgcgtggcattttttcagtgggtgtgagattgcacaatacccaggctcccttctactgtggggaagggcctgcatgttggctgttttttaaacttctagttcaatttccttccataatgctactgattttctggcatacagccgaattccatcttttaagcatgctttctacggtgggcttttcaaaacaggtttgagttttgtatgcacacgtttactacctctaactcctacatcagctagtgtggaagagggtgcacctcaaagcttttacacgtaaggacagcggcttggaatgtgagagccttttctccaagcagacccacactctgcatctcagtggcagctcccacaacgtgactgcaatgtctcttatacagtattccttggtgttttcttagtgtctggatgttcttacgtgaaatctgctccccagccctggtccttggcattttctgcttgaagctgggctgattttcttgtaatttacagggcaggagccactgagcccagccaagacttcagtgttgactgctttggaggcacaaacccatgcaagcgttagttccaaagttcagtgtgtacccttaaatgaacaatgaagcaggtaaaattacccttgaaaaaaatcccttggaccacccataaatgacagtgactttttcaatatggactcatcatagccagttttccttttgaagttggaactgatcacccttttgtcatctgtaccagatcagtagttggcttgtgttacattttgtgtgtgtgtgtgcgtgttttaaaccagtgcatataaattgtatgttaaatgtaagtaactttaagttgacttatctcttcacagtaatcaagcctcacgtaattcatgctttttaaattcagccagccccccctctctgaaattttattatgtaaataatttgtgttccctgatcactcgtttaagttcttagttgtatgtcatctcttctctagcaggaattggcaaacttttttgtaaaggggtagaaagtgaagattttaggctttgcaggccatatagcctctgctgcaaatgctcagccctgctgttgtaatgtaaaagctgccacagacactacatgaacacgaatgagtgtggctggtgttccaataaaactttatttacacaaacgggtggcccttttgggctgtagtttgtcaacccttgctctaacccttgactgagagctactttattaagccctgagggcaggagctatcccaatttgtgttccccagggcaccaaaacacagtgcttggcatagagtaggcactcaacaagtgtgtgaacagatggagagccagccctagtcagtgcactcaccctttgaggctctggttcctccaaacaatgattcgttgtctggattggctggaactgtcacccccgcaattctactccccacccacccatgtgaccttaatgtcagttgctggtctgttgctcttcggggagggagagatggcctggatacagagctaagcaaatgcttctttaagggcccttaaaagtgaaaagtaacttgcaagaggttgagatccttctgagctaggagaacttattccactgcacctggccctgttttcatggcttttatttcctttcatcccacacatttgtctgcagtactagacatgttttacaaatcaacaagtttacacaagtatatgcagcttgttttggggggaaaggagacaaaatatgcatattttctgtgtggatttgtgcctcttaattgtgtttctagtctctaaggtgaccctttaacctactcaagatggggcccagagaagtggcctgcgttacagatttattttggcatatgtactaagttccattttctctttacaaataaagtgttttctttcttttctgtctcagactcaaa

SEQ ID NO: 451226 - DNA, 4778 bp, Homo sapiens
  misc_feature (2983)..(2983): n is a, c, g, or t
tgtccagtaactctggctgtgccggatactgcttgggtaaaacgggcaccccaggaacatggcagacgaagacctcatcttccgcctggaaggtgttgatggcggccagtccccccgagctggccatgatggtgattctgatggggacagcgacgatgaggaaggttacttcatctgccccatcacggatgacccaagctcgaaccagaatgtcaattccaaggttaataagtactacagcaacctaacaaaaagtgagcggtatagctccagcgggtccccggcaaactccttccacttcaaggaagcctggaagcacgcaatccagaaggccaagcacatgcccgacccctgggctgagttccacctggaagatattgccaccgaacgtgctactcgacacaggtacaacgccgtcaccggggaatggctggatgatgaagttctgatcaagatggcatctcagcccttcggccgaggagcaatgagggagtgcttccggacgaagaagctctccaacttcttgcatgcccagcagtggaagggcgcctccaactacgtggcgaagcgctacatcgagcccgtagaccgggatgtgtactttgaggacgtgcgtctacagatggaggccaagctctggggggaggagtataatcggcacaagccccccaagcaggtggacatcatgcagatgtgcatcatcgagctgaaggacagaccgggcaagcccctcttccacctggagcactacatcgagggcaagtacatcaagtacaactccaactctggctttgtccgcgatgacaacatccgcctgacgccgcaggccttcagccacttcacttttgagcgttccggccatcagctgatagtggtggacatccagggagttggggatctctacactgacccacagatccacacggagacgggcactgactttggagacggcaacctaggtgtccgcgggatggcgctcttcttctactctcatgcctgcaaccggatttgcgagagcatgggccttgctccctttgacctctcgccccgggagagggatgcagtgaatcagaacaccaagctgctgcaatcagccaagaccatcttgagaggaacagaggaaaaatgtgggagcccccgagtaaggaccctctctgggagccggccacccctgctccgtcccctttcagagaactctggagacgagaacatgagcgacgtgaccttcgactctctcccttcttccccatcttcggccacaccacacagccagaagctagaccacctccattggccagtgttcagtgacctcgataacatggcatccagagaccatgatcatctagacaaccaccgggagtctgagaatagtggggacagcggataccccagtgagaagcggggtgagctggatgaccctgagccccgagaacatggccactcatacagtaatcggaagtacgagtctgacgaagacagcctgggcagctctggacgggtatgtgtagagaagtggaatctcctcaactcctcccgcctccacctgccgagggcttcggccgtggccctggaagtgcaaaggcttaatgctctggacctcgaaaagaaaatcgggaagtccattttggggaaggtccatctggccatggtgcgctaccacgagggtgggcgcttctgcgagaagggcgaggagtgggaccaggagtcggctgtcttccacctggagcacgcagccaacctgggcgagctggaggccatcgtgggcctgggactcatgtactcgcagttgcctcatcacatcctagccgatgtctctctgaaggagacagaagagaacaaaaccaaaggatttgattacttactaaaggccgctgaagctggcgacaggcagtccatgatcctagtggcgcgagcttttgactctggccagaacctcagcccggacaggtgccaagactggctagaggccctgcactggtacaacactgccctggagatgacggactgtgatgagggcggtgagtacgacggaatgcaggacgagccccggtacatgatgctggccagggaggccgagatgctgttcacaggaggctacgggctggagaaggacccgcagagatcaggggacttgtatacccaggcagcagaggcagcgatggaagccatgaagggccgactggccaaccagtactaccaaaaggctgaagaggcctgggcccagatggaggagtaaccaggaaaatcactgccggctagtcccaagcaaacgggctaggaggaaagattaaaaaaacaacaacaacaacttatttagtttggggaggggaagcatttttaagtgtgttgtaaaatcaaattttatatttcattttttgactcttgaaaaatgtctttgctccttggcagctaccagcagagactctatagctgtctcttagggcagtattttggggaagtggggcttgaagaagcagcctaatgaaccaacataccgttttgtgtgtggttttttttgtttgtttgtttgtttgttttgagacagagtcttgctctgtcacccaggctggagtgcagtgacatgatcttagctcactgcaacctccgcctcctgggttcaagtgattctcctgcctcagcctcccaagtagctgggattactggtgcacaccaccacactcagctaatttttgcatttttagtagagatggggtttcaccatgttggccaggctggtctcgaactcctaacctcaggtgatccacctgcctcagcctcccaaagtgctgggattacaggtgtgagccaccatgcctgcccattttgtggttctattttcatttttatttctttttttttttgtcacgagatataagaaagtgctttttgccttgaatggacaattttagggctgtgctcactagtcttttcaggctggactgaaatgtcgggcccatggagccctgtgttttgtgcatcgggntgagaaatgaagcacttcacgctggctttcctaagtcacggggcgtgtattgccgtggcttagtgcaaagcattctttctcagagcatttagaggcatgcgtggcattttttcagtgggtgtgagattgcacaatacccaggctcccttctactgtggggaagggcctgcatgttggctgttttttaaacttctagttcaatttccttccataatgctactgattttctggcatacagccgaattccatcttttaagcatgctttctacggtgggcttttcaaaacaggtttgagttttgtatgcacacgtttactacctctaactcctacatcagctagtgtggaagagggtgcacctcaaagcttttacacggcaggagccactgagcccagccaagacttcagtgttgactgctttggaggcacaaacccatgcaagcgttagttccaaagttcagtgtgtacccttaaatgaacaatgaagcaggtaaaattacccttgaaaaaaatcccttggaccacccataaatgacagtgactttttcaatatggactcatcatagccagttttccttttgaagttggaactgatcacccttttgtcatctgtaccagatcagtagttggcttgtgttacattttgtgtgtgtgtgtgcgtgttttaaaccagtgcatataaattgtatgttaaatgtaagtaactttaagttgacttatctcttcacagtaatcaagcctcacgtaattcatgctttttaaattcagccagccccccctctctgaaattttattatgtaaataatttgtgttccctgatcactcgtttaagttcttagttgtatgtcatctcttctctagcaggaattggcaaacttttttgtaaaggggtagaaagtgaagattttaggctttgcaggccatatagcctctgctgcaaatgctcagccctgctgttgtaatgtaaaagctgccacagacactacatgaacacgaatgagtgtggctggtgttccaataaaactttatttacacaaacgggtggcccttttgggctgtagtttgtcaacccttgctctaacccttgactgagagctactttattaagccctgagggcaggagctatcccaatttgtgttccccagggcaccaaaacacagtgcttggcatagagtaggcactcaacaagtgtgtgaacagatggagagccagccctagtcagtgcactcaccctttgaggctctggttcctccaaacaatgattcgttgtctggattggctggaactgtcacccccgcaattctactccccacccacccatgtgaccttaatgtcagttgctggtctgttgctcttcggggagggagagatggcctggatacagagctaagcaaatgcttctttaagggcccttaaaagtgaaaagtaacttgcaagaggttgagatccttctgagctaggagaacttattccactgcacctggccctgttttcatggcttttatttcctttcatcccacacatttgtctgcagtactagacatgttttacaaatcaacaagtttacacaagtatatgcagcttgttttggggggaaaggagacaaaatatgcatattttctgtgtggatttgtgcctcttaattgtgtttctagtctctaaggtgaccctttaacctactcaagatggggcccagagaagtggcctgcgttacagatttattttggcatatgtactaagttccattttctctttacaaataaagtgttttctttcttttctgtctcagactcaaa

SEQ ID NO: 451227 - DNA, 1416 bp, Homo sapiens
aaatgctggacatgccaaaaacctaacgcaaaacccaggacattccagcccaactgggacgatatcagagaccatcttcaagtgcaagaagcaggtgaaagcccaggaaattggcagagccaggattatcatccagtactttcatttcacaaatggagaaaccgaggttctgccagctagattttttttcacagtgtcactgctagcaagccactaagctggagctgggatttgagagctgctgctatttagaggatcttgggaataaaatttaaactggagtttaatggccctttcagttttgctataggcaagagaataaaatgaatgaatggataggtggctttatgggtgtaagaaagaagcgaaaaaaactcccaaaccccagtgttcctgaatatctgttctccccctgaccactctgggaatttatcaaatgcagctttgacctccaagccaagtaaactgctcttgttgctattttagtggtttttgtttttttaagacacaaggtctcactttgttactcaggctggagtgcagtggcatgatcataactcattgtaggctcaacctcctgggccccagtgatcctcctgcctcagcctctcaagtagctaaaactacagatgtgcaccatcacatctggctaatttttttttttttttttttgaggtggagtctcgctctgttgcccagattcaagtgcaatggcacgttttggctcactgcaacctctgcctcccaggttcaagcgattctccctgtctcggcctcccgagtagctgggactacaggcacctgccaccacgcgcagctaatgtttgtatttttagtagagacgggggtttcaccatgttggccaggctggtttcaaactcctgacattaggtgatccacctgcctcggcctcccaaagtgctgggattacaggcatgagccaccgtgccaagccacgcctggctaattttttaaaattattttttgcagagacagagtttcactatgttgcccaggctggtcttgaactccttggcctcaagtgatcctcccacctcagcctcccaaagcattggggttacaggcgtgagccactgcacctggccctgttttcatggcttttatttcctttcatcccacacatttgtctgcagtactagacatgttttacaaatcaacaagtttacacaagtatatgcagcttgttttggggggaaaggagacaaaatatgcatattttctgtgtggatttgtgcctcttaattgtgtttctagtctctaaggtgaccctttaacctactcaagatggggcccagagaagtggcctgcgttacagatttattttggcatatgtactaagttccattttctctttacaaataaagtgttttctttcttttctgtctcagactcaaa

SEQ ID NO: 451228 - DNA, 1576 bp, Homo sapiens
tgtccagtaactctggctgtgccggatactgcttgggtaaaacgggcaccccaggaacatggcagacgaagacctcatcttccgcctggaaggtgttgatggcggccagtccccccgagctggccatgatggtgattctgatggggacagcgacgatgaggaaggttacttcatctgccccatcacggatgacccaagctcgaaccagaatgtcaattccaaggttaataagtactacagcaacctaacaaaaagtgagcggtatagctccagcgggtccccggcaaactccttccacttcaaggaagcctggaagcacgcaatccagaaggccaagcacatgcccgacccctgggctgagttccacctggaagatattgccaccgaacgtgctactcgacacaggtacaacgccgtcaccggggaatggctggatgatgaagttctgatcaagatggcatctcagcccttcggccgaggagcaatgagggagtgcttccggacgaagaagctctccaacttcttgcatgcccagcagtggaagggcgcctccaactacgtggcgaagcgctacatcgagcccgtagaccgggatgtgtactttgaggacgtgcgtctacagatggaggccaagctctggggggaggagtataatcggcacaagccccccaagcaggtggacatcatgcagatgtgcatcatcgagctgaaggacagaccgggcaagcccctcttccacctggagcactacatcgagggcaagtacatcaagtacaactccaactctggctttgtccgcgatgacaacatccgcctgacgccgcaggccttcagccacttcacttttgagcgttccggccatcagctgatagtggtggacatccagggagttggggatctctacactgacccacagatccacacggagacgggcactgactttggagacggcaacctaggtgtccgcgggatggcgctcttcttctactctcatgcctgcaaccggatttgcgagagcatgggccttgctccctttgacctctcgccccgggagagggatgcagtgaatcagaacaccaagctgctgcaatcagccaagaccatcttgagaggaacagaggaaaaatgtgggagcccccgagtaaggaccctctctgggagccggccacccctgctccgtcccctttcagagaactctggagacgagaacatgagcgacgtgaccttcgactctctcccttcttccccatcttcggccacaccacacagccagaagctagaccacctccattggccagtgttcagtgacctcgataacatggcatccagagaccatgatcatctagacaaccaccgggagtctgagaatagtggggacagcggataccccagtgagaagcggggtgagctggatgaccctgagccccgagaacatgtaaggaacccccaggaaatgagaccggtgtcacctgttgccttgtttatcctccaggaaaatgaaaactccccttcctggagggggaatatgagtgggtcctgagaagataacaagtaaattaataaagagtatttcagg

SEQ ID NO: 451229 - DNA, 1873 bp, Homo sapiens
gttgctttgcggacgcttttccgcggggaaactgtgtaaagggtggggaaacttgaaagttggatgctgcagacccggcatgggtagcaagaaactaaaacgagtgggtttatcacaagagctgtgtgaccgtctgagtagacatcagatccttacctgtcaggactttttatgtctttccccactggagcttatgaaggtgactggtctgagttatcgaggtgtccatgaacttctatgtatggtcagcagggcctgtgccccaaagatgcaaacggcttatgggataaaagcacaaaggtctgctgatttctcaccagcattcttatctactaccctttctgctttggacgaagccctgcatggtggtgtggcttgtggatccctcacagagattacaggtccaccaggttgtggaaaaactcagttttgtataatgatgagcattttggctacattacccaccaacatgggaggattagaaggagctgtggtgtacattgacacagagtctgcatttagtgctgaaagactggttgaaatagcagaatcccgttttcccagatattttaacactgaagaaaagttacttttgacaagtagtaaagttcatctttatcgggaactcacctgtgatgaagttctacaaaggattgaatctttggaagaagaaattatctcaaaaggaattaaacttgtgattcttgactctgttgcttctgtggtcagaaaggagtttgatgcacaacttcaaggcaatctcaaagaaagaaacaagttcttggcaagagaggcatcctccttgaagtatttggctgaggagttttcaatcccagttatcttgacgaatcagattacaacccatctgagtggagccctggcttctcaggcagacctggtgtctccagctgatgatttgtccctgtctgaaggcacttctggatccagctgtgtgatagccgcactaggaaatacctggagtcacagtgtgaatacccggctgatcctccagtaccttgattcagagagaagacagattcttattgccaagtcccctctggctcccttcacctcatttgtctacaccatcaaggaggaaggcctggttcttcaagcctatggaaattcctagagacagataaatgtgcaaacctgttcatcttgccaagaaaaatccgcttttctgccacagaaacaaaatattgggaaagagtcttgtggtgaaacacccatcgttctctgctaaaacatttggttgctactgtgtagactcagcttaagtcatggaattctagaggatgtatctcacaagtaggatcaagaacaagcccaacagtaatctgcatcataagctgatttgataccatggcactgacaatgggcactgatttgataccatggcactgacaatgggcacacagggaacaggaaatgggaatgagagcaagggttgggttgtgttcgtggaacacataggttttttttttttaactttctctttctaaaatatttcattttgatggaggtgaaatttatataagatgaaattaaccattttaaagtaaacaattccgtggcaactagatatcatgatgtgcaaccagcatctctgtctagttccaaatattttcatcaccccaaaagcaagacccataaccattatgcaagtgttcctatttccccctcctcccagctcctggaaacccaccaatctactttgttgctatggctttacctattctggatatttcatataaatggaatcatatagtgtctgtcttctttcactagtatgttttcaagtctcctccatggtgtagcgtgcatcagtacttcattctttttatggctgaataatattgcattgtcagga

SEQ ID NO: 451230 - DNA, 1561 bp, Homo sapiens
gttgctttgcggacgcttttccgcggggaaactgtgtaaagggtggggaaacttgaaagttggatgctgcagacccggcatgggtagcaagaaactaaaacgagtgggtttatcacaagagctgtgtgaccgtctgagtagacatcagatccttacctgtcaggactttttatgtctttccccactggagcttatgaaggtgactggtctgagttatcgaggtgtccatgaacttctatgtatggtcagcagggcctgtgccccaaagatgcaaacggcttatgggataaaagcacaaaggtctgctgatttctcaccagcattcttatctactaccctttctgctttggacgaagccctgcatggtggtgtggcttgtggatccctcacagagattacaggtccaccaggttgtggaaaaactcagttttgtataatgatgagcattttggctacattacccaccaacatgggaggattagaaggagctgtggtgtacattgacacagagtctgcatttagtgctgaaagactggttgaaatagcagaatcccgttttcccagatattttaacactgaagaaaagttacttttgacaagtagtaaagttcatctttatcgggaactcacctgtgatgaagttctacaaaggattgaatctttggaagaagaaattatctcaaaaggaattaaacttgtgattcttgactctgttgcttctgtggtcagaaaggagtttgatgcacaacttcaaggcaatctcaaagaaagaaacaagttcttggcaagagaggcatcctccttgaagtatttggctgaggagttttcaatcccagttatcttgacgaatcagattacaacccatctgagtggagccctggcttctcaggcagacctggtgtctccagctgatgatttgtccctgtctgaaggcacttctggatccagctgtgtgatagccgcactaggaaatacctggagtcacagtgtgaatacccggctgatcctccagtaccttgattcagagagaagacagattcttattgccaagtcccctctggctcccttcacctcatttgtctacaccatcaaggaggaaggcctggttcttcaaggccaagagaagccatagggatactgtgacctttgtctagagttgatgggggtgtgatttgtgaaataaaacaggaccgtactgcttggaagaaggaaacggaagctgacataatggggattaattagttgattgctgttgagatggtaacagatttgctcctaaaccattgagctagcgatttcagacctagcagggaaggtgaagatgaagaagcctttgttcaggtctctagatgtgtagggctgagggctttgccgccatgggatgtcaacagccataataataatttgcacttatatagcacctttcaaccaggcacctcaaagcggtttaaccacattaattaattaaagcccacaatcctcctggggagaggaggaggatgactaacaagatttgtaattacaggagggaacatttccgaataaagtattgtctaccaga

SEQ ID NO: 451231 - DNA, 533 bp, Homo sapiens
agtctcagtgcccactaagtgaaaaagctcagcagtttggctagcctcttagagtgatgctcaagtgtgctggggcctagtggagaggccaagagaagccatagggatactgtgacctttgtctagagttgatgggggtgtgatttgtgaaataaaacaggaccgtactgcttggaagaaggaaacggaagctgacataatggggattaattagttgattgctgttgagatggtaacagatttgctcctaaaccattgagctagcgatttcagacctagcagggaaggtgaagatgaagaagcctttgttcaggtctctagatgtgtagggctgagggctttgccgccatgggatgtcaacagccataataataatttgcacttatatagcacctttcaaccaggcacctcaaagcggtttaaccacattaattaattaaagcccacaatcctcctggggagaggaggaggatgactaacaagatttgtaattacaggagggaacatttccgaataaagtattgtctaccaga

SEQ ID NO: 451232 - DNA, 1311 bp, Homo sapiens
gttgctttgcggacgcttttccgcggggaaactgtgtaaagggtggggaaacttgaaagttggatgctgcagacccggcatgggtagcaagaaactaaaacgagtgggtttatcacaagagctgtgtgaccgtctgagtagacatcagatccttacctgtcaggactttttatgtctttccccactggagcttatgaaggtgactggtctgagttatcgaggtgtccatgaacttctatgtatggtcagcagggcctgtgccccaaagatgcaaacggcttatgggataaaagcacaaaggtctgctgatttctcaccagcattcttatctactaccctttctgctttggacgaagccctgcatggtggtgtggcttgtggatccctcacagagattacaggtccaccaggttgtggaaaaactcagttttgtataatgatgagcattttggctacattacccaccaacatgggaggattagaaggagctgtggtgtacattgacacagagtctgcatttagtgctgaaagactggttgaaatagcagaatcccgttttcccagatattttaacactgaagaaaagttacttttgacaagtagtaaagttcatctttatcgggaactcacctgtgatgaagttctacaaaggattgaatctttggaagaagaaattatctcaaaaggaattaaacttgtgattcttgactctgttgcttctgtggtcagaaaggagtttgatgcacaacttcaaggcaatctcaaagaaagaaacaagttcttggcaagagaggcatcctccttgaagtatttggctgaggagttttcaatcccagttatcttgacgaatcagattacaacccatctgagtggagccctggcttctcaggcagacctggtgtctccagctgatgatttgtccctgtctgaaggcacttctggatccagctgtgtgatagccgcactaggaaatacctggagtcacagtgtgaatacccggctgatcctccagtaccttgattcagagagaagacagattcttattgccaagtcccctctggctcccttcacctcatttgtctacaccatcaaggaggaaggcctggttcttcaagctggaaaatgaaaacattaaccttgattcaagactttgaaaactgtcgcaacccattggtgggtcatgaagtggaattgatgaatcacaaccagcatttgaagacagagagagagagaagacagaagaaagagtgaagaaaaaatatcagattatatcacacatattgtttcatttcataaaatatttcttgtgtg

SEQ ID NO: 451233 - DNA, 1543 bp, Homo sapiens
tgagcaagtgcgggatctggccagcacagctcggagtgccagcaggagcaagctctgtgtgggatccgcggccagaccaggcatgagctagcgagtgtgggatccggccagccactctgggagctgccaggagcaaactccatgaagggcccgtggaggcacccagattacaggtccaccaggttgtggaaaaactcagttttgtataatgatgagcattttggctacattacccaccaacatgggaggattagaaggagctgtggtgtacattgacacagagtctgcatttagtgctgaaagactggttgaaatagcagaatcccgttttcccagatattttaacactgaagaaaagttacttttgacaagtagtaaagttcatctttatcgggaactcacctgtgatgaagttctacaaaggattgaatctttggaagaagaaattatctcaaaaggaattaaacttgtgattcttgactctgttgcttctgtggtcagaaaggagtttgatgcacaacttcaaggcaatctcaaagaaagaaacaagttcttggcaagagaggcatcctccttgaagtatttggctgaggagttttcaatcccagttatcttgacgaatcagattacaacccatctgagtggagccctggcttctcaggcagacctggtgtctccagctgatgatttgtccctgtctgaaggcacttctggatccagctgtgtgatagccgcactaggaaatacctggagtcacagtgtgaatacccggctgatcctccagtaccttgattcagagagaagacagattcttattgccaagtcccctctggctcccttcacctcatttgtctacaccatcaaggaggaaggcctggttcttcaagcctatggaaattcctagagacagataaatgtgcaaacctgttcatcttgccaagaaaaatccgcttttctgccacagaaacaaaatattgggaaagagtcttgtggtgaaacacccatcgttctctgctaaaacatttggttgctactgtgtagactcagcttaagtcatggaattctagaggatgtatctcacaagtaggatcaagaacaagcccaacagtaatctgcatcataagctgatttgataccatggcactgacaatgggcactgatttgataccatggcactgacaatgggcacacagggaacaggaaatgggaatgagagcaagggttgggttgtgttcgtggaacacataggttttttttttttaactttctctttctaaaatatttcattttgatggaggtgaaatttatataagatgaaattaaccattttaaagtaaacaattccgtggcaactagatatcatgatgtgcaaccagcatctctgtctagttccaaatattttcatcaccccaaaagcaagacccataaccattatgcaagtgttcctatttccccctcctcccagctcctggaaacccaccaatctactttgttgctatggctttacctattctggatatttcatataaatggaatcatatag

SEQ ID NO: 451234 - DNA, 1966 bp, Homo sapiens
  misc_feature (1838)..(1839): n is a, c, g, or t
gttgctttgcggacgcttttccgcggggaaactgtgtaaagggtggggaaacttgaaagttggatgctgcagacccggcatgggtagcaagaaactaaaacgagtgggtttatcacaagagctgtgtgaccgtctgagtagacatcagatccttacctgtcaggactttttatgtctttccccactggagcttatgaaggtgactggtctgagttatcgaggtgtccatgaacttctatgtatggtcagcagggcctgtgccccaaagatgcaaacggcttatgggataaaagcacaaaggtctgctgatttctcaccagcattcttatctactaccctttctgctttggacgaagccctgcatggtggtgtggcttgtggatccctcacagagattacaggtccaccaggttgtggaaaaactcagttttgtataatgatgagcattttggctacattacccaccaacatgggaggattagaaggagctgtggtgtacattgacacagagtctgcatttagtgctgaaagactggttgaaatagcagaatcccgttttcccagatattttaacactgaagaaaagttacttttgacaagtagtaaagttcatctttatcgggaactcacctgtgatgaagttctacaaaggattgaatctttggaagaagaaattatctcaaaaggaattaaacttgtgattcttgactctgttgcttctgtggtcagaaaggagtttgatgcacaacttcaaggcaatctcaaagaaagaaacaagttcttggcaagagaggcatcctccttgaagtatttggctgaggagttttcaatcccagttatcttgacgaatcagattacaacccatctgagtggagccctggcttctcaggcagacctggtgtctccagctgatgatttgtccctgtctgaaggcacttctggatccagctgtgtgatagccgcactaggaaatacctggagtcacagtgtgaatacccggctgatcctccagtaccttgattcagagagaagacagattcttattgccaagtcccctctggctcccttcacctcatttgtctacaccatcaaggaggaaggcctggttcttcaagcctatggaaattcctagagacagataaatgtgcaaacctgttcatcttgccaagaaaaatccgcttttctgccacagaaacaaaatattgggaaagagtcttgtggtgaaacacccatcgttctctgctaaaacatttggttgctactgtgtagactcagcttaagtcatggaattctagaggatgtatctcacaagtaggatcaagaacaagcccaacagtaatctgcatcataagctgatttgataccatggcactgacaatgggcactgatttgataccatggcactgacaatgggcacacagggaacaggaaatgggaatgagagcaagggttgggttgtgttcgtggaacacataggttttttttttttaactttctctttctaaaatatttcattttgatggaggtgaaatttatataagatgaaattaaccattttaaagtaaacaattccgtggcaactagatatcatgatgtgcaaccagcatctctgtctagttccaaatattttcatcaccccaaaagcaagacccataaccattatgcaagtgttcctatttccccctcctcccagctcctggaaacccaccaatctactttgttgctatggctttacctattctggatatttcatataaatggaatcatatagaaaaaaaaaaaaaaaaaaaaaaaaaagaaaaaaaaaaaaaaaaaaaaaaaaaaaaaaaaaaaaaaannccctgtgtgggcggcttgggccaagtggtttttagattggggaaggtttatccttgcgccccaaatttgggttactttgcccatttccccttatagggggcggattaaaattaatgggccgggtttt

SEQ ID NO: 451235 - DNA, 1181 bp, Homo sapiens
gttgctttgcggacgcttttccgcggggaaactgtgtaaagggtggggaaacttgaaagttggatgctgcagacccggcatgggtagcaagaaactaaaacgagtgggtttatcacaagagctgtgtgaccgtctgagtagacatcagatccttacctgtcaggactttttatgtctttccccactggagcttatgaaggtgactggtctgagttatcgaggtgtccatgaacttctatgtatggtcagcagggcctgtgccccaaagatgcaaacggcttatgggataaaagcacaaaggtctgctgatttctcaccagcattcttatctactaccctttctgctttggacgaagccctgcatggtggtgtggcttgtggatccctcacagagattacaggtccaccaggttgtggaaaaactcagttttgtataatgatgagcattttggctacattacccaccaacatgggaggattagaaggagctgtggtgtacattgacacagagtctgcatttagtgctgaaagactggttgaaatagcagaatcccgttttcccagatattttaacactgaagaaaagttacttttgacaagtagtaaagttcatctttatcgggaactcacctgtgatgaagttctacaaaggattgaatctttggaagaagaaattatctcaaaaggaattaaacttgtgattcttgactctgttgcttctgtggtcagaaaggagtttgatgcacaacttcaaggcaatctcaaagaaagaaacaagttcttggcaagagaggcatcctccttgaagtatttggctgaggagttttcaatcccagtaagtttttctttttttctcttttttcttttcctttcttttgtttcttttatattacattcactgacttatggtatcaaataataaaattagaggaaaatgtaaaacagatgactttttaaaggtagtacagtctaattgctatagcaaacatcgccatcatcttaaattagctcatctgctgagattattttattattttaataatttgagtctggagtagatttaaacgatgtttttaaaagttcctatagtccctccttttcttccttctcattgtttactctttgtgtgtgctttgtatcacatttctcacactgcagtaaatataaagtagtaaaacttc

SEQ ID NO: 451236 - DNA, 1050 bp, Homo sapiens
gctgaattgcttttctctgttatctgcttctttgggattatgaccaccagctccatccatgttcctgcaaaatgacatgatctcacttttttaatagctgcatagtattccatggttatcttgacgaatcagattacaacccatctgagtggagccctggcttctcaggcagacctggtgtctccagctgatgatttgtccctgtctgaaggcacttctggatccagctgtgtgatagccgcactaggaaatacctggagtcacagtgtgaatacccggctgatcctccagtaccttgattcagagagaagacagattcttattgccaagtcccctctggctcccttcacctcatttgtctacaccatcaaggaggaaggcctggttcttcaagcctatggaaattcctagagacagataaatgtgcaaacctgttcatcttgccaagaaaaatccgcttttctgccacagaaacaaaatattgggaaagagtcttgtggtgaaacacccatcgttctctgctaaaacatttggttgctactgtgtagactcagcttaagtcatggaattctagaggatgtatctcacaagtaggatcaagaacaagcccaacagtaatctgcatcataagctgatttgataccatggcactgacaatgggcactgatttgataccatggcactgacaatgggcacacagggaacaggaaatgggaatgagagcaagggttgggttgtgttcgtggaacacataggttttttttttttaactttctctttctaaaatatttcattttgatggaggtgaaatttatataagatgaaattaaccattttaaagtaaacaattccgtggcaactagatatcatgatgtgcaaccagcatctctgtctagttccaaatattttcatcaccccaaaagcaagacccataaccattatgcaagtgttcctatttccccctcctcccagctcctggaaacccaccaatctactttgttgctatggctttacctattctggatatttcatataaatggaatcatatag

SEQ ID NO: 451237 - DNA, 464 bp, Homo sapiens
tctgagatcccaggcagagagagagttgagcctctctgtgcaatgaagtgggaaatgttggggtaggaggggatctcatgaatccatttttcctttggtccccagagttcaccatgcaagtctcagtgcccactaagtgaaaaagctcagcagtttggctagcctcttagagtgatgctcaagtgtgctggggcctagtggagaggtaagagcaggagttggttctgggaatcagctttaatggtgtgtgcccacagaagcatctggcagcagaaaggaaagggagtttacagtgagctccaggttgacccacctctcctctggtcatgtcctttgttcccttagcaagccccgaatgttgtgccacccagaacacagctgggactcaaggccaagaataaagattctgtcattgaaagcagctgggctgtgttgctggcgctgcaggaggcctagaggaaaac

SEQ ID NO: 451238 - DNA, 1771 bp, Homo sapiens
gttgctttgcggacgcttttccgcggggaaactgtgtaaagggtggggaaacttgaaagttggatgctgcagacccggcatgggtagcaagaaactaaaacgagtgggtttatcacaagagctgtgtgaccgtctgagtagacatcagatccttacctgtcaggactttttatgtctttccccactggagcttatgaaggtgactggtctgagttatcgaggtgtccatgaacttctatgtatggtcagcagggcctgtgccccaaagatgcaaacggcttatgggataaaagcacaaaggtctgctgatttctcaccagcattcttatctactaccctttctgctttggacgaagccctgcatggtggtgtggcttgtggatccctcacagagattacaggtccaccaggttgtggaaaaactcagttttgtataatgatgagcattttggctacattacccaccaacatgggaggattagaaggagctgtggtgtacattgacacagagtctgcatttagtgctgaaagactggttgaaatagcagaatcccgttttcccagatattttaacactgaagaaaagttacttttgacaagtagtaaagttcatctttatcgggaactcacctgtgatgaagttctacaaaggattgaatctttggaagaagaaattatctcaaaaggaattaaacttgtgattcttgactctgttgcttctgtggtcagaaaggagtttgatgcacaacttcaaggcaatctcaaagaaagaaacaagttcttggcaagagaggcatcctccttgaagtatttggctgaggagttttcaatcccagttatcttgacgaatcagattacaacccatctgagtggagccctggcttctcaggcagacctggtgtctccagctgatgatttgtccctgtctgaaggcacttctggatccagctgtgtgatagccgcactaggaaatacctggagtcacagtgtgaatacccggctgatcctccagtaccttgattcagagagaagacagattcttattgccaagtcccctctggctcccttcacctcatttgtctacaccatcaaggaggaaggcctggttcttcaagcctatggaaattcctagagacagataaatgtgcaaacctgttcatcttgccaagaaaaatccgcttttctgccacagaaacaaaatattgggaaagagtcttgtggtgaaacacccatcgttctctgctaaaacatttggttgctactgtgtagactcagcttaagtcatggaattctagaggatgtatctcacaagtaggatcaagaacaagcccaacagtaatctgcatcataagctgatttgataccatggcactgacaatgggcactgatttgataccatggcactgacaatgggcacacagggaacaggaaatgggaatgagagcaagggttgggttgtgttcgtggaacacataggttttttttttttaactttctctttctaaaatatttcattttgatggaggtgaaatttatataagatgaaattaaccattttaaagtaaacaattccgtggcaactagatatcatgatgtgcaaccagcatctctgtctagttccaaatattttcatcaccccaaaagcaagacccataaccattatgcaagtgttcctatttccccctcctcccagctcctggaaacccaccaatctactttgttgctatggctttacctattctggatatttcatataaatggaatcatatag

SEQ ID NO: 451239 - DNA, 327 bp, Homo sapiens
ggggcgaggtgtattgctgccatcatgggagacacccacgacgggcttaaagattcttattgccaagtcccctctggctcccttcacctcatttgtctacaccatcaaggaggaaggcctggttcttcaagctggaaaatgaaaacattaaccttgattcaagactttgaaaactgtcgcaacccattggtgggtcatgaagtggaattgatgaatcacaaccagcatttgaagacagagagagagagaagacagaagaaagagtgaagaaaaaatatcagattatatcacacatattgtttcatttcataaaatatttcttgtgtg

SEQ ID NO: 451240 - DNA, 2566 bp, Homo sapiens
gttgctttgcggacgcttttccgcggggaaactgtgtaaagggtggggaaacttgaaagttggatgctgcagacccggcatgggtagcaagaaactaaaacgagtgggtttatcacaagagctgtgtgaccgtctgagtagacatcagatccttacctgtcaggactttttatgtctttccccactggagcttatgaaggtgactggtctgagttatcgaggtgtccatgaacttctatgtatggtcagcagggcctgtgccccaaagatgcaaacggcttatgggataaaagcacaaaggtctgctgatttctcaccagcattcttatctactaccctttctgctttggacgaagccctgcatggtggtgtggcttgtggatccctcacagagattacaggtccaccaggttgtggaaaaactcagttttgtataatgatgagcattttggctacattacccaccaacatgggaggattagaaggagctgtggtgtacattgacacagagtctgcatttagtgctgaaagactggttgaaatagcagaatcccgttttcccagatattttaacactgaagaaaagttacttttgacaagtagtaaagttcatctttatcgggaactcacctgtgatgaagttctacaaaggattgaatctttggaagaagaaattatctcaaaaggaattaaacttgtgattcttgactctgttgcttctgtggtcagaaaggagtttgatgcacaacttcaaggcaatctcaaagaaagaaacaagttcttggcaagagaggcatcctccttgaagtatttggctgaggagttttcaatcccagttatcttgacgaatcagattacaacccatctgagtggagccctggcttctcaggcagacctggtgtctccagctgatgatttgtccctgtctgaaggcacttctggatccagctgtgtgatagccgcactaggaaatacctggagtcacagtgtgaatacccggctgatcctccagtaccttgattcagagagaagacagattcttattgccaagtcccctctggctcccttcacctcatttgtctacaccatcaaggaggaaggcctggttcttcaagagacaacattttgctctgtcacccaagctgaactgaactgggctccagaaatcctcccacctcagcctcctgagcagctaggactacagatgtgccaccatacccagctaattttttaattttttgtagaggtggggtctcattatgttgcccaagctgatctcaaactcctggcttcaagagatccacccacctcagcctcccaaagcgctaggattacaagtatgagactttgccattccaatgagaattttgtccttagcaatctcatccaatggccactggagatgtgtgtagggccacaagaatgagaaagggggcaatggagtgacaggtgacctgctcaggtgcccctccccagaccaaatgtcccaggcacacagcccatgccctccaccatggagtacattttctccctggcttgctgctgagctaaaggaccagggacgtggaaacaggaggtgaactaaggcaccccgccacccactgtggcagcttgaatttcttgaggctgagacaaactaggatccagtagcctagattttgccccagtttctccactgagtatttactcagtgctcctgagccgatgccttcccctctgcctagatgaaccacagcattttggtaaatgcctcagcatgttaggagcgctggaacgtttattctcttccctcccaattatccactctaatggagcagaacacttacatggaaaatcctaaacatggaagatgatttaaaaatgattcaccctggaatacatgcttccagttgcttctacaggtttaccttgctaaaggcatttcgcttcctttgctgttacaataagcttgcctgccttgaagaaaagaagaccagggccaaagggaaatcagtcaagggagcctgttttgtctgaaataatgcatctatgaacaaatgaattgagtataactgtctttttacatcagtgtttctgtggaattaagagaacatccaaggccactcctagcttgagtagattaaatttgtccttgtgtttggagcaagggttgtgaagtctgtctggcccatcaaatgaccaatggcttttaaggaaggactaagtgacttatgaccagaacaagggagcagcctgagtcagtctccccaatgtctacattgtgttatttatactagcaaaaaaatagacacaactaaatgttcgaccatatggtattggttaaattaacatctatacgatggaatactagatggtcattaaaattatgtgtcagaagaaggcttaatctcatgggaaagtgttcacaccatattattaaagagaaaaaacagattataaagcaatatgcatacaatgtagtagttctgtaagaaaaaagtattatgtgcattttaactggaaaaatatgtataaaaatgttaacagtgcaatctctgggcaataagattatacttgacttttattt

SEQ ID NO: 451241 - DNA, 1721 bp, Homo sapiens
ttcttcttttctttgctggatctggaggcatgggtagcaagaaactaaaacgagtgggtttatcacaagagctgtgtgaccgtctgagtagacatcagatccttacctgtcaggactttttatgtctttccccactggagcttatgaaggtgactggtctgagttatcgaggtgtccatgaacttctatgtatggtcagcagggcctgtgccccaaagatgcaaacggcttatgggataaaagcacaaaggtctgctgatttctcaccagcattcttatctactaccctttctgctttggacgaagccctgcatggtggtgtggcttgtggatccctcacagagattacaggtccaccaggttgtggaaaaactcagttttgtataatgatgagcattttggctacattacccaccaacatgggaggattagaaggagctgtggtgtacattgacacagagtctgcatttagtgctgaaagactggttgaaatagcagaatcccgttttcccagatattttaacactgaagaaaagttacttttgacaagtagtaaagttcatctttatcgggaactcacctgtgatgaagttctacaaaggattgaatctttggaagaagaaattatctcaaaaggaattaaacttgtgattcttgactctgttgcttctgtggtcagaaaggagtttgatgcacaacttcaaggcaatctcaaagaaagaaacaagttcttggcaagagaggcatcctccttgaagtatttggctgaggagttttcaatcccagttatcttgacgaatcagattacaacccatctgagtggagccctggcttctcaggcagacctggtgtctccagctgatgatttgtccctgtctgaaggcacttctggatccagctgtgtgatagccgcactaggaaatacctggagtcacagtgtgaatacccggctgatcctccagtaccttgattcagagagaagacagattcttattgccaagtcccctctggctcccttcacctcatttgtctacaccatcaaggaggaaggcctggttcttcaagcctatggaaattcctagagacagataaatgtgcaaacctgttcatcttgccaagaaaaatccgcttttctgccacagaaacaaaatattgggaaagagtcttgtggtgaaacacccatcgttctctgctaaaacatttggttgctactgtgtagactcagcttaagtcatggaattctagaggatgtatctcacaagtaggatcaagaacaagcccaacagtaatctgcatcataagctgatttgataccatggcactgacaatgggcactgatttgataccatggcactgacaatgggcacacagggaacaggaaatgggaatgagagcaagggttgggttgtgttcgtggaacacataggttttttttttttaactttctctttctaaaatatttcattttgatggaggtgaaatttatataagatgaaattaaccattttaaagtaaacaattccgtggcaactagatatcatgatgtgcaaccagcatctctgtctagttccaaatattttcatcaccccaaaagcaagacccataaccattatgcaagtgttcctatttccccctcctcccagctcctggaaacccaccaatctactttgttgctatggctttacctattctggatatttcatataaatggaatcatatag

SEQ ID NO: 451242 - DNA, 845 bp, Homo sapiens
  misc_feature (2)..(2): n is a, c, g, or t
cnataaaaataaaaaataaatgaaacaactgctctgtatcacggttcatagtcacaattctcccctaaatatttacctgtcaatattctcacggcatttttaaaatgttctcccagtactattaaaaaccatatggcaactatcccttataactcccgaatatttaaaacgcacgcagatataattttcacacggctttaagtgactttgatggacttaatcccatagaagaatctcagaaagactgtttaaagctgaacccttccatggattggacccatcaaatacctatgagttccagaattccgtccccttttgaggtcccgaggtaaaacttgggctcctgggcctgtcagaaagtgacattcttctcgtgccgaattcggcacgaggttgctggcatgtcttcattggctatataaaatgtggccaagaagataggctctcagtaagaagtctgatggtgagcagtaactgtccctgctttctggtataaagctctcaaatgtgaccatgtgaatctgggtgggataatggactcagctctgtctgctcaatgccattgtgcagagaagcaccctaatgcataagctttttaatgctgtaaaatatagtcgctgaaattaaatgccactttttcagaggtgaattaatggacagtctggtgaacttcaaaagctttttgatgtataaaacttgataaatggaactattccatcaataggcaaaagtgtaacaacctatctagatggatagtatgtaatttctgcacaggtctctgtttagtaaatacatcactgtataccgatcaggaatcttgctccaataaaggaacataaagattt

SEQ ID NO: 451243 - DNA, 546 bp, Homo sapiens
ctagaggatcccctcctttttttaaattttctccaaccacgacggggccgacgagacctcagaaaaagaacagcaagaagcgattgaacacattgatgaagtacaaaatgaaatagacagacttaatgaacaagccagtgaggagattttgaaagtagaacagaaatataacaaactccgccaaccattttttcagaagaggtcagaattgatcgccaaaatcccaaatttttgggtaacaacatttgtcaaccatccacaagtgtctgcactgcttggggaggaagatgaagaggcactgcattatttgaccagagttgaagtgacagaatttgaagatattaaatcaggttacagaatagattttgttgattccatacagtttttgttcagacaggaagggataaaaatgaacttcgaacagaaaggggtagagactcttttcccattgtattctgctcaaggtatttccccccaaataaattgagaaccatggagtcgagaaaagagacctcaagaacagggcaaatgagcacaagagggaaa

SEQ ID NO: 451244 - DNA, 349 bp, Homo sapiens
aaaaatttttattaaagggaggaaagaaaagaggcttcaagaaaaggtggctctatggacccctggtggaatccaaccctcccttttttgactgccccccgctccaggggactagagaaaatctaaaaaaaggaaggttggaatcccccagttgtgctcagtcgccctgttcttgaggtctcttttctctactccatggttctcaatttatttggggggaaataccttgagcagaatacaatgggaaaagagtctctacccctttctgttcgaagttcatttttatcccttcctgtctgaacaaaaactgtatccctccacaggggacctcctgaacgactagtgcaca

SEQ ID NO: 451245 - DNA, 461 bp, Homo sapiens
aaaacgttccagtgtgctgaagccaagtattacagtagtttagggttctcattagatactacagatgtaggcaggaagatctcttgagcctaggagtttaccctgggcaacatagacccttaccttccaaaaaacaaaaaaaaagagaaaaatctagcccaagttaaagaattgagaactggactaaattttttgttgctgttgttttctgcagtggtgactgagctcttcaaatggcttgccatttctcaaaatcatttacatccgtatttaggtagtaagacatagtttagatatttatactgtgttgtgctagtggctgttaacagtggaactaattttatggaaaaccaaatgtagttgatactacctctacctgctgtacagttttataattgctcttaggtaataatggtagcgtagatagtatactgatatttgttttgcttagcttttgggga

SEQ ID NO: 451246 - DNA, 392 bp, Homo sapiens
  misc_feature (289)..(289): n is a, c, g, or t
  misc_feature (292)..(292): n is a, c, g, or t
  misc_feature (298)..(298): n is a, c, g, or t
  misc_feature (302)..(302): n is a, c, g, or t
  misc_feature (309)..(309): n is a, c, g, or t
  misc_feature (318)..(318): n is a, c, g, or t
  misc_feature (320)..(321): n is a, c, g, or t
  misc_feature (326)..(326): n is a, c, g, or t
  misc_feature (328)..(328): n is a, c, g, or t
  misc_feature (332)..(334): n is a, c, g, or t
  misc_feature (341)..(341): n is a, c, g, or t
  misc_feature (349)..(349): n is a, c, g, or t
  misc_feature (351)..(351): n is a, c, g, or t
tatctaagtcctgctgcatctcttgctctcattccttagacgtcctccccttttgaccccgattccttcatccatcctgcaccccagtcccccagccctaaatcctccctcctctcctcacatcctggtccctagcagtatagatagcctctgtgtctgaggatgaaggagaagatgactaaatagaacactgatggattccaaccttcctttttttaaattttctccagtccctgggagcaagttgcagtctttttttttttttttttttttttccctcttggggccnggnccccgngttntggggcntttttcctntnnccagngntccnnnattttanggggggancngggggggctcccctaaagggtacctggggggtttcacgctg

SEQ ID NO: 451247 - DNA, 733 bp, Homo sapiens
ctaacttggttggaaatacttatgtagattcagtgttttttggtgaagtgattgtacagaagtttttgaaagtgcattgaccttacaaggtttgggtttgctttcaaagactgaaaattgtctgaattgcagtgtaggtcttctgatggtttagcagtgtggcatcagtggttgctctaacttgccttacaactttgttatggattagccactttatttagaaatcgcgcttgagggaaacaattgaaattggactggaaatggagtgggcgaagtaaatacacacgttaccagagtgttgagtttgggcactcttaacagtcattattactcagtgtttattgataaatcagacaaaattgccatcttagttttgagtgtctaaattaggtgataatggttattataatttggttattttgcatgactcaagctagtaagtaaatacactctgtaatctcaaccaattttttaatttgttaaatactatcattgtcaacatctcttttcatttgcttcagactcgcgcaagggtagtacaggaacaaagaacgaaagtaacacaaagcaacagtgtcagagcgagcacggaagtcgagtacgactttaaagacagaactcgcctggctaccaagcgtgatctgcgaaccagcaaatagagagtgaaagcaggacatctgatagagtccggcgggattctctcagagctcgacctgacagcagcaagctgcat

SEQ ID NO: 451248 - DNA, 404 bp, Homo sapiens
ctaacttggttggaaatacttatgtagattcagtgttttttggtgaagtgattgtacagaagtttttgaaagtgcattgaccttacaaggtttgggtttgctttcaaagactgaaaattgtctgaattgcagtgtaggtcttctgatggtttagcagtgtggcatcagtggttgctctaacttgccttacaactttgttatggattagccactttatttagaaatcgcgcttgagggaaacaattgaaattggactggaaatggagtgggcgaagtaaatacacacgttaccagagtgttgagtttgggcactcttaacagtcattattactcagtgtttattgataaatcagacaaaattgccatcttagttttgagtgtcgggatcctctagaacgaacgca

SEQ ID NO: 451249 - DNA, 2918 bp, Homo sapiens
cctcgccgtaggaggaggtggaggaggaggcggctcgggagagcgagcagcgagctggctggatcgccgagcgcgagtgagggagccgagccgcccgccgccgccgcctccgcctcccctccgcgaacaggagcccgggccggggcccggcacgccgccccagcccgtccctcggcgtcaggccgcgagggtagcgcgcgcgagcgagcgagggggagggagagcgagcgagcgccgggaggaggcggccggaccgagcgggcgcccgcgcgtgtggcgtgaggggaagccgcttgcccgcccccttcgccttcccttctctccccctccccgctccccccccgaccgcggagcagcaccatgtcggcgccggcggccaaagtcagtaaaaaggagctcaactccaaccacgacggggccgacgagacctcagaaaaagaacagcaagaagcgattgaacacattgatgaagtacaaaatgaaatagacagacttaatgaacaagccagtgaggagattttgaaagtagaacagaaatataacaaactccgccaaccattttttcagaagaggtcagaattgatcgccaaaatcccaaatttttgggtaacaacatttgtcaaccatccacaagtgtctgcactgcttggggaggaagatgaagaggcactgcattatttgaccagagttgaagtgacagaatttgaagatattaaatcaggttacagaatagatttttattttgatgaaaatccttactttgaaaataaagttctctccaaagaatttcatctgaatgagagtggtgatccatcttcgaagtccaccgaaatcaaatggaaatctggaaaggatttgacgaaacgttcgagtcaaacgcagaataaagccagcaggaagaggcagcatgaggaaccagagagcttctttacctggtttactgaccattctgatgcaggtgctgatgagttaggagaggtcatcaaagatgatatttggccaaacccattacagtactacttggttcccgatatggatgatgaagaaggagaaggagaagaagatgatgatgatgatgaagaggaggaaggattagaagatattgacgaagaaggggatgaggatgaaggtgaagaagatgaagatgatgatgaaggggaggaaggagaggaggatgaaggagaagatgactaaatagaacactgatggattccaaccttcctttttttaaattttctccagtccctgggagcaagttgcagtctttttttttttttttttttttttccctcttgtgctcagtcgccctgttcttgaggtctcttttctctactccatggttctcaatttatttggggggaaataccttgagcagaatacaatgggaaaagagtctctacccctttctgttcgaagttcatttttatcccttcctgtctgaacaaaaactgtatggaatcaacaccaccgagctctgtgggaaaaaagaaaaacctgctcccttcgctctgctggaagctggagggtgctaggcccctgtgtagtagtgcatagaattctagcttttttcctcctttctctgtatattgggctcagagagtacactgtgtctctatgtgaatatggacagttagcatttaccaacatgtatctgtctactttctcttgtttaaaaaaagaaaaaaaaacttaaaaaaatggggttatagaaggtcagcaaagggtgggtttgagatgtttgggtgggttaagtgggcattttgacaacatggcttctcctttggcatgtttaattgtgatatttgacagacatccttgcagtttaagatgacacttttaaaataaattctctcctaatgatgacttgagccctgccactcaatgggagaatcagcagaacctgtaggatcttatttggaattgacattctctattgtaattttgttcctgtttatttttaaattttctttttgtttcactggaaaggaaagatgatgctcagttttaaacgttaaaagtgtacaagttgctttgttacaataaaactaaatgtgtacacaaagggatttgatgcttttctctcagcataggtatgcttactatgaccttccaagtttgacttgtataacatcactgtcaaactttgtcaccctaacttcgtattttttgatacgcactttgcaggatgacctcagggctatgtggattgagtaatgggatttgaatcaatgtattaatatctccatagctgggaaacgtgggttcaatttgccattggtttctgaaagtattcacatcatttgggataccagatagctcaatactctctgagtacattgtgcccttgatttttatctccaagtggcagtttttaaaattggccttttacctggatataaattaattgtgcctgccaccaccatccaacagacctggtgctctaatgccaagttatacacgggacagttgctggcatgtcttcattggctatataaaatgtggccaagaagataggctctcagtaagaagtctgatggtgagcagtaactgtccctgctttctggtataaagctctcaaatgtgaccatgtgaatctgggtgggataatggactcagctctgtctgctcaatgccattgtgcagagaagcaccctaatgcataagctttttaatgctgtaaaatatagtcgctgaaattaaatgccactttttcagaggtgaattaatggacagtctggtgaacttcaaaagctttttgatgtataaaacttgataaatggaactattccatcaataggcaaaagtgtaacaacctatctagatggatagtatgtaatttctgcacaggtctctgtttagtaaatacatcactgtataccgatcaggaatcttgctccaataaaggaacataaagattt

SEQ ID NO: 451250 - DNA, 2790 bp, Homo sapiens
aaactagcttatttttccatatagtaatgcagttagggttctcagcactttgtttcttatatccttgtgttagatcttcatattatgatcaaatgataatactctcaaggattgggtgcccggaccaaaatggggaccgtgtagagcggtgtgacagtaaagcgctggacagggtcattcgccttcccttctctccccctccccgctccccccccgaccgcggagcagcaccatgtcggcgccggcggccaaagtcagtaaaaaggagctcaactccaaccacgacggggccgacgagacctcagaaaaagaacagcaagaagcgattgaacacattgatgaagtacaaaatgaaatagacagacttaatgaacaagccagtgaggagattttgaaagtagaacagaaatataacaaactccgccaaccattttttcagaagaggtcagaattgatcgccaaaatcccaaatttttgggtaacaacatttgtcaaccatccacaagtgtctgcactgcttggggaggaagatgaagaggcactgcattatttgaccagagttgaagtgacagaatttgaagatattaaatcaggttacagaatagatttttattttgatgaaaatccttactttgaaaataaagttctctccaaagaatttcatctgaatgagagtggtgatccatcttcgaagtccaccgaaatcaaatggaaatctggaaaggatttgacgaaacgttcgagtcaaacgcagaataaagccagcaggaagaggcagcatgaggaaccagagagcttctttacctggtttactgaccattctgatgcaggtgctgatgagttaggagaggtcatcaaagatgatatttggccaaacccattacagtactacttggttcccgatatggatgatgaagaaggagaaggagaagaagatgatgatgatgatgaagaggaggaaggattagaagatattgacgaagaaggggatgaggatgaaggtgaagaagatgaagatgatgatgaaggggaggaaggagaggaggatgaaggagaagatgactaaatagaacactgatggattccaaccttcctttttttaaattttctccagtccctgggagcaagttgcagtctttttttttttttttttttttttccctcttgtgctcagtcgccctgttcttgaggtctcttttctctactccatggttctcaatttatttggggggaaataccttgagcagaatacaatgggaaaagagtctctacccctttctgttcgaagttcatttttatcccttcctgtctgaacaaaaactgtatggaatcaacaccaccgagctctgtgggaaaaaagaaaaacctgctcccttcgctctgctggaagctggagggtgctaggcccctgtgtagtagtgcatagaattctagcttttttcctcctttctctgtatattgggctcagagagtacactgtgtctctatgtgaatatggacagttagcatttaccaacatgtatctgtctactttctcttgtttaaaaaaagaaaaaaaaacttaaaaaaatggggttatagaaggtcagcaaagggtgggtttgagatgtttgggtgggttaagtgggcattttgacaacatggcttctcctttggcatgtttaattgtgatatttgacagacatccttgcagtttaagatgacacttttaaaataaattctctcctaatgatgacttgagccctgccactcaatgggagaatcagcagaacctgtaggatcttatttggaattgacattctctattgtaattttgttcctgtttatttttaaattttctttttgtttcactggaaaggaaagatgatgctcagttttaaacgttaaaagtgtacaagttgctttgttacaataaaactaaatgtgtacacaaagggatttgatgcttttctctcagcataggtatgcttactatgaccttccaagtttgacttgtataacatcactgtcaaactttgtcaccctaacttcgtattttttgatacgcactttgcaggatgacctcagggctatgtggattgagtaatgggatttgaatcaatgtattaatatctccatagctgggaaacgtgggttcaatttgccattggtttctgaaagtattcacatcatttgggataccagatagctcaatactctctgagtacattgtgcccttgatttttatctccaagtggcagtttttaaaattggccttttacctggatataaattaattgtgcctgccaccaccatccaacagacctggtgctctaatgccaagttatacacgggacagttgctggcatgtcttcattggctatataaaatgtggccaagaagataggctctcagtaagaagtctgatggtgagcagtaactgtccctgctttctggtataaagctctcaaatgtgaccatgtgaatctgggtgggataatggactcagctctgtctgctcaatgccattgtgcagagaagcaccctaatgcataagctttttaatgctgtaaaatatagtcgctgaaattaaatgccactttttcagaggtgaattaatggacagtctggtgaacttcaaaagctttttgatgtataaaacttgataaatggaactattccatcaataggcaaaagtgtaacaacctatctagatggatagtatgtaatttctgcacaggtctctgtttagtaaatacatcactgtataccgatcaggaatcttgctccaataaaggaacataaagattt

SEQ ID NO: 451251 - DNA, 3074 bp, Homo sapiens
cctcgccgtaggaggaggtggaggaggaggcggctcgggagagcgagcagcgagctggctggatcgccgagcgcgagtgagggagccgagccgcccgccgccgccgcctccgcctcccctccgcgaacaggagcccgggccggggcccggcacgccgccccagcccgtccctcggcgtcaggccgcgagggtagcgcgcgcgagcgagcgagggggagggagagcgagcgagcgccgggaggaggcggccggaccgagcgggcgcccgcgcgtgtggcgtgaggggaagccgcttgcccgcccccttcgccttcccttctctccccctccccgctccccccccgaccgcggagcagcaccatgtcggcgccggcggccaaagtcagtaaaaaggagctcaactccaaccacgacggggccgacgagacctcagaaaaagaacagcaagaagcgattgaacacattgatgaagtacaaaatgaaatagacagacttaatgaacaagccagtgaggagattttgaaagtagaacagaaatataacaaactccgccaaccattttttcagaagaggtcagaattgatcgccaaaatcccaaatttttgggtaacaacatttgtcaaccatccacaagtgtctgcactgcttggggaggaagatgaagaggcactgcattatttgaccagagttgaagtgacagaatttgaagatattaaatcaggttacagaatagatttttattttgatgaaaatccttactttgaaaataaagttctctccaaagaatttcatctgaatgagagtggtgatccatcttcgaagtccaccgaaatcaaatggaaatctggaaaggatttgacgaaacgttcgagtcaaacgcagaataaagccagcaggaagaggcagcatgaggaaccagagagcttctttacctggtttactgaccattctgatgcaggtgctgatgagttaggagaggtcatcaaagatgatatttggccaaacccattacagtactacttggttcccgatatggatgatgaagaaggagaaggagaagaagatgatgatgatgatgaagaggaggaaggattagaagatattgacgaagaaggggatgaggatgaaggtgaagaagatgaagatgatgatgaaggggaggaaggagaggaggatgaaggagaagatgactaaatagaacactgatggattccaaccttcctttttttaaattttctccagtccctgggagcaagttgcagtctttttttttttttttttttttttccctcttgtgctcagtcgccctgttcttgaggtctcttttctctactccatggttctcaatttatttggggggaaataccttgagcagaatacaatgggaaaagagtctctacccctttctgttcgaagttcatttttatcccttcctgtctgaacaaaaactgtatggaatcaacaccaccgagctctgtgggaaaaaagaaaaacctgctcccttcgctctgctggaagctggagggtgctaggcccctgtgtagtagtgcatagaattctagcttttttcctcctttctctgtatattgggctcagagagtacactgtgtctctatgtgaatatggacagttagcatttaccaacatgtatctgtctactttctcttgtttaaaaaaagaaaaaaaaacttaaaaaaatggggttatagaaggtcagcaaagggtgggtttgagatgtttgggtgggttaagtgggcattttgacaacatggcttctcctttggcatgtttaattgtgatatttgacagacatccttgcagtttaagatgacacttttaaaataaattctctcctaatgatgacttgagccctgccactcaatgggagaatcagcagaacctgtaggatcttatttggaattgacattctctattgtaattttgttcctgtttatttttaaattttctttttgtttcactggaaaggaaagatgatgctcagttttaaacgttaaaagtgtacaagttgctttgttacaataaaactaaatgtgtacacaaagggatttgatgcttttctctcagcataggtatgcttactatgaccttccaagtttgacttgtataacatcactgtcaaactttgtcaccctaacttcgtattttttgatacgcactttgcaggatgacctcagggctatgtggattgagtaatgggatttgaatcaatgtattaatatctccatagctgggaaacgtgggttcaatttgccattggtttctgaaagtattcacatcatttgggataccagatagctcaatactctctgagtacattgtgcccttgatttttatctccaagtggcagtttttaaaattggccttttacctggatataaattaattgtgcctgccaccaccatccaacagacctggtgctctaatgccaagttatacacgggacagttgctggcatgtcttcattggctatataaaatgtggccaagaagataggctctcagtaagaagtctgatggtgagcagtaactgtccctgctttctggtataaagctctcaaatgtgaccatgtgaatctgggtgggataatggactcagctctgtctgctcaatgccattgtgcagagaagcaccctaatgcataagctttttaatgctgtaaaatatagtcgctgaaattaaatgccactttttcagaggtgaattaatggacagtctggtgaacttcaaaagctttttgatgtataaaacttgataaatggaactattccatcaataggcaaaagtgtaacaacctatctagatggatagtatgtaatttctgcacaggtctctgtttagtaaatacatcactgtataccgatcaggaatcttgctccaataaaggaacataaagatttaaaaaatcaccaacaaaaccaaaccacaacccacaccctaacacctccacccccacttacaccaaccacacctcaaaccaacaacacaccccaaaaacccaatgcgctcccgctcccccatcacccacacctccacccccccccacagctgcccct

SEQ ID NO: 451252 - DNA, 2675 bp, Homo sapiens
gcggccgccccgtcgcgccagcgtgcggagaaacctggcgccgcgaccagtgtatcgggggtcttggaaatggctaagaaagctggcctctgcctaggaggctctcggcaggggggctgccaatccgggatggttaccggaaatgaaccgcgcgatctggccctttcacacccacttagctttgtaggggaaaaagaacagcaagaagcgattgaacacattgatgaagtacaaaatgaaatagacagacttaatgaacaagccagtgaggagattttgaaagtagaacagaaatataacaaactccgccaaccattttttcagaagaggtcagaattgatcgccaaaatcccaaatttttgggtaacaacatttgtcaaccatccacaagtgtctgcactgcttggggaggaagatgaagaggcactgcattatttgaccagagttgaagtgacagaatttgaagatattaaatcaggttacagaatagatttttattttgatgaaaatccttactttgaaaataaagttctctccaaagaatttcatctgaatgagagtggtgatccatcttcgaagtccaccgaaatcaaatggaaatctggaaaggatttgacgaaacgttcgagtcaaacgcagaataaagccagcaggaagaggcagcatgaggaaccagagagcttctttacctggtttactgaccattctgatgcaggtgctgatgagttaggagaggtcatcaaagatgatatttggccaaacccattacagtactacttggttcccgatatggatgatgaagaaggagaaggagaagaagatgatgatgatgatgaagaggaggaaggattagaagatattgacgaagaaggggatgaggatgaaggtgaagaagatgaagatgatgatgaaggggaggaaggagaggaggatgaaggagaagatgactaaatagaacactgatggattccaaccttcctttttttaaattttctccagtccctgggagcaagttgcagtctttttttttttttttttttttttccctcttgtgctcagtcgccctgttcttgaggtctcttttctctactccatggttctcaatttatttggggggaaataccttgagcagaatacaatgggaaaagagtctctacccctttctgttcgaagttcatttttatcccttcctgtctgaacaaaaactgtatggaatcaacaccaccgagctctgtgggaaaaaagaaaaacctgctcccttcgctctgctggaagctggagggtgctaggcccctgtgtagtagtgcatagaattctagcttttttcctcctttctctgtatattgggctcagagagtacactgtgtctctatgtgaatatggacagttagcatttaccaacatgtatctgtctactttctcttgtttaaaaaaagaaaaaaaaacttaaaaaaatggggttatagaaggtcagcaaagggtgggtttgagatgtttgggtgggttaagtgggcattttgacaacatggcttctcctttggcatgtttaattgtgatatttgacagacatccttgcagtttaagatgacacttttaaaataaattctctcctaatgatgacttgagccctgccactcaatgggagaatcagcagaacctgtaggatcttatttggaattgacattctctattgtaattttgttcctgtttatttttaaattttctttttgtttcactggaaaggaaagatgatgctcagttttaaacgttaaaagtgtacaagttgctttgttacaataaaactaaatgtgtacacaaagggatttgatgcttttctctcagcataggtatgcttactatgaccttccaagtttgacttgtataacatcactgtcaaactttgtcaccctaacttcgtattttttgatacgcactttgcaggatgacctcagggctatgtggattgagtaatgggatttgaatcaatgtattaatatctccatagctgggaaacgtgggttcaatttgccattggtttctgaaagtattcacatcatttgggataccagatagctcaatactctctgagtacattgtgcccttgatttttatctccaagtggcagtttttaaaattggccttttacctggatataaattaattgtgcctgccaccaccatccaacagacctggtgctctaatgccaagttatacacgggacagttgctggcatgtcttcattggctatataaaatgtggccaagaagataggctctcagtaagaagtctgatggtgagcagtaactgtccctgctttctggtataaagctctcaaatgtgaccatgtgaatctgggtgggataatggactcagctctgtctgctcaatgccattgtgcagagaagcaccctaatgcataagctttttaatgctgtaaaatatagtcgctgaaattaaatgccactttttcagaggtgaattaatggacagtctggtgaacttcaaaagctttttgatgtataaaacttgataaatggaactattccatcaataggcaaaagtgtaacaacctatctagatggatagtatgtaatttctgcacaggtctctgtttagtaaatacatcactgtataccgatcaggaatcttgctccaataaaggaacataaagattt

SEQ ID NO: 451253 - DNA, 3351 bp, Homo sapiens
cctcgccgtaggaggaggtggaggaggaggcggctcgggagagcgagcagcgagctggctggatcgccgagcgcgagtgagggagccgagccgcccgccgccgccgcctccgcctcccctccgcgaacaggagcccgggccggggcccggcacgccgccccagcccgtccctcggcgtcaggccgcgagggtagcgcgcgcgagcgagcgagggggagggagagcgagcgagcgccgggaggaggcggccggaccgagcgggcgcccgcgcgtgtggcgtgaggggaagccgcttgcccgcccccttcgccttcccttctctccccctccccgctccccccccgaccgcggagcagcaccatgtcggcgccggcggccaaagtcagtaaaaaggagctcaactccaaccacgacggggccgacgagacctcagaaaaagaacagcaagaagcgattgaacacattgatgaagtacaaaatgaaatagacagacttaatgaacaagccagtgaggagattttgaaagtagaacagaaatataacaaactccgccaaccattttttcagaagaggtcagaattgatcgccaaaatcccaaatttttgggtaacaacatttgtcaaccatccacaagtgtctgcactgcttggggaggaagatgaagaggcactgcattatttgaccagagttgaagtgacagaatttgaagatattaaatcaggttacagaatagatttttattttgatgaaaatccttactttgaaaataaagttctctccaaagaatttcatctgaatgagagtggtgatccatcttcgaagtccaccgaaatcaaatggaaatctggaaaggatttgacgaaacgttcgagtcaaacgcagaataaagccagcaggaagaggcagcatgaggaaccagagagcttctttacctggtttactgaccattctgatgcaggtgctgatgagttaggagaggtcatcaaagatgatatttggccaaacccattacagtactacttggttcccgatatggatgatgaagaaggagaaggagaagaagatgatgatgatgatgaagaggaggaaggattagaagatattgacgaagaaggggatgaggatgaaggtgaagaagatgaagatgatgatgaaggggaggaaggagaggaggatgaaggagaagatgactaaatagaacactgatggattccaaccttcctttttttaaattttctccagtccctgggagcaagttgcagtctttttttttttttttttttttttccctcttgtgctcagtcgccctgttcttgaggtctcttttctctactccatggttctcaatttatttggggggaaataccttgagcagaatacaatgggaaaagagtctctacccctttctgttcgaagttcatttttatcccttcctgtctgaacaaaaactgtatggaatcaacaccaccgagctctgtgggaaaaaagaaaaacctgctcccttcgctctgctggaagctggagggtgctaggcccctgtgtagtagtgcatagaattctagcttttttcctcctttctctgtatattgggctcagagagtacactgtgtctctatgtgaatatggacagttagcatttaccaacatgtatctgtctactttctcttgtttaaaaaaagaaaaaaaaacttaaaaaaatggggttatagaaggtcagcaaagggtgggtttgagatgtttgggtgggttaagtgggcattttgacaacatggcttctcctttggcatgtttaattgtgatatttgacagacatccttgcagtttaagatgacacttttaaaataaattctctcctaatgatgacttgagccctgccactcaatgggagaatcagcagaacctgtaggatcttatttggaattgacattctctattgtaattttgttcctgtttatttttaaattttctttttgtttcactggaaaggaaagatgatgctcagttttaaacgttaaaagtgtacaagttgctttgttacaataaaactaaatgtgtacacaaagggatttgatgcttttctctcagcataggtatgcttactatgaccttccaagtttgacttgtataacatcactgtcaaactttgtcaccctaacttcgtattttttgatacgcactttgcaggatgacctcagggctatgtggattgagtaatgggatttgaatcaatgtattaatatctccatagctgggaaacgtgggttcaatttgccattggtttctgaaagtattcacatcatttgggataccagatagctcaatactctctgagtacattgtgcccttgatttttatctccaagtggcagtttttaaaattggccttttacctggatataaattaattgtgcctgccaccaccatccaacagacctggtgctctaatgccaagttatacacgggacagttgctggcatgtcttcattggctatataaaatgtggccaagaagataggctctcagtaagaagtctgatggtgagcagtaactgtccctgctttctggtataaagctctcaaatgtgaccatgtgaatctgggtgggataatggactcagctctgtctgctcaatgccattgtgcagagaagcaccctaatgcataagctttttaatgctgtaaaatatagtcgctgaaattaaatgccactttttcagaggtgaattaatggacagtctggtgaacttcaaaagctttttgatgtataaaacttgataaatggaactattccatcaataggcaaaagtgtaacaacctatctagatggatagtatgtaatttctgcacaggtctctgtttagtaaatacatcactgtataccgatcaggaatcttgctccaataaaggaacataaagatttaaaaaaaaaaaaaaaaaaaaaaaaaaaaaacaaaaaagaaaaacaaaaaaaaaaaaaaaaaagaaaaaaaaacaaaaaaaagaaaggaggggagacagaaacaaaaaaaaaaaacaaggaggaaccacaaaaaacaagagaagacacacccacacaagaagagaccgcgaccacgcacctcaacgaaaagcgcagaagagcatgcagaagcagagaacactacacgcaaagctaacaacccacagtcgagtgacaagaacacgaacacaggaaggcgcagcgataagcgaacaaacacaacaaataatgactaagacaacaagagactaggctgactcttgttcaccaccgtaaagagaggacgcaccgacagcgtaacacatgcagcagcactgagtgacgcagccagtcacaagtaggcgcaccaacagga

SEQ ID NO: 451254 - DNA, 2467 bp, Homo sapiens
  misc_feature (32)..(32): n is a, c, g, or t
tcgagcggccgcccgggcgggcacaaaatganatagacagacttaatgaacaagccagtgaggagattttgaaagtagaacagaaatataacaaactccgccaaccattttttcagaagaggtcagaattgatcgccaaaatcccaaatttttgggtaacaacatttgtcaaccatccacaagtgtctgcactgcttggggaggaagatgaagaggcactgcattatttgaccagagttgaagtgacagaatttgaagatattaaatcaggttacagaatagatttttattttgatgaaaatccttactttgaaaataaagttctctccaaagaatttcatctgaatgagagtggtgatccatcttcgaagtccaccgaaatcaaatggaaatctggaaaggatttgacgaaacgttcgagtcaaacgcagaataaagccagcaggaagaggcagcatgaggaaccagagagcttctttacctggtttactgaccattctgatgcaggtgctgatgagttaggagaggtcatcaaagatgatatttggccaaacccattacagtactacttggttcccgatatggatgatgaagaaggagaaggagaagaagatgatgatgatgatgaagaggaggaaggattagaagatattgacgaagaaggggatgaggatgaaggtgaagaagatgaagatgatgatgaaggggaggaaggagaggaggatgaaggagaagatgactaaatagaacactgatggattccaaccttcctttttttaaattttctccagtccctgggagcaagttgcagtctttttttttttttttttttttttccctcttgtgctcagtcgccctgttcttgaggtctcttttctctactccatggttctcaatttatttggggggaaataccttgagcagaatacaatgggaaaagagtctctacccctttctgttcgaagttcatttttatcccttcctgtctgaacaaaaactgtatggaatcaacaccaccgagctctgtgggaaaaaagaaaaacctgctcccttcgctctgctggaagctggagggtgctaggcccctgtgtagtagtgcatagaattctagcttttttcctcctttctctgtatattgggctcagagagtacactgtgtctctatgtgaatatggacagttagcatttaccaacatgtatctgtctactttctcttgtttaaaaaaagaaaaaaaaacttaaaaaaatggggttatagaaggtcagcaaagggtgggtttgagatgtttgggtgggttaagtgggcattttgacaacatggcttctcctttggcatgtttaattgtgatatttgacagacatccttgcagtttaagatgacacttttaaaataaattctctcctaatgatgacttgagccctgccactcaatgggagaatcagcagaacctgtaggatcttatttggaattgacattctctattgtaattttgttcctgtttatttttaaattttctttttgtttcactggaaaggaaagatgatgctcagttttaaacgttaaaagtgtacaagttgctttgttacaataaaactaaatgtgtacacaaagggatttgatgcttttctctcagcataggtatgcttactatgaccttccaagtttgacttgtataacatcactgtcaaactttgtcaccctaacttcgtattttttgatacgcactttgcaggatgacctcagggctatgtggattgagtaatgggatttgaatcaatgtattaatatctccatagctgggaaacgtgggttcaatttgccattggtttctgaaagtattcacatcatttgggataccagatagctcaatactctctgagtacattgtgcccttgatttttatctccaagtggcagtttttaaaattggccttttacctggatataaattaattgtgcctgccaccaccatccaacagacctggtgctctaatgccaagttatacacgggacagttgctggcatgtcttcattggctatataaaatgtggccaagaagataggctctcagtaagaagtctgatggtgagcagtaactgtccctgctttctggtataaagctctcaaatgtgaccatgtgaatctgggtgggataatggactcagctctgtctgctcaatgccattgtgcagagaagcaccctaatgcataagctttttaatgctgtaaaatatagtcgctgaaattaaatgccactttttcagaggtgaattaatggacagtctggtgaacttcaaaagctttttgatgtataaaacttgataaatggaactattccatcaataggcaaaagtgtaacaacctatctagatggatagtatgtaatttctgcacaggtctctgtttagtaaatacatcactgtataccgatcaggaatcttgctccaataaaggaacataaagattt

SEQ ID NO: 451255 - DNA, 2320 bp, Homo sapiens
tataacataacttggttcccgatatggatgatgaagaaggagaaggagaagaagatgaagatgaagaggcactgcattatttgaccagagttgaagtgacagaatttgaagatattaaatcaggttacagaatagatttttattttgatgaaaatccttactttgaaaataaagttctctccaaagaatttcatctgaatgagagtggtgatccatcttcgaagtccaccgaaatcaaatggaaatctggaaaggatttgacgaaacgttcgagtcaaacgcagaataaagccagcaggaagaggcagcatgaggaaccagagagcttctttacctggtttactgaccattctgatgcaggtgctgatgagttaggagaggtcatcaaagatgatatttggccaaacccattacagtactacttggttcccgatatggatgatgaagaaggagaaggagaagaagatgatgatgatgatgaagaggaggaaggattagaagatattgacgaagaaggggatgaggatgaaggtgaagaagatgaagatgatgatgaaggggaggaaggagaggaggatgaaggagaagatgactaaatagaacactgatggattccaaccttcctttttttaaattttctccagtccctgggagcaagttgcagtctttttttttttttttttttttttccctcttgtgctcagtcgccctgttcttgaggtctcttttctctactccatggttctcaatttatttggggggaaataccttgagcagaatacaatgggaaaagagtctctacccctttctgttcgaagttcatttttatcccttcctgtctgaacaaaaactgtatggaatcaacaccaccgagctctgtgggaaaaaagaaaaacctgctcccttcgctctgctggaagctggagggtgctaggcccctgtgtagtagtgcatagaattctagcttttttcctcctttctctgtatattgggctcagagagtacactgtgtctctatgtgaatatggacagttagcatttaccaacatgtatctgtctactttctcttgtttaaaaaaagaaaaaaaaacttaaaaaaatggggttatagaaggtcagcaaagggtgggtttgagatgtttgggtgggttaagtgggcattttgacaacatggcttctcctttggcatgtttaattgtgatatttgacagacatccttgcagtttaagatgacacttttaaaataaattctctcctaatgatgacttgagccctgccactcaatgggagaatcagcagaacctgtaggatcttatttggaattgacattctctattgtaattttgttcctgtttatttttaaattttctttttgtttcactggaaaggaaagatgatgctcagttttaaacgttaaaagtgtacaagttgctttgttacaataaaactaaatgtgtacacaaagggatttgatgcttttctctcagcataggtatgcttactatgaccttccaagtttgacttgtataacatcactgtcaaactttgtcaccctaacttcgtattttttgatacgcactttgcaggatgacctcagggctatgtggattgagtaatgggatttgaatcaatgtattaatatctccatagctgggaaacgtgggttcaatttgccattggtttctgaaagtattcacatcatttgggataccagatagctcaatactctctgagtacattgtgcccttgatttttatctccaagtggcagtttttaaaattggccttttacctggatataaattaattgtgcctgccaccaccatccaacagacctggtgctctaatgccaagttatacacgggacagttgctggcatgtcttcattggctatataaaatgtggccaagaagataggctctcagtaagaagtctgatggtgagcagtaactgtccctgctttctggtataaagctctcaaatgtgaccatgtgaatctgggtgggataatggactcagctctgtctgctcaatgccattgtgcagagaagcaccctaatgcataagctttttaatgctgtaaaatatagtcgctgaaattaaatgccactttttcagaggtgaattaatggacagtctggtgaacttcaaaagctttttgatgtataaaacttgataaatggaactattccatcaataggcaaaagtgtaacaacctatctagatggatagtatgtaatttctgcacaggtctctgtttagtaaatacatcactgtataccgatcaggaatcttgctccaataaaggaacataaagattt

SEQ ID NO: 451256 - DNA, 2087 bp, Homo sapiens
gctcttccggtattcatttaggatttgacgaaacgttcgagtcaaacgcagaataaagccagcaggaagaggcagcatgaggaaccagagagcttctttacctggtttactgaccattctgatgcaggtgctgatgagttaggagaggtcatcaaagatgatatttggccaaacccattacagtactacttggttcccgatatggatgatgaagaaggagaaggagaagaagatgatgatgatgatgaagaggaggaaggattagaagatattgacgaagaaggggatgaggatgaaggtgaagaagatgaagatgatgatgaaggggaggaaggagaggaggatgaaggagaagatgactaaatagaacactgatggattccaaccttcctttttttaaattttctccagtccctgggagcaagttgcagtctttttttttttttttttttttttccctcttgtgctcagtcgccctgttcttgaggtctcttttctctactccatggttctcaatttatttggggggaaataccttgagcagaatacaatgggaaaagagtctctacccctttctgttcgaagttcatttttatcccttcctgtctgaacaaaaactgtatggaatcaacaccaccgagctctgtgggaaaaaagaaaaacctgctcccttcgctctgctggaagctggagggtgctaggcccctgtgtagtagtgcatagaattctagcttttttcctcctttctctgtatattgggctcagagagtacactgtgtctctatgtgaatatggacagttagcatttaccaacatgtatctgtctactttctcttgtttaaaaaaagaaaaaaaaacttaaaaaaatggggttatagaaggtcagcaaagggtgggtttgagatgtttgggtgggttaagtgggcattttgacaacatggcttctcctttggcatgtttaattgtgatatttgacagacatccttgcagtttaagatgacacttttaaaataaattctctcctaatgatgacttgagccctgccactcaatgggagaatcagcagaacctgtaggatcttatttggaattgacattctctattgtaattttgttcctgtttatttttaaattttctttttgtttcactggaaaggaaagatgatgctcagttttaaacgttaaaagtgtacaagttgctttgttacaataaaactaaatgtgtacacaaagggatttgatgcttttctctcagcataggtatgcttactatgaccttccaagtttgacttgtataacatcactgtcaaactttgtcaccctaacttcgtattttttgatacgcactttgcaggatgacctcagggctatgtggattgagtaatgggatttgaatcaatgtattaatatctccatagctgggaaacgtgggttcaatttgccattggtttctgaaagtattcacatcatttgggataccagatagctcaatactctctgagtacattgtgcccttgatttttatctccaagtggcagtttttaaaattggccttttacctggatataaattaattgtgcctgccaccaccatccaacagacctggtgctctaatgccaagttatacacgggacagttgctggcatgtcttcattggctatataaaatgtggccaagaagataggctctcagtaagaagtctgatggtgagcagtaactgtccctgctttctggtataaagctctcaaatgtgaccatgtgaatctgggtgggataatggactcagctctgtctgctcaatgccattgtgcagagaagcaccctaatgcataagctttttaatgctgtaaaatatagtcgctgaaattaaatgccactttttcagaggtgaattaatggacagtctggtgaacttcaaaagctttttgatgtataaaacttgataaatggaactattccatcaataggcaaaagtgtaacaacctatctagatggatagtatgtaatttctgcacaggtctctgtttagtaaatacatcactgtataccgatcaggaatcttgctccaataaaggaacataaagattt

SEQ ID NO: 451257 - DNA, 1930 bp, Homo sapiens
gggggtgatctagaggatcccggtatacataactggttcccgatatggatgatgaagaaggagaaggagaagaagatgatgatgatgatgaagaggaggaaggattagaagatattgacgaagaaggggatgaggatgaaggtgaagaagatgaagatgatgatgaaggggaggaaggagaggaggatgaaggagaagatgactaaatagaacactgatggattccaaccttcctttttttaaattttctccagtccctgggagcaagttgcagtctttttttttttttttttttttttccctcttgtgctcagtcgccctgttcttgaggtctcttttctctactccatggttctcaatttatttggggggaaataccttgagcagaatacaatgggaaaagagtctctacccctttctgttcgaagttcatttttatcccttcctgtctgaacaaaaactgtatggaatcaacaccaccgagctctgtgggaaaaaagaaaaacctgctcccttcgctctgctggaagctggagggtgctaggcccctgtgtagtagtgcatagaattctagcttttttcctcctttctctgtatattgggctcagagagtacactgtgtctctatgtgaatatggacagttagcatttaccaacatgtatctgtctactttctcttgtttaaaaaaagaaaaaaaaacttaaaaaaatggggttatagaaggtcagcaaagggtgggtttgagatgtttgggtgggttaagtgggcattttgacaacatggcttctcctttggcatgtttaattgtgatatttgacagacatccttgcagtttaagatgacacttttaaaataaattctctcctaatgatgacttgagccctgccactcaatgggagaatcagcagaacctgtaggatcttatttggaattgacattctctattgtaattttgttcctgtttatttttaaattttctttttgtttcactggaaaggaaagatgatgctcagttttaaacgttaaaagtgtacaagttgctttgttacaataaaactaaatgtgtacacaaagggatttgatgcttttctctcagcataggtatgcttactatgaccttccaagtttgacttgtataacatcactgtcaaactttgtcaccctaacttcgtattttttgatacgcactttgcaggatgacctcagggctatgtggattgagtaatgggatttgaatcaatgtattaatatctccatagctgggaaacgtgggttcaatttgccattggtttctgaaagtattcacatcatttgggataccagatagctcaatactctctgagtacattgtgcccttgatttttatctccaagtggcagtttttaaaattggccttttacctggatataaattaattgtgcctgccaccaccatccaacagacctggtgctctaatgccaagttatacacgggacagttgctggcatgtcttcattggctatataaaatgtggccaagaagataggctctcagtaagaagtctgatggtgagcagtaactgtccctgctttctggtataaagctctcaaatgtgaccatgtgaatctgggtgggataatggactcagctctgtctgctcaatgccattgtgcagagaagcaccctaatgcataagctttttaatgctgtaaaatatagtcgctgaaattaaatgccactttttcagaggtgaattaatggacagtctggtgaacttcaaaagctttttgatgtataaaacttgataaatggaactattccatcaataggcaaaagtgtaacaacctatctagatggatagtatgtaatttctgcacaggtctctgtttagtaaatacatcactgtataccgatcaggaatcttgctccaataaaggaacataaagattt

SEQ ID NO: 451258 - DNA, 2655 bp, Homo sapiens
cctcgccgtaggaggaggtggaggaggaggcggctcgggagagcgagcagcgagctggctggatcgccgagcgcgagtgagggagccgagccgcccgccgccgccgcctccgcctcccctccgcgaacaggagcccgggccggggcccggcacgccgccccagcccgtccctcggcgtcaggccgcgagggtagcgcgcgcgagcgagcgagggggagggagagcgagcgagcgccgggaggaggcggccggaccgagcgggcgcccgcgcgtgtggcgtgaggggaagccgcttgcccgcccccttcgccttcccttctctccccctccccgctccccccccgaccgcggagcagcaccatgtcggcgccggcggccaaagtcagtaaaaaggagctcaactccaaccacgacggggccgacgagacctcagaaaaagaacagcaagaagcgattgaacacattgatgaagtacaaaatgaaatagacagacttaatgaacaagccagtgaggagattttgaaagtagaacagaaatataacaaactccgccaaccattttttcagaagaggtcagaattgatcgccaaaatcccaaatttttgggtaacaacatttgtcaaccatccacaagtgtctgcactgcttggggaggaagatgaagaggcactgcattatttgaccagagttgaagtgacagaatttgaagatattaaatcaggttacagaatagatttttattttgatgaaaatccttactttgaaaataaagttctctccaaagaatttcatctgaatgagagtggtgatccatcttcgaagtccaccgaaatcaaatggaaatctggaaaggatttgacgaaacgttcgagtcaaacgcagaataaagccagcaggaagaggcagcatgaggaaccagagagcttctttacctggtttactgaccattctgatgcaggtgctgatgagttaggagaggtcatcaaagatgatatttggccaaacccattacagtactacttggttcccgatatggatgatgaagaaggagaaggagaagaagatgatgatgatgatgaagaggaggaaggattagaagatattgacgaagaaggggatgaggatgaaggtgaagaagatgaagatgatgatgaaggggaggaaggagaggaggatgaaggagaagatgactaaatagaacactgatggattccaaccttcctttttttaaattttctccagtccctgggagcaagttgcagtctttttttttttttttttttttttccctcttgtgctcagtcgccctgttcttgaggtatattgggctcagagagtacactgtgtctctatgtgaatatggacagttagcatttaccaacatgtatctgtctactttctcttgtttaaaaaaagaaaaaaaaacttaaaaaaatggggttatagaaggtcagcaaagggtgggtttgagatgtttgggtgggttaagtgggcattttgacaacatggcttctcctttggcatgtttaattgtgatatttgacagacatccttgcagtttaagatgacacttttaaaataaattctctcctaatgatgacttgagccctgccactcaatgggagaatcagcagaacctgtaggatcttatttggaattgacattctctattgtaattttgttcctgtttatttttaaattttctttttgtttcactggaaaggaaagatgatgctcagttttaaacgttaaaagtgtacaagttgctttgttacaataaaactaaatgtgtacacaaagggatttgatgcttttctctcagcataggtatgcttactatgaccttccaagtttgacttgtataacatcactgtcaaactttgtcaccctaacttcgtattttttgatacgcactttgcaggatgacctcagggctatgtggattgagtaatgggatttgaatcaatgtattaatatctccatagctgggaaacgtgggttcaatttgccattggtttctgaaagtattcacatcatttgggataccagatagctcaatactctctgagtacattgtgcccttgatttttatctccaagtggcagtttttaaaattggccttttacctggatataaattaattgtgcctgccaccaccatccaacagacctggtgctctaatgccaagttatacacgggacagttgctggcatgtcttcattggctatataaaatgtggccaagaagataggctctcagtaagaagtctgatggtgagcagtaactgtccctgctttctggtataaagctctcaaatgtgaccatgtgaatctgggtgggataatggactcagctctgtctgctcaatgccattgtgcagagaagcaccctaatgcataagctttttaatgctgtaaaatatagtcgctgaaattaaatgccactttttcagaggtgaattaatggacagtctggtgaacttcaaaagctttttgatgtataaaacttgataaatggaactattccatcaataggcaaaagtgtaacaacctatctagatggatagtatgtaatttctgcacaggtctctgtttagtaaatacatcactgtataccgatcaggaatcttgctccaataaaggaacataaagattt

SEQ ID NO: 451259 - DNA, 2062 bp, Homo sapiens
cctcgccgtaggaggaggtggaggaggaggcggctcgggagagcgagcagcgagctggctggatcgccgagcgcgagtgagggagccgagccgcccgccgccgccgcctccgcctcccctccgcgaacaggagcccgggccggggcccggcacgccgccccagcccgtccctcggcgtcaggccgcgagggtagcgcgcgcgagcgagcgagggggagggagagcgagcgagcgccgggaggaggcggccggaccgagcgggcgcccgcgcgtgtggcgtgaggggaagccgcttgcccgcccccttcgccttcccttctctccccctccccgctccccccccgaccgcggagcagcaccatgtcggcgccggcggccaaagtcagtaaaaaggagctcaactccaaccacgacggggccgacgagacctcagaaaaagaacagcaagaagcgattgaacacattgatgaagtacaaaatgaaatagacagacttaatgaacaagccagtgaggagattttgaaagtagaacagaaatataacaaactccgccaaccattttttcagaagaggtcagaattgatcgccaaaatcccaaatttttgggtaacaacatttgtcaaccatccacaagtgtctgcactgcttggggaggaagatgaagaggcactgcattatttgaccagagttgaagtgacagaatttgaagatattaaatcaggttacagaatagatttttattttgatgaaaatccttactttgaaaataaagttctctccaaagaatttcatctgaatgagagtggtgatccatcttcgaagtccaccgaaatcaaatggaaatctggaaaggatttgacgaaacgttcgagtcaaacgcagaataaagccagcaggaagaggcagcatgaggaaccagagagcttctttacctggtttactgaccattctgatgcaggtgctgatgagttaggagaggtcatcaaagatgatatttggccaaacccattacagtactacttggttcccgatatggatgatgaagaaggagaaggagaagaagatgatgatgatgatgaagaggaggaaggattagaagatattgacgaagaaggggatgaggatgaaggtgaagaagatgaagatgatgatgaaggggaggaaggagaggaggatgaaggagaagatgactaaatagaacactgatggattccaaccttcctttttttaaattttctccagtccctgggagcaagttgcagtctttttttttttttttttttttttccctcttgtgctcagtcgccctgttcttgaggtctcttttctctactccatggttctcaatttatttggggggaaataccttgagcagaatacaatgggaaaagagtctctacccctttctgttcgaagttcatttttatcccttcctgtctgaacaaaaactgtatggaatcaacaccaccgagctctgtgggaaaaaagaaaaacctgctcccttcgctctgctggaagctggagggtgctaggcccctgtgtagtagtgcatagaattctagcttttttcctcctttctctgtatattgggctcagagagtacactgtgtctctatgtgaatatggacagttagcatttaccaacatgtatctgtctactttctcttgtttaaaaaaagaaaaaaaaacttaaaaaaatggggttatagaaggtcagcaaagggtgggtttgagatgtttgggtgggttaagtgggcattttgacaacatggcttctcctttggcatgtttaattgtgatatttgacagacatccttgcagtttaagatgacacttttaaaataaattctctcctaatgatgacttgagccctgccactcaatgggagaatcagcagaacctgtaggatcttatttggaattgacattctctattgtaattttgttcctgtttatttttaaattttctttttgtttcactggaaaggaaagatgatgctcagttttaaacgttaaaagtgtacaagttgctttgttacaataaaactaaatgtgtacacaaa

SEQ ID NO: 451260 - DNA, 1669 bp, Homo sapiens
ctcagagagtacactgtgtctctatgtgaatatggagagttagcatttacctacacgtatctgtctactgtctcttttctctactccatggttctcaatttatttggggggaaataccttgagcagaatacaatgggaaaagagtctctacccctttctgttcgaagttcatttttatcccttcctgtctgaacaaaaactgtatggaatcaacaccaccgagctctgtgggaaaaaagaaaaacctgctcccttcgctctgctggaagctggagggtgctaggcccctgtgtagtagtgcatagaattctagcttttttcctcctttctctgtatattgggctcagagagtacactgtgtctctatgtgaatatggacagttagcatttaccaacatgtatctgtctactttctcttgtttaaaaaaagaaaaaaaaacttaaaaaaatggggttatagaaggtcagcaaagggtgggtttgagatgtttgggtgggttaagtgggcattttgacaacatggcttctcctttggcatgtttaattgtgatatttgacagacatccttgcagtttaagatgacacttttaaaataaattctctcctaatgatgacttgagccctgccactcaatgggagaatcagcagaacctgtaggatcttatttggaattgacattctctattgtaattttgttcctgtttatttttaaattttctttttgtttcactggaaaggaaagatgatgctcagttttaaacgttaaaagtgtacaagttgctttgttacaataaaactaaatgtgtacacaaagggatttgatgcttttctctcagcataggtatgcttactatgaccttccaagtttgacttgtataacatcactgtcaaactttgtcaccctaacttcgtattttttgatacgcactttgcaggatgacctcagggctatgtggattgagtaatgggatttgaatcaatgtattaatatctccatagctgggaaacgtgggttcaatttgccattggtttctgaaagtattcacatcatttgggataccagatagctcaatactctctgagtacattgtgcccttgatttttatctccaagtggcagtttttaaaattggccttttacctggatataaattaattgtgcctgccaccaccatccaacagacctggtgctctaatgccaagttatacacgggacagttgctggcatgtcttcattggctatataaaatgtggccaagaagataggctctcagtaagaagtctgatggtgagcagtaactgtccctgctttctggtataaagctctcaaatgtgaccatgtgaatctgggtgggataatggactcagctctgtctgctcaatgccattgtgcagagaagcaccctaatgcataagctttttaatgctgtaaaatatagtcgctgaaattaaatgccactttttcagaggtgaattaatggacagtctggtgaacttcaaaagctttttgatgtataaaacttgataaatggaactattccatcaataggcaaaagtgtaacaacctatctagatggatagtatgtaatttctgcacaggtctctgtttagtaaatacatcactgtataccgatcaggaatcttgctccaataaaggaacataaagattt

SEQ ID NO: 451261 - DNA, 1732 bp, Homo sapiens
cctcgccgtaggaggaggtggaggaggaggcggctcgggagagcgagcagcgagctggctggatcgccgagcgcgagtgagggagccgagccgcccgccgccgccgcctccgcctcccctccgcgaacaggagcccgggccggggcccggcacgccgccccagcccgtccctcggcgtcaggccgcgagggtagcgcgcgcgagcgagcgagggggagggagagcgagcgagcgccgggaggaggcggccggaccgagcgggcgcccgcgcgtgtggcgtgaggggaagccgcttgcccgcccccttcgccttcccttctctccccctccccgctccccccccgaccgcggagcagcaccatgtcggcgccggcggccaaagtcagtaaaaaggagctcaactccaaccacgacggggccgacgagacctcagaaaaagaacagcaagaagcgattgaacacattgatgaagtacaaaatgaaatagacagacttaatgaacaagccagtgaggagattttgaaagtagaacagaaatataacaaactccgccaaccattttttcagaagaggtcagaattgatcgccaaaatcccaaatttttgggtaacaacatttgtcaaccatccacaagtgtctgcactgcttggggaggaagatgaagaggcactgcattatttgaccagagttgaagtgacagaatttgaagatattaaatcaggttacagaatagatttttattttgatgaaaatccttactttgaaaataaagttctctccaaagaatttcatctgaatgagagtggtgatccatcttcgaagtccaccgaaatcaaatggaaatctggaaaggatttgacgaaacgttcgagtcaaacgcagaataaagccagcaggaagaggcagcatgaggaaccagagagcttctttacctggtttactgaccattctgatgcaggtgctgatgagttaggagaggtcatcaaagatgatatttggccaaacccattacagtactacttggttcccgatatggatgatgaagaaggagaaggagaagaagatgatgatgatgatgaagaggaggaaggattagaagatattgacgaagaaggggatgaggatgaaggtgaagaagatgaagatgatgatgaaggggaggaaggagaggaggatgaaggagaagatgactaaatagaacactgatggattccaaccttcctttttttaaattttctccagtccctgggagcaagttgcagtctttttttttttttttttttttttccctcttgtgctcagtcgccctgttcttgaggtctcttttctctactccatggttctcaatttatttggggggaaataccttgagcagaatacaatgggaaaagagtctctacccctttctgttcgaagttcatttttatcccttcctgtctgaacaaaaactgtatggaatcaacaccaccgagctctgtgggaaaaaagaaaaacctgctcccttcgctctgctggaagctggagggtgctaggcccctgtgtagtagtgcatagaattctagcttttttcctcctttctctgtatattgggctcagagagtacactgtgtctctatgtgaatatggacagttagcatttaccaacatgtatctgtctactttctcttgtttaaaaaaagaaaaaaaaacttaatagatatagcagacgctgcagtttatcctcaagagtcag

SEQ ID NO: 451262 - DNA, 1780 bp, Homo sapiens
cctcgccgtaggaggaggtggaggaggaggcggctcgggagagcgagcagcgagctggctggatcgccgagcgcgagtgagggagccgagccgcccgccgccgccgcctccgcctcccctccgcgaacaggagcccgggccggggcccggcacgccgccccagcccgtccctcggcgtcaggccgcgagggtagcgcgcgcgagcgagcgagggggagggagagcgagcgagcgccgggaggaggcggccggaccgagcgggcgcccgcgcgtgtggcgtgaggggaagccgcttgcccgcccccttcgccttcccttctctccccctccccgctccccccccgaccgcggagcagcaccatgtcggcgccggcggccaaagtcagtaaaaaggagctcaactccaaccacgacggggccgacgagacctcagaaaaagaacagcaagaagcgattgaacacattgatgaagtacaaaatgaaatagacagacttaatgaacaagccagtgaggagattttgaaagtagaacagaaatataacaaactccgccaaccattttttcagaagaggtcagaattgatcgccaaaatcccaaatttttgggtaacaacatttgtcaaccatccacaagtgtctgcactgcttggggaggaagatgaagaggcactgcattatttgaccagagttgaagtgacagaatttgaagatattaaatcaggttacagaatagatttttattttgatgaaaatccttactttgaaaataaagttctctccaaagaatttcatctgaatgagagtggtgatccatcttcgaagtccaccgaaatcaaatggaaatctggaaaggatttgacgaaacgttcgagtcaaacgcagaataaagccagcaggaagaggcagcatgaggaaccagagagcttctttacctggtttactgaccattctgatgcaggtgctgatgagttaggagaggtcatcaaagatgatatttggccaaacccattacagtactacttggttcccgatatggatgatgaagaaggagaaggagaagaagatgatgatgatgatgaagaggaggaaggattagaagatattgacgaagaaggggatgaggatgaaggtgaagaagatgaagatgatgatgaaggggaggaaggagaggaggatgaaggagaagatgactaaatagaacactgatggattccaaccttcctttttttaaattttctccagtccctgggagcaagttgcagtctttttttttttttttttttttttccctcttgtgctcagtcgccctgttcttgaggtctcttttctctactccatggttctcaatttatttggggggaaataccttgagcagaatacaatgggaaaagagtctctacccctttctgttcgaagttcatttttatcccttcctgtctgaacaaaaactgtatgttatgtataccggtataacataacttggttccccaaggcaggaggatcgcttgagcccaggaatttgaggccagcatgggcaacatagcgaaaccatatctctaccaaaaaatttttttttaaattagctgggcatattggggctcacctgtagtctcagctacccaagaggcttaggcaggaggatcacttgagcccagctggtcgaggcagcagtgagctatgatgaaaagaataagaaaaagaaaagaaaaggagaggagaggagaggaaagaagagaagagacgaacgaggagtttctgatcctgcacatgcaccttgatc

SEQ ID NO: 451263 - DNA, 1449 bp, Homo sapiens
cctcgccgtaggaggaggtggaggaggaggcggctcgggagagcgagcagcgagctggctggatcgccgagcgcgagtgagggagccgagccgcccgccgccgccgcctccgcctcccctccgcgaacaggagcccgggccggggcccggcacgccgccccagcccgtccctcggcgtcaggccgcgagggtagcgcgcgcgagcgagcgagggggagggagagcgagcgagcgccgggaggaggcggccggaccgagcgggcgcccgcgcgtgtggcgtgaggggaagccgcttgcccgcccccttcgccttcccttctctccccctccccgctccccccccgaccgcggagcagcaccatgtcggcgccggcggccaaagtcagtaaaaaggagctcaactccaaccacgacggggccgacgagacctcagaaaaagaacagcaagaagcgattgaacacattgatgaagtacaaaatgaaatagacagacttaatgaacaagccagtgaggagattttgaaagtagaacagaaatataacaaactccgccaaccattttttcagaagaggtcagaattgatcgccaaaatcccaaatttttgggtaacaacatttgtcaaccatccacaagtgtctgcactgcttggggaggaagatgaagaggcactgcattatttgaccagagttgaagtgacagaatttgaagatattaaatcaggttacagaatagatttttattttgatgaaaatccttactttgaaaataaagttctctccaaagaatttcatctgaatgagagtggtgatccatcttcgaagtccaccgaaatcaaatggaaatctggaaaggatttgacgaaacgttcgagtcaaacgcagaataaagccagcaggaagaggcagcatgaggaaccagagagcttctttacctggtttactgaccattctgatgcaggtgctgatgagttaggagaggtcatcaaagatgatatttggccaaacccattacagtactacttggttcccgatatggatgatgaagaaggagaaggagaagaagatgatgatgatgatgaagaggaggaaggattagaagatattgacgaagaaggggatgaggatgaaggtgaagaagatgaagatgatgatgaaggggaggaaggagaggaggatgaaggagaagatgactaaatagaacactgatggattccaaccttcctttttttaaattttctccagtccctgggagcaagttgcagtctttttttttttttttttttttttccctcttgtgctcagtcgccctgttcttgaggtctcttttctctactccatggttctcaatttatttggggggaaataccttgagcagaatacaatgggaaaagagtctctacccctttctcgtcttcttcccttctgtcgtccttctaagatcctctagat

SEQ ID NO: 451264 - DNA, 1456 bp, Homo sapiens
cctcgccgtaggaggaggtggaggaggaggcggctcgggagagcgagcagcgagctggctggatcgccgagcgcgagtgagggagccgagccgcccgccgccgccgcctccgcctcccctccgcgaacaggagcccgggccggggcccggcacgccgccccagcccgtccctcggcgtcaggccgcgagggtagcgcgcgcgagcgagcgagggggagggagagcgagcgagcgccgggaggaggcggccggaccgagcgggcgcccgcgcgtgtggcgtgaggggaagccgcttgcccgcccccttcgccttcccttctctccccctccccgctccccccccgaccgcggagcagcaccatgtcggcgccggcggccaaagtcagtaaaaaggagctcaactccaaccacgacggggccgacgagacctcagaaaaagaacagcaagaagcgattgaacacattgatgaagtacaaaatgaaatagacagacttaatgaacaagccagtgaggagattttgaaagtagaacagaaatataacaaactccgccaaccattttttcagaagaggtcagaattgatcgccaaaatcccaaatttttgggtaacaacatttgtcaaccatccacaagtgtctgcactgcttggggaggaagatgaagaggcactgcattatttgaccagagttgaagtgacagaatttgaagatattaaatcaggttacagaatagatttttattttgatgaaaatccttactttgaaaataaagttctctccaaagaatttcatctgaatgagagtggtgatccatcttcgaagtccaccgaaatcaaatggaaatctggaaaggatttgacgaaacgttcgagtcaaacgcagaataaagccagcaggaagaggcagcatgaggaaccagagagcttctttacctggtttactgaccattctgatgcaggtgctgatgagttaggagaggtcatcaaagatgatatttggccaaacccattacagtactacttggttcccgatatggatgatgaagaaggagaaggagaagaagatgatgatgatgatgaagaggaggaaggattagaagatattgacgaagaaggggatgaggatgaaggtgaagaagatgaagatgatgatgaaggggaggaaggagaggaggatgaaggagaagatgactaaatagaacactgatggattccaaccttcctttttttaaattttctccagtccctgggagcaagttgcagtcttttttttcttcgattctttgttttgtgcccctctggtggctcccgtcgcgccgggtctggaaggcctctttgctgtcacgccggggttccccactacttcggggggggaacatacttggggcgaattcacggggaaggggttttaaccctttttggtccgacggtctttcttcccttcttgtttggacaaa

SEQ ID NO: 451265 - DNA, 1438 bp, Homo sapiens
cctcgccgtaggaggaggtggaggaggaggcggctcgggagagcgagcagcgagctggctggatcgccgagcgcgagtgagggagccgagccgcccgccgccgccgcctccgcctcccctccgcgaacaggagcccgggccggggcccggcacgccgccccagcccgtccctcggcgtcaggccgcgagggtagcgcgcgcgagcgagcgagggggagggagagcgagcgagcgccgggaggaggcggccggaccgagcgggcgcccgcgcgtgtggcgtgaggggaagccgcttgcccgcccccttcgccttcccttctctccccctccccgctccccccccgaccgcggagcagcaccatgtcggcgccggcggccaaagtcagtaaaaaggagctcaactccaaccacgacggggccgacgagacctcagaaaaagaacagcaagaagcgattgaacacattgatgaagtacaaaatgaaatagacagacttaatgaacaagccagtgaggagattttgaaagtagaacagaaatataacaaactccgccaaccattttttcagaagaggtcagaattgatcgccaaaatcccaaatttttgggtaacaacatttgtcaaccatccacaagtgtctgcactgcttggggaggaagatgaagaggcactgcattatttgaccagagttgaagtgacagaatttgaagatattaaatcaggttacagaatagatttttattttgatgaaaatccttactttgaaaataaagttctctccaaagaatttcatctgaatgagagtggtgatccatcttcgaagtccaccgaaatcaaatggaaatctggaaaggatttgacgaaacgttcgagtcaaacgcagaataaagccagcaggaagaggcagcatgaggaaccagagagcttctttacctggtttactgaccattctgatgcaggtgctgatgagttaggagaggtcatcaaagatgatatttggccaaacccattacagtactacttggttcccgatatggatgatgaagaaggagaaggagaagaagatgatgatgatgatgaagaggaggaaggattagaagatattgacgaagaaggggatgaggatgaaggtgaagaagatgaagatgatgatgaaggggaggaaggagaggaggatgaaggagaagatgactaaatagaacactgatgggccatcttcgtcccatcagaatacatacaatctccccctctgctgggcgtggtgactcatgtctataatcccagctctttgggaggccagggcgggtggatcacttgagcctaggagttcgaaaccagcctgagcaacatggtgaaagcccatctctacgaaaaatgcaaaagttagccaggcatggtggtgcacgtctgtagacccagctacttgggaggctgaggcg

SEQ ID NO: 451266 - DNA, 1248 bp, Homo sapiens
cctcgccgtaggaggaggtggaggaggaggcggctcgggagagcgagcagcgagctggctggatcgccgagcgcgagtgagggagccgagccgcccgccgccgccgcctccgcctcccctccgcgaacaggagcccgggccggggcccggcacgccgccccagcccgtccctcggcgtcaggccgcgagggtagcgcgcgcgagcgagcgagggggagggagagcgagcgagcgccgggaggaggcggccggaccgagcgggcgcccgcgcgtgtggcgtgaggggaagccgcttgcccgcccccttcgccttcccttctctccccctccccgctccccccccgaccgcggagcagcaccatgtcggcgccggcggccaaagtcagtaaaaaggagctcaactccaaccacgacggggccgacgagacctcagaaaaagaacagcaagaagcgattgaacacattgatgaagtacaaaatgaaatagacagacttaatgaacaagccagtgaggagattttgaaagtagaacagaaatataacaaactccgccaaccattttttcagaagaggtcagaattgatcgccaaaatcccaaatttttgggtaacaacatttgtcaaccatccacaagtgtctgcactgcttggggaggaagatgaagaggcactgcattatttgaccagagttgaagtgacagaatttgaagatattaaatcaggttacagaatagatttttattttgatgaaaatccttactttgaaaataaagttctctccaaagaatttcatctgaatgagagtggtgatccatcttcgaagtccaccgaaatcaaatggaaatctggaaaggatttgacgaaacgttcgagtcaaacgcagaataaagccagcaggaagaggcagcatgaggaaccagagagcttctttacctggtttactgaccattctgatgcaggtgctgatgagttaggagaggtcatcaaagatgatatttggccaaacccattacagtactacttggttcccgatatggatgatgaagaaggagaaggagaagaagatgatgatgatgatgaagaggaggaaggatattcacgtccccttgtcaaaaaggttgaagaggatgaagctggaggcagattcgtcgctttctctggagaaggacagtcattgcgtaaaaagggaagaaagccctaagtgaggactgttggctgattggaaaataataaaagaatcatttgcaaa

SEQ ID NO: 451267 - DNA, 1070 bp, Homo sapiens
cctcgccgtaggaggaggtggaggaggaggcggctcgggagagcgagcagcgagctggctggatcgccgagcgcgagtgagggagccgagccgcccgccgccgccgcctccgcctcccctccgcgaacaggagcccgggccggggcccggcacgccgccccagcccgtccctcggcgtcaggccgcgagggtagcgcgcgcgagcgagcgagggggagggagagcgagcgagcgccgggaggaggcggccggaccgagcgggcgcccgcgcgtgtggcgtgaggggaagccgcttgcccgcccccttcgccttcccttctctccccctccccgctccccccccgaccgcggagcagcaccatgtcggcgccggcggccaaagtcagtaaaaaggagctcaactccaaccacgacggggccgacgagacctcagaaaaagaacagcaagaagcgattgaacacattgatgaagtacaaaatgaaatagacagacttaatgaacaagccagtgaggagattttgaaagtagaacagaaatataacaaactccgccaaccattttttcagaagaggtcagaattgatcgccaaaatcccaaatttttgggtaacaacatttgtcaaccatccacaagtgtctgcactgcttggggaggaagatgaagaggcactgcattatttgaccagagttgaagtgacagaatttgaagatattaaatcaggttacagaatagatttttattttgatgaaaatccttactttgaaaataaagttctctccaaagaatttcatctgaatgagagtggtgatccatcttcgaagtccaccgaaatcaaatggaaatctggaaaggatttgacgaaacgttcgagtcaaacgcagaataaagccagcaggaagaggcagcatgaggaaccagagagcttctttacctggtttactgaccattctgatgcaggtgctgatgagttaggagaggtcatcaaagatgatatttggccaaacccattacagtactacttggttctcgatatggatgatgaagcctcgtcggagggtcgggagctcga

SEQ ID NO: 451268 - DNA, 1090 bp, Homo sapiens
cctcgccgtaggaggaggtggaggaggaggcggctcgggagagcgagcagcgagctggctggatcgccgagcgcgagtgagggagccgagccgcccgccgccgccgcctccgcctcccctccgcgaacaggagcccgggccggggcccggcacgccgccccagcccgtccctcggcgtcaggccgcgagggtagcgcgcgcgagcgagcgagggggagggagagcgagcgagcgccgggaggaggcggccggaccgagcgggcgcccgcgcgtgtggcgtgaggggaagccgcttgcccgcccccttcgccttcccttctctccccctccccgctccccccccgaccgcggagcagcaccatgtcggcgccggcggccaaagtcagtaaaaaggagctcaactccaaccacgacggggccgacgagacctcagaaaaagaacagcaagaagcgattgaacacattgatgaagtacaaaatgaaatagacagacttaatgaacaagccagtgaggagattttgaaagtagaacagaaatataacaaactccgccaaccattttttcagaagaggtcagaattgatcgccaaaatcccaaatttttgggtaacaacatttgtcaaccatccacaagtgtctgcactgcttggggaggaagatgaagaggcactgcattatttgaccagagttgaagtgacagaatttgaagatattaaatcaggttacagaatagatttttattttgatgaaaatccttactttgaaaataaagttctctccaaagaatttcatctgaatgagagtggtgatccatcttcgaagtccaccgaaatcaaatggaaatctggaaaggatttgacgaaacgttcgagtcaaacgcagaataaagccagcaggaagaggcagcatgaggaaccagagagcttctttacctggtttactgaccattctgatgcaggtgctgatgagttaggagaggtcatcaaagatgatatttggccgctctccgtccacacctgcaaagccaagacccttctgcagacacgaatgtccacggagcccgccggcaggtcaggaatacaccatgctt

SEQ ID NO: 451269 - DNA, 941 bp, Homo sapiens
cctcgccgtaggaggaggtggaggaggaggcggctcgggagagcgagcagcgagctggctggatcgccgagcgcgagtgagggagccgagccgcccgccgccgccgcctccgcctcccctccgcgaacaggagcccgggccggggcccggcacgccgccccagcccgtccctcggcgtcaggccgcgagggtagcgcgcgcgagcgagcgagggggagggagagcgagcgagcgccgggaggaggcggccggaccgagcgggcgcccgcgcgtgtggcgtgaggggaagccgcttgcccgcccccttcgccttcccttctctccccctccccgctccccccccgaccgcggagcagcaccatgtcggcgccggcggccaaagtcagtaaaaaggagctcaactccaaccacgacggggccgacgagacctcagaaaaagaacagcaagaagcgattgaacacattgatgaagtacaaaatgaaatagacagacttaatgaacaagccagtgaggagattttgaaagtagaacagaaatataacaaactccgccaaccattttttcagaagaggtcagaattgatcgccaaaatcccaaatttttgggtaacaacatttgtcaaccatccacaagtgtctgcactgcttggggaggaagatgaagaggcactgcattatttgaccagagttgaagtgacagaatttgaagatattaaatcaggttacagaatagatttttattttgatgaaaatccttactttgaaaataaagttctctccaaagaatttcatctgaatgagagtggtgatccatcttcgaagtccaccgaaatcaaatggaaatctggaaaggatttgacgaaacgttcgagtcaaacgcagaataaagccagcaggaagaggcagcttgtgaatttttgttttactgtttaactttatta

SEQ ID NO: 451270 - DNA, 313 bp, Homo sapiens
ggactctgactccgggggccaatgcccttgtgggcaggaacggcctcgtcgcgtaggtctcaatgctggtgatccttcttcagctcgacctgcagtgctgcttgctcggaagtgaccgtctggacacgaccgtcgtgcttcaaaagctttttgatgtataaaacttgataaatggaactattccatcaataggcaaaagtgtaacaacctatctagatggatagtatgtaatttctgcacaggtctctgtttagtaaatacatcactgtataccgatcaggaatcttgctccaataaaggaacataaagattt

SEQ ID NO: 451271 - DNA, 469 bp, Homo sapiens
gtaagtatctctaacttaatcttgtttgccactgtggaaattaatgtgagctttggttggaagacctgttcatatttctaatctttcaattatttattacagtattttgatgaaaatccttactttgaaaataaagttctctccaaagaatttcatctgaatgagagtggtgatccatcttcgaagtccaccgaaatcaaatggaaatctggaaaggtatgttttgaggaattatttgacaaaaatagcattttgcctatttcagtttagttttaaccacttacaagtgcttgatactttggtcatgtggctaaatacaaaaccttaaaatataaaacgttccagtgtgctgaagccaagtattacagtagtttagggttctcattagatactacagatgtaggcaggaagatctcttgagcctaggagtttaccctgggcaacatagacccttaccttccaaaaaaca

SEQ ID NO: 451272 - DNA, 350 bp, Homo sapiens
gtgtgtgtcccactgtcatgtaaatatcccttccaggcagggcggctccagtgcagatttaagccgctggcacctggggcagtctcagtgttcagcctgcttccggacgggcgaggagactcgtggtctggttctgggacttccctaacagcatggcccctaaacgccagtctccactcccgcctcaaaagaagaaaccaagaccacctcctgctctgggaccggaggagacatcggcctctgcaggcttgccgaagaagggaggtacgtttctgcgctaagttttattggagatttaagggatttgcaaggattgactctctgatttttaccccccaatccctcttgag

SEQ ID NO: 451273 - DNA, 2749 bp, Homo sapiens
gtgtgtgtcccactgtcatgtaaatatcccttccaggcagggcggctccagtgcagatttaagccgctggcacctggggcagtctcagtgttcagcctgcttccggacgggcgaggagactcgtggtctggttctgggacttccctaacagcatggcccctaaacgccagtctccactcccgcctcaaaagaagaaaccaagaccacctcctgctctgggaccggaggagacatcggcctctgcaggcttgccgaagaagggagaaaaagaacagcaagaagcgattgaacacattgatgaagtacaaaatgaaatagacagacttaatgaacaagccagtgaggagattttgaaagtagaacagaaatataacaaactccgccaaccattttttcagaagaggtcagaattgatcgccaaaatcccaaatttttgggtaacaacatttgtcaaccatccacaagtgtctgcactgcttggggaggaagatgaagaggcactgcattatttgaccagagttgaagtgacagaatttgaagatattaaatcaggttacagaatagatttttattttgatgaaaatccttactttgaaaataaagttctctccaaagaatttcatctgaatgagagtggtgatccatcttcgaagtccaccgaaatcaaatggaaatctggaaaggatttgacgaaacgttcgagtcaaacgcagaataaagccagcaggaagaggcagcatgaggaaccagagagcttctttacctggtttactgaccattctgatgcaggtgctgatgagttaggagaggtcatcaaagatgatatttggccaaacccattacagtactacttggttcccgatatggatgatgaagaaggagaaggagaagaagatgatgatgatgatgaagaggaggaaggattagaagatattgacgaagaaggggatgaggatgaaggtgaagaagatgaagatgatgatgaaggggaggaaggagaggaggatgaaggagaagatgactaaatagaacactgatggattccaaccttcctttttttaaattttctccagtccctgggagcaagttgcagtctttttttttttttttttttttttccctcttgtgctcagtcgccctgttcttgaggtctcttttctctactccatggttctcaatttatttggggggaaataccttgagcagaatacaatgggaaaagagtctctacccctttctgttcgaagttcatttttatcccttcctgtctgaacaaaaactgtatggaatcaacaccaccgagctctgtgggaaaaaagaaaaacctgctcccttcgctctgctggaagctggagggtgctaggcccctgtgtagtagtgcatagaattctagcttttttcctcctttctctgtatattgggctcagagagtacactgtgtctctatgtgaatatggacagttagcatttaccaacatgtatctgtctactttctcttgtttaaaaaaagaaaaaaaaacttaaaaaaatggggttatagaaggtcagcaaagggtgggtttgagatgtttgggtgggttaagtgggcattttgacaacatggcttctcctttggcatgtttaattgtgatatttgacagacatccttgcagtttaagatgacacttttaaaataaattctctcctaatgatgacttgagccctgccactcaatgggagaatcagcagaacctgtaggatcttatttggaattgacattctctattgtaattttgttcctgtttatttttaaattttctttttgtttcactggaaaggaaagatgatgctcagttttaaacgttaaaagtgtacaagttgctttgttacaataaaactaaatgtgtacacaaagggatttgatgcttttctctcagcataggtatgcttactatgaccttccaagtttgacttgtataacatcactgtcaaactttgtcaccctaacttcgtattttttgatacgcactttgcaggatgacctcagggctatgtggattgagtaatgggatttgaatcaatgtattaatatctccatagctgggaaacgtgggttcaatttgccattggtttctgaaagtattcacatcatttgggataccagatagctcaatactctctgagtacattgtgcccttgatttttatctccaagtggcagtttttaaaattggccttttacctggatataaattaattgtgcctgccaccaccatccaacagacctggtgctctaatgccaagttatacacgggacagttgctggcatgtcttcattggctatataaaatgtggccaagaagataggctctcagtaagaagtctgatggtgagcagtaactgtccctgctttctggtataaagctctcaaatgtgaccatgtgaatctgggtgggataatggactcagctctgtctgctcaatgccattgtgcagagaagcaccctaatgcataagctttttaatgctgtaaaatatagtcgctgaaattaaatgccactttttcagaggtgaattaatggacagtctggtgaacttcaaaagctttttgatgtataaaacttgataaatggaactattccatcaataggcaaaagtgtaacaacctatctagatggatagtatgtaatttctgcacaggtctctgtttagtaaatacatcactgtataccgatcaggaatcttgctccaataaaggaacataaagattt

SEQ ID NO: 451274 - DNA, 2963 bp, Homo sapiens
gcggccgccccgtcgcgccagcgtgcggagaaacctggcgccgcgaccagtgtatcgggggtcttggaaatggctaagaaagctggcctctgcctaggaggctctcggcaggggggctgccaatccgggatggttaccggaaatgaaccgcgcgatctggccctttcacacccacttagctttgtagggggtttgtagtctttacaggacaaaagggcacctattccagagcacacccccttttcttcctctcccttctgtgcctcactgctttccgatctcatagttgctcccagtaagtgctccaaagtcgtgtggggccgcatctgaggtctgcccgcctgaattgggttggaggggttcatgttctgagaaggcgaaggccagggtgtaggatggtgccccgtgactttccagtctttgtaggcgtgcctggtatcttcatcgtaatagcagagtcgtcaactttctatgaaagaaaaagaacagcaagaagcgattgaacacattgatgaagtacaaaatgaaatagacagacttaatgaacaagccagtgaggagattttgaaagtagaacagaaatataacaaactccgccaaccattttttcagaagaggtcagaattgatcgccaaaatcccaaatttttgggtaacaacatttgtcaaccatccacaagtgtctgcactgcttggggaggaagatgaagaggcactgcattatttgaccagagttgaagtgacagaatttgaagatattaaatcaggttacagaatagatttttattttgatgaaaatccttactttgaaaataaagttctctccaaagaatttcatctgaatgagagtggtgatccatcttcgaagtccaccgaaatcaaatggaaatctggaaaggatttgacgaaacgttcgagtcaaacgcagaataaagccagcaggaagaggcagcatgaggaaccagagagcttctttacctggtttactgaccattctgatgcaggtgctgatgagttaggagaggtcatcaaagatgatatttggccaaacccattacagtactacttggttcccgatatggatgatgaagaaggagaaggagaagaagatgatgatgatgatgaagaggaggaaggattagaagatattgacgaagaaggggatgaggatgaaggtgaagaagatgaagatgatgatgaaggggaggaaggagaggaggatgaaggagaagatgactaaatagaacactgatggattccaaccttcctttttttaaattttctccagtccctgggagcaagttgcagtctttttttttttttttttttttttccctcttgtgctcagtcgccctgttcttgaggtctcttttctctactccatggttctcaatttatttggggggaaataccttgagcagaatacaatgggaaaagagtctctacccctttctgttcgaagttcatttttatcccttcctgtctgaacaaaaactgtatggaatcaacaccaccgagctctgtgggaaaaaagaaaaacctgctcccttcgctctgctggaagctggagggtgctaggcccctgtgtagtagtgcatagaattctagcttttttcctcctttctctgtatattgggctcagagagtacactgtgtctctatgtgaatatggacagttagcatttaccaacatgtatctgtctactttctcttgtttaaaaaaagaaaaaaaaacttaaaaaaatggggttatagaaggtcagcaaagggtgggtttgagatgtttgggtgggttaagtgggcattttgacaacatggcttctcctttggcatgtttaattgtgatatttgacagacatccttgcagtttaagatgacacttttaaaataaattctctcctaatgatgacttgagccctgccactcaatgggagaatcagcagaacctgtaggatcttatttggaattgacattctctattgtaattttgttcctgtttatttttaaattttctttttgtttcactggaaaggaaagatgatgctcagttttaaacgttaaaagtgtacaagttgctttgttacaataaaactaaatgtgtacacaaagggatttgatgcttttctctcagcataggtatgcttactatgaccttccaagtttgacttgtataacatcactgtcaaactttgtcaccctaacttcgtattttttgatacgcactttgcaggatgacctcagggctatgtggattgagtaatgggatttgaatcaatgtattaatatctccatagctgggaaacgtgggttcaatttgccattggtttctgaaagtattcacatcatttgggataccagatagctcaatactctctgagtacattgtgcccttgatttttatctccaagtggcagtttttaaaattggccttttacctggatataaattaattgtgcctgccaccaccatccaacagacctggtgctctaatgccaagttatacacgggacagttgctggcatgtcttcattggctatataaaatgtggccaagaagataggctctcagtaagaagtctgatggtgagcagtaactgtccctgctttctggtataaagctctcaaatgtgaccatgtgaatctgggtgggataatggactcagctctgtctgctcaatgccattgtgcagagaagcaccctaatgcataagctttttaatgctgtaaaatatagtcgctgaaattaaatgccactttttcagaggtgaattaatggacagtctggtgaacttcaaaagctttttgatgtataaaacttgataaatggaactattccatcaataggcaaaagtgtaacaacctatctagatggatagtatgtaatttctgcacaggtctctgtttagtaaatacatcactgtataccgatcaggaatcttgctccaataaaggaacataaagattt

SEQ ID NO: 451275 - DNA, 2547 bp, Homo sapiens
ctagaggatcccctcctttttttaaattttctccaaccacgacggggccgacgagacctcagaaaaagaacagcaagaagcgattgaacacattgatgaagtacaaaatgaaatagacagacttaatgaacaagccagtgaggagattttgaaagtagaacagaaatataacaaactccgccaaccattttttcagaagaggtcagaattgatcgccaaaatcccaaatttttgggtaacaacatttgtcaaccatccacaagtgtctgcactgcttggggaggaagatgaagaggcactgcattatttgaccagagttgaagtgacagaatttgaagatattaaatcaggttacagaatagatttttattttgatgaaaatccttactttgaaaataaagttctctccaaagaatttcatctgaatgagagtggtgatccatcttcgaagtccaccgaaatcaaatggaaatctggaaaggatttgacgaaacgttcgagtcaaacgcagaataaagccagcaggaagaggcagcatgaggaaccagagagcttctttacctggtttactgaccattctgatgcaggtgctgatgagttaggagaggtcatcaaagatgatatttggccaaacccattacagtactacttggttcccgatatggatgatgaagaaggagaaggagaagaagatgatgatgatgatgaagaggaggaaggattagaagatattgacgaagaaggggatgaggatgaaggtgaagaagatgaagatgatgatgaaggggaggaaggagaggaggatgaaggagaagatgactaaatagaacactgatggattccaaccttcctttttttaaattttctccagtccctgggagcaagttgcagtctttttttttttttttttttttttccctcttgtgctcagtcgccctgttcttgaggtctcttttctctactccatggttctcaatttatttggggggaaataccttgagcagaatacaatgggaaaagagtctctacccctttctgttcgaagttcatttttatcccttcctgtctgaacaaaaactgtatggaatcaacaccaccgagctctgtgggaaaaaagaaaaacctgctcccttcgctctgctggaagctggagggtgctaggcccctgtgtagtagtgcatagaattctagcttttttcctcctttctctgtatattgggctcagagagtacactgtgtctctatgtgaatatggacagttagcatttaccaacatgtatctgtctactttctcttgtttaaaaaaagaaaaaaaaacttaaaaaaatggggttatagaaggtcagcaaagggtgggtttgagatgtttgggtgggttaagtgggcattttgacaacatggcttctcctttggcatgtttaattgtgatatttgacagacatccttgcagtttaagatgacacttttaaaataaattctctcctaatgatgacttgagccctgccactcaatgggagaatcagcagaacctgtaggatcttatttggaattgacattctctattgtaattttgttcctgtttatttttaaattttctttttgtttcactggaaaggaaagatgatgctcagttttaaacgttaaaagtgtacaagttgctttgttacaataaaactaaatgtgtacacaaagggatttgatgcttttctctcagcataggtatgcttactatgaccttccaagtttgacttgtataacatcactgtcaaactttgtcaccctaacttcgtattttttgatacgcactttgcaggatgacctcagggctatgtggattgagtaatgggatttgaatcaatgtattaatatctccatagctgggaaacgtgggttcaatttgccattggtttctgaaagtattcacatcatttgggataccagatagctcaatactctctgagtacattgtgcccttgatttttatctccaagtggcagtttttaaaattggccttttacctggatataaattaattgtgcctgccaccaccatccaacagacctggtgctctaatgccaagttatacacgggacagttgctggcatgtcttcattggctatataaaatgtggccaagaagataggctctcagtaagaagtctgatggtgagcagtaactgtccctgctttctggtataaagctctcaaatgtgaccatgtgaatctgggtgggataatggactcagctctgtctgctcaatgccattgtgcagagaagcaccctaatgcataagctttttaatgctgtaaaatatagtcgctgaaattaaatgccactttttcagaggtgaattaatggacagtctggtgaacttcaaaagctttttgatgtataaaacttgataaatggaactattccatcaataggcaaaagtgtaacaacctatctagatggatagtatgtaatttctgcacaggtctctgtttagtaaatacatcactgtataccgatcaggaatcttgctccaataaaggaacataaagattt

SEQ ID NO: 451276 - DNA, 2863 bp, Homo sapiens
cctcgccgtaggaggaggtggaggaggaggcggctcgggagagcgagcagcgagctggctggatcgccgagcgcgagtgagggagccgagccgcccgccgccgccgcctccgcctcccctccgcgaacaggagcccgggccggggcccggcacgccgccccagcccgtccctcggcgtcaggccgcgagggtagcgcgcgcgagcgagcgagggggagggagagcgagcgagcgccgggaggaggcggccggaccgagcgggcgcccgcgcgtgtggcgtgaggggaagccgcttgcccgcccccttcgccttcccttctctccccctccccgctccccccccgaccgcggagcagcaccatgtcggcgccggcggccaaagtcagtaaaaaggagctcaactccaaccacgacggggccgacgagacctcagaaaaagaacagcaagaagcgattgaacacattgatgaagtacaaaatgaaatagacagacttaatgaacaagccagtgaggagattttgaaagtagaacagaaatataacaaactccgccaaccattttttcagaagaggtcagaattgatcgccaaaatcccaaatttttgggtaacaacatttgtcaaccatccacaagtgtctgcactgcttggggaggaagatgaagaggcactgcattatttgaccagagttgaagtgacagaatttgaagatattaaatcaggttacagaatagatttttattttgatgaaaatccttactttgaaaataaagttctctccaaagaatttcatctgaatgagagtggtgatccatcttcgaagtccaccgaaatcaaatggaaatctggaaaggatttgacgaaacgttcgagtcaaacgcagaataaagccagcaggaagaggcagcatgaggaaccagagagcttctttacctggtttactgaccattctgatgcaggtgctgatgagttaggagaggtcatcaaagatgatatttggccaaacccattacagtactacttggttcccgatatggatgatgaagaaggagaaggagaagaagatgatgatgatgatgaagaggaggaaggattagaagatattgacgaagaaggggatgaggatgaaggtgaagaagatgaagatgatgatgaaggggaggaaggagaggaggatgaaggagaagatgactaaatagaacactgatggattccaaccttcctttttttaaattttctccagtccctgggagcaagttgcagtctttttttttttttttttttttttccctcttgtgctcagtcgccctgttcttgaggtctcttttctctactccatggttctcaatttatttggggggaaataccttgagcagaatacaatgggaaaagagtctctacccctttctgttcgaagttcatttttatcccttcctgtctgaacaaaaactgtatggaatcaacaccaccgagctctgtgggaaaaaagaaaaacctgctcccttcgctctgctggaagctggagggtgctaggcccctgtgtagtagtgcatagaattctagcttttttcctcctttctctgtatattgggctcagagagtacactgtgtctctatgtgaatatggacagttagcatttaccaacatgtatctgtctactttctcttgtttaaaaaaagaaaaaaaaacttaaaaaaatggggttatagaaggtcagcaaagggtgggtttgagatgtttgggtgggttaagtgggcattttgacaacatggcttctcctttggcatgtttaattgtgatatttgacagacatccttgcagtttaagatgacacttttaaaataaattctctcctaatgatgacttgagccctgccactcaatgggagaatcagcagaacctgtaggatcttatttggaattgacattctctattgtaattttgttcctgtttatttttaaattttctttttgtttcactggaaaggaaagatgatgctcagttttaaacgttaaaagtgtacaagttgctttgttacaatttactatgaccttccaagtttgacttgtataacatcactgtcaaactttgtcaccctaacttcgtattttttgatacgcactttgcaggatgacctcagggctatgtggattgagtaatgggatttgaatcaatgtattaatatctccatagctgggaaacgtgggttcaatttgccattggtttctgaaagtattcacatcatttgggataccagatagctcaatactctctgagtacattgtgcccttgatttttatctccaagtggcagtttttaaaattggccttttacctggatataaattaattgtgcctgccaccaccatccaacagacctggtgctctaatgccaagttatacacgggacagttgctggcatgtcttcattggctatataaaatgtggccaagaagataggctctcagtaagaagtctgatggtgagcagtaactgtccctgctttctggtataaagctctcaaatgtgaccatgtgaatctgggtgggataatggactcagctctgtctgctcaatgccattgtgcagagaagcaccctaatgcataagctttttaatgctgtaaaatatagtcgctgaaattaaatgccactttttcagaggtgaattaatggacagtctggtgaacttcaaaagctttttgatgtataaaacttgataaatggaactattccatcaataggcaaaagtgtaacaacctatctagatggatagtatgtaatttctgcacaggtctctgtttagtaaatacatcactgtataccgatcaggaatcttgctccaataaaggaacataaagattt

SEQ ID NO: 451277 - DNA, 2219 bp, Homo sapiens
aaataccagcgcgaatacacagcgtacagaatagatttttattttgatgaaaatccttactttgaaaataaagttctctccaaagaatttcatctgaatgagagtggtgatccatcttcgaagtccaccgaaatcaaatggaaatctggaaaggatttgacgaaacgttcgagtcaaacgcagaataaagccagcaggaagaggcagcatgaggaaccagagagcttctttacctggtttactgaccattctgatgcaggtgctgatgagttaggagaggtcatcaaagatgatatttggccaaacccattacagtactacttggttcccgatatggatgatgaagaaggagaaggagaagaagatgatgatgatgatgaagaggaggaaggattagaagatattgacgaagaaggggatgaggatgaaggtgaagaagatgaagatgatgatgaaggggaggaaggagaggaggatgaaggagaagatgactaaatagaacactgatggattccaaccttcctttttttaaattttctccagtccctgggagcaagttgcagtctttttttttttttttttttttttccctcttgtgctcagtcgccctgttcttgaggtctcttttctctactccatggttctcaatttatttggggggaaataccttgagcagaatacaatgggaaaagagtctctacccctttctgttcgaagttcatttttatcccttcctgtctgaacaaaaactgtatggaatcaacaccaccgagctctgtgggaaaaaagaaaaacctgctcccttcgctctgctggaagctggagggtgctaggcccctgtgtagtagtgcatagaattctagcttttttcctcctttctctgtatattgggctcagagagtacactgtgtctctatgtgaatatggacagttagcatttaccaacatgtatctgtctactttctcttgtttaaaaaaagaaaaaaaaacttaaaaaaatggggttatagaaggtcagcaaagggtgggtttgagatgtttgggtgggttaagtgggcattttgacaacatggcttctcctttggcatgtttaattgtgatatttgacagacatccttgcagtttaagatgacacttttaaaataaattctctcctaatgatgacttgagccctgccactcaatgggagaatcagcagaacctgtaggatcttatttggaattgacattctctattgtaattttgttcctgtttatttttaaattttctttttgtttcactggaaaggaaagatgatgctcagttttaaacgttaaaagtgtacaagttgctttgttacaataaaactaaatgtgtacacaaagggatttgatgcttttctctcagcataggtatgcttactatgaccttccaagtttgacttgtataacatcactgtcaaactttgtcaccctaacttcgtattttttgatacgcactttgcaggatgacctcagggctatgtggattgagtaatgggatttgaatcaatgtattaatatctccatagctgggaaacgtgggttcaatttgccattggtttctgaaagtattcacatcatttgggataccagatagctcaatactctctgagtacattgtgcccttgatttttatctccaagtggcagtttttaaaattggccttttacctggatataaattaattgtgcctgccaccaccatccaacagacctggtgctctaatgccaagttatacacgggacagttgctggcatgtcttcattggctatataaaatgtggccaagaagataggctctcagtaagaagtctgatggtgagcagtaactgtccctgctttctggtataaagctctcaaatgtgaccatgtgaatctgggtgggataatggactcagctctgtctgctcaatgccattgtgcagagaagcaccctaatgcataagctttttaatgctgtaaaatatagtcgctgaaattaaatgccactttttcagaggtgaattaatggacagtctggtgaacttcaaaagctttttgatgtataaaacttgataaatggaactattccatcaataggcaaaagtgtaacaacctatctagatggatagtatgtaatttctgcacaggtctctgtttagtaaatacatcactgtataccgatcaggaatcttgctccaataaaggaacataaagattt

SEQ ID NO: 451278 - DNA, 2864 bp, Homo sapiens
cctcgccgtaggaggaggtggaggaggaggcggctcgggagagcgagcagcgagctggctggatcgccgagcgcgagtgagggagccgagccgcccgccgccgccgcctccgcctcccctccgcgaacaggagcccgggccggggcccggcacgccgccccagcccgtccctcggcgtcaggccgcgagggtagcgcgcgcgagcgagcgagggggagggagagcgagcgagcgccgggaggaggcggccggaccgagcgggcgcccgcgcgtgtggcgtgaggggaagccgcttgcccgcccccttcgccttcccttctctccccctccccgctccccccccgaccgcggagcagcaccatgtcggcgccggcggccaaagtcagtaaaaaggagctcaactccaaccacgacggggccgacgagacctcagaaaaagaacagcaagaagcgattgaacacattgatgaagtacaaaatgaaatagacagacttaatgaacaagccagtgaggagattttgaaagtagaacagaaatataacaaactccgccaaccattttttcagaagaggtcagaattgatcgccaaaatcccaaatttttgggtaacaacatttgtcaaccatccacaagtgtctgcactgcttggggaggaagatgaagaggcactgcattatttgaccagagttgaagtgacagaatttgaagatattaaatcaggttacagaatagatttttattttgatgaaaatccttactttgaaaataaagttctctccaaagaatttcatctgaatgagagtggtgatccatcttcgaagtccaccgaaatcaaatggaaatctggaaaggatttgacgaaacgttcgagtcaaacgcagaataaagccagcaggaagaggcagcatgaggaaccagagagcttctttacctggtttactgaccattctgatgcaggtgctgatgagttaggagaggtcatcaaagatgatatttggccaaacccattacagtactacttggttcccgatatggatgatgaagaaggagaaggagaagaagatgatgatgatgatgaagaggaggaaggattagaagatattgacgaagaaggggatgaggatgaaggtgaagaagatgaagatgatgatgaaggggaggaaggagaggaggatgaaggagaagatgactaaatagaacactgatggattccaaccttcctttttttaaattttctccagtccctgggagcaagttgcagtctttttttttttttttttttttttccctcttgtgctcagtcgccctgttcttgaggtctcttttctctactccatggttctcaatttatttggggggaaataccttgagcagaatacaatgggaaaagagtctctacccctttctgttcgaagttcatttttatcccttcctgtctgaacaaaaactgtatggaatcaacaccaccgagctctgtgggaaaaaagaaaaacctgctcccttcgctctgctggaagctggagggtgctaggcccctgtgtagtagtgcatagaattctagcttttttcctcctttctctgtatattgggctcagagagtacactgtgtctctatgtgaatatggacagttagcatttaccaacatgtatctgtctactttctcttgtttaaaaaaagaaaaaaaaacttaaaaaaatggggttatagaaggtcagcaaagggtgggtttgagatgtttgggtgggttaagtgggcattttgacaacatggcttctcctttggcatgtttaattgtgatatttgacagacatccttgcagtttaagatgacacttttaaaataaattctctcctaatgatgacttgagccctgccactcaatgggagaatcagcagaacctgtaggatcttatttggaattgacattctctattgtaattttgttcctgtttatttttaaattttctttttgtttcactggaaaggaaagatgatgctcagttttaaacgttaaaagtgtacaagttgctttgttacaataaaactaaatgtgtacacaaagggatttgatgcttttctctcagcataggtatgcttactatgaccttccaagtttgacttgtataacatcactgtcaaactttgtcaccctaacttcgtattttttgatacgcactttgcaggatgacctcagggctatgtggattgagtaatgggatttgaatcaatgtattaatatctccatagctgggaaacgtgggttcaatttgccattggtttctgaaagtattcacatcatttgggataccagatagctcaatactctctgagtacattgtgcccttgatttttatctccaagtggcagtttttaaaattggccttttacctggatataaattaattgtgcctgccaccaccatccaacagacctggtgctctaatgccaagttatacacgggacagttgctggcatgtcttcattggctatataaaatgtggccaagaagataggctctcagtaagaagtctgatggtgagcagtaactgtccctgctttctggtataaagctctcaaatgtgaccatgtgaatctgggtgggataatggactcataatgctgtaaaatatagtcgctgaaattaaatgccactttttcagaggtgaattaatggacagtctggtgaacttcaaaagctttttgatgtataaaacttgataaatggaactattccatcaataggcaaaagtgtaacaacctatctagatggatagtatgtaatttctgcacaggtctctgtttagtaaatacatcactgtataccgatcaggaatcttgctccaataaaggaacataaagattt

SEQ ID NO: 451279 - DNA, 2495 bp, Homo sapiens
cctcgccgtaggaggaggtggaggaggaggcggctcgggagagcgagcagcgagctggctggatcgccgagcgcgagtgagggagccgagccgcccgccgccgccgcctccgcctcccctccgcgaacaggagcccgggccggggcccggcacgccgccccagcccgtccctcggcgtcaggccgcgagggtagcgcgcgcgagcgagcgagggggagggagagcgagcgagcgccgggaggaggcggccggaccgagcgggcgcccgcgcgtgtggcgtgaggggaagccgcttgcccgcccccttcgccttcccttctctccccctccccgctccccccccgaccgcggagcagcaccatgtcggcgccggcggccaaagtcagtaaaaaggagctcaactccaaccacgacggggccgacgagacctcagaaaaagaacagcaagaagcgattgaacacattgatgaagtacaaaatgaaatagacagacttaatgaacaagccagtgaggagattttgaaagtagaacagaaatataacaaactccgccaaccattttttcagaagaggtcagaattgatcgccaaaatcccaaatttttgggtaacaacatttgtcaaccatccacaagtgtctgcactgcttggggaggaagatgaagaggcactgcattatttgaccagagttgaagtgacagaatttgaagatattaaatcaggttacagaatagatttttattttgatgaaaatccttactttgaaaataaagttctctccaaagaatttcatctgaatgagagtggtgatccatcttcgaagtccaccgaaatcaaatggaaatctggaaaggatttgacgaaacgttcgagtcaaacgcagaataaagccagcaggaagaggcagcatgaggaaccagagagcttctttacctggtttactgaccattctgatgcaggtgctgatgagttaggagaggtcatcaaagatgatatttggccaaacccattacagtactacttggttcccgatatggatgatgaagaaggagaaggagaagaagatgatgatgatgatgaagaggaggaaggattagaagatattgacgaagaaggggatgaggatgaaggtgaagaagatgaagatgatgatgaaggggaggaaggagaggaggatgaaggagaagatgactaaatagaacactgatggattccaaccttcctttttttaaattttctccagtccctgggagcaagttgcagtctttttttttttttttttttttttccctcttgtgctcagtcgccctgttcttgaggtctcttttctctactccatggttctcaatttatttggggggaaataccttgagcagaatacaatgggaaaagagtctctacccctttctgttcgaagttcatttttatcccttcctgtctgaacaaaaactgtatggaatcaacaccaccgagctctgtgggaaaaaagaaaaacctgctcccttcgctctgctggaagctggagggtgctaggcccctgtgtagtagtgcatagaattctagcttttttcctcctttctctgtatattgggctcagagagtacactgtgtctctatgtgaatatggacagttagcatttaccaacatgtatctgtctactttctcttgtttaaaaaaagaaaaaaaaacttaaaaaaatggggttatagaaggtcagcaaagggtgggtttgagatgtttgggtgggttaagtgggcattttgacaacatggcttctcctttggcatgtttaattgtgatatttgacagacatccttgcagtttaagatgacacttttaaaataaattctctcctaatgatgacttgagccctgccactcaatgggagaatcagcagaacctgtaggatcttatttggaattgacattctctattgtaattttgttcctgtttatttttaaattttctttttgtttcactggaaaggaaagatgatgctcagttttaaacgttaaaagtgtacaagttgctttgttacaataaaactaaatgtgtacacaaaaaaaaaaaaaaaaaaaaaaaaaaaaaaaaacaaaaaagaaaaacaaaaaaaaaaaaaaaaaagaaaaaaaaacaaaaaaaagaaaggaggggagacagaaacaaaaaaaaaaaacaaggaggaaccacaaaaaacaagagaagacacacccacacaagaagagaccgcgaccacgcacctcaacgaaaagcgcagaagagcatgcagaagcagagaacactacacgcaaagctaacaacccacagtcgagtgacaagaacacgaacacaggaaggcgcagcgataagcgaacaaacacaacaaataatgactaagacaacaagagactaggctgactcttgttcaccaccgtaaagagaggacgcaccgacagcgtaacacatgcagcagcactgagtgacgcagccagtcacaagtaggcgcaccaacagga

SEQ ID NO: 451280 - DNA, 1764 bp, Homo sapiens
cctcgccgtaggaggaggtggaggaggaggcggctcgggagagcgagcagcgagctggctggatcgccgagcgcgagtgagggagccgagccgcccgccgccgccgcctccgcctcccctccgcgaacaggagcccgggccggggcccggcacgccgccccagcccgtccctcggcgtcaggccgcgagggtagcgcgcgcgagcgagcgagggggagggagagcgagcgagcgccgggaggaggcggccggaccgagcgggcgcccgcgcgtgtggcgtgaggggaagccgcttgcccgcccccttcgccttcccttctctccccctccccgctccccccccgaccgcggagcagcaccatgtcggcgccggcggccaaagtcagtaaaaaggagctcaactccaaccacgacggggccgacgagacctcagaaaaagaacagcaagaagcgattgaacacattgatgaagtacaaaatgaaatagacagacttaatgaacaagccagtgaggagattttgaaagtagaacagaaatataacaaactccgccaaccattttttcagaagaggtcagaattgatcgccaaaatcccaaatttttgggtaacaacatttgtcaaccatccacaagtgtctgcactgcttggggaggaagatgaagaggcactgcattatttgaccagagttgaagtgacagaatttgaagatattaaatcaggttacagaatagatttttattttgatgaaaatccttactttgaaaataaagttctctccaaagaatttcatctgaatgagagtggtgatccatcttcgaagtccaccgaaatcaaatggaaatctggaaaggatttgacgaaacgttcgagtcaaacgcagaataaagccagcaggaagaggcagcatgaggaaccagagagcttctttacctggtttactgaccattctgatgcaggtgctgatgagttaggagaggtcatcaaagatgatatttggccaaacccattacagtactacttggttcccgatatggatgatgaagaaggagaaggagaagaagatgatgatgatgatgaagaggaggaaggattagaagatattgacgaagaaggggatgaggatgaaggtgaagaagatgaagatgatgatgaaggggaggaaggagaggaggatgaaggagaagatgactaaatagaacactgatggattccaaccttcctttttttaaattttctccagtccctgggagcaagttgcagtctttttttttttttttttttttttccctcttgtgctcagtcgccctgttcttgaggtctcttttctctactccatggttctcaatttatttggggggaaataccttgagcagaatacaatgggaaaagagtctctacccctttctgttcgaagttcatttttatcccttcctgtctgaacaaaaactgtatggaatcaacaccaccgagctctgtgggaaaaaagaaaaacctgctcccttcgctctgctggaagctggagggtgctaggcccctgtgtagtagtgcatagaattctagcttttttcctcctttctctgtatattgggctcagagagtacactgtgtctctatgtgaatatggacagttagcatttaccaacatgtatctgtctactttctcttgtttaaaaaaagaaaaaaaaacttaagactgcaacttgctcccagggactggggaaaatttaaaaagggaggttgaatccatcagtgttctatttag

SEQ ID NO: 451281 - DNA, 1490 bp, Homo sapiens
cctcgccgtaggaggaggtggaggaggaggcggctcgggagagcgagcagcgagctggctggatcgccgagcgcgagtgagggagccgagccgcccgccgccgccgcctccgcctcccctccgcgaacaggagcccgggccggggcccggcacgccgccccagcccgtccctcggcgtcaggccgcgagggtagcgcgcgcgagcgagcgagggggagggagagcgagcgagcgccgggaggaggcggccggaccgagcgggcgcccgcgcgtgtggcgtgaggggaagccgcttgcccgcccccttcgccttcccttctctccccctccccgctccccccccgaccgcggagcagcaccatgtcggcgccggcggccaaagtcagtaaaaaggagctcaactccaaccacgacggggccgacgagacctcagaaaaagaacagcaagaagcgattgaacacattgatgaagtacaaaatgaaatagacagacttaatgaacaagccagtgaggagattttgaaagtagaacagaaatataacaaactccgccaaccattttttcagaagaggtcagaattgatcgccaaaatcccaaatttttgggtaacaacatttgtcaaccatccacaagtgtctgcactgcttggggaggaagatgaagaggcactgcattatttgaccagagttgaagtgacagaatttgaagatattaaatcaggttacagaatagatttttattttgatgaaaatccttactttgaaaataaagttctctccaaagaatttcatctgaatgagagtggtgatccatcttcgaagtccaccgaaatcaaatggaaatctggaaaggatttgacgaaacgttcgagtcaaacgcagaataaagccagcaggaagaggcagcatgaggaaccagagagcttctttacctggtttactgaccattctgatgcaggtgctgatgagttaggagaggtcatcaaagatgatatttggccaaacccattacagtactacttggttcccgatatggatgatgaagaaggagaaggagaagaagatgatgatgatgatgaagaggaggaaggattagaagatattgacgaagaaggggatgaggatgaaggtgaagaagatgaagatgatgatgaaggggaggaaggagaggaggatgaaggagaagatgactaaatagaacactgatggattccaaccttcctttttttaaattttctccagtccctgggagcaagttgcagtctttttttttttttttttttttttccctcttgtgctcagtcgccctgttcttgaggtctcttttctctactccatggttctcaatttatttggggggaaataccttgagcagaatacaatgggaaaagagtctctacccctttctgttcgaagttcatttttatcccttcctgtctgaacaaaaactgtatccctccacaggggacctcctgaacgactagtgcaca

SEQ ID NO: 451282 - DNA, 1332 bp, Homo sapiens
cctcgccgtaggaggaggtggaggaggaggcggctcgggagagcgagcagcgagctggctggatcgccgagcgcgagtgagggagccgagccgcccgccgccgccgcctccgcctcccctccgcgaacaggagcccgggccggggcccggcacgccgccccagcccgtccctcggcgtcaggccgcgagggtagcgcgcgcgagcgagcgagggggagggagagcgagcgagcgccgggaggaggcggccggaccgagcgggcgcccgcgcgtgtggcgtgaggggaagccgcttgcccgcccccttcgccttcccttctctccccctccccgctccccccccgaccgcggagcagcaccatgtcggcgccggcggccaaagtcagtaaaaaggagctcaactccaaccacgacggggccgacgagacctcagaaaaagaacagcaagaagcgattgaacacattgatgaagtacaaaatgaaatagacagacttaatgaacaagccagtgaggagattttgaaagtagaacagaaatataacaaactccgccaaccattttttcagaagaggtcagaattgatcgccaaaatcccaaatttttgggtaacaacatttgtcaaccatccacaagtgtctgcactgcttggggaggaagatgaagaggcactgcattatttgaccagagttgaagtgacagaatttgaagatattaaatcaggttacagaatagatttttattttgatgaaaatccttactttgaaaataaagttctctccaaagaatttcatctgaatgagagtggtgatccatcttcgaagtccaccgaaatcaaatggaaatctggaaaggatttgacgaaacgttcgagtcaaacgcagaataaagccagcaggaagaggcagcatgaggaaccagagagcttctttacctggtttactgaccattctgatgcaggtgctgatgagttaggagaggtcatcaaagatgatatttggccaaacccattacagtactacttggttcccgatatggatgatgaagaaggagaaggagaagaagatgatgatgatgatgaagaggaggaaggattagaagatattgacgaagaaggggatgaggatgaaggtgaagaagatgaagatgatgatgaaggggaggaaggagaggaggatgaaggagaagatgactaaatagaacactgatggattccaaccttcctttttttaaattttctccagtccctgggaagccagagccgctgccatgccccagccagtccccacagcataacaggctctccttggcagctgtattctggagtctgcatc

SEQ ID NO: 451283 - DNA, 1228 bp, Homo sapiens
cctcgccgtaggaggaggtggaggaggaggcggctcgggagagcgagcagcgagctggctggatcgccgagcgcgagtgagggagccgagccgcccgccgccgccgcctccgcctcccctccgcgaacaggagcccgggccggggcccggcacgccgccccagcccgtccctcggcgtcaggccgcgagggtagcgcgcgcgagcgagcgagggggagggagagcgagcgagcgccgggaggaggcggccggaccgagcgggcgcccgcgcgtgtggcgtgaggggaagccgcttgcccgcccccttcgccttcccttctctccccctccccgctccccccccgaccgcggagcagcaccatgtcggcgccggcggccaaagtcagtaaaaaggagctcaactccaaccacgacggggccgacgagacctcagaaaaagaacagcaagaagcgattgaacacattgatgaagtacaaaatgaaatagacagacttaatgaacaagccagtgaggagattttgaaagtagaacagaaatataacaaactccgccaaccattttttcagaagaggtcagaattgatcgccaaaatcccaaatttttgggtaacaacatttgtcaaccatccacaagtgtctgcactgcttggggaggaagatgaagaggcactgcattatttgaccagagttgaagtgacagaatttgaagatattaaatcaggttacagaatagatttttattttgatgaaaatccttactttgaaaataaagttctctccaaagaatttcatctgaatgagagtggtgatccatcttcgaagtccaccgaaatcaaatggaaatctggaaaggatttgacgaaacgttcgagtcaaacgcagaataaagccagcaggaagaggcagcatgaggaaccagagagcttctttacctggtttactgaccattctgatgcaggtgctgatgagttaggagaggtcatcaaagatgatatttggccaaacccattacagtactacttggttcccgatatggatgatgaagaaggagaaggagaagaagatgatgatgatgatgaagaggaggaaggattagaagatattgacgaagaaggggatgaggatgaaggtgaagaagatgaggaggcactgcattatttgaccagagttgaagtgacagaatttgaagatattaaatcaggtacagaatagatttttattttgatga

SEQ ID NO: 451284 - DNA, 1616 bp, Homo sapiens
cctcgccgtaggaggaggtggaggaggaggcggctcgggagagcgagcagcgagctggctggatcgccgagcgcgagtgagggagccgagccgcccgccgccgccgcctccgcctcccctccgcgaacaggagcccgggccggggcccggcacgccgccccagcccgtccctcggcgtcaggccgcgagggtagcgcgcgcgagcgagcgagggggagggagagcgagcgagcgccgggaggaggcggccggaccgagcgggcgcccgcgcgtgtggcgtgaggggaagccgcttgcccgcccccttcgccttcccttctctccccctccccgctccccccccgaccgcggagcagcaccatgtcggcgccggcggccaaagtcagtaaaaaggagctcaactccaaccacgacggggccgacgagacctcagaaaaagaacagcaagaagcgattgaacacattgatgaagtacaaaatgaaatagacagacttaatgaacaagccagtgaggagattttgaaagtagaacagaaatataacaaactccgccaaccattttttcagaagaggtcagaattgatcgccaaaatcccaaatttttgggtaacaacatttgtcaaccatccacaagtgtctgcactgcttggggaggaagatgaagaggcactgcattatttgaccagagttgaagtgacagaatttgaagatattaaatcaggttacagaatagatttttattttgatgaaaatccttactttgaaaataaagttctctccaaagaatttcatctgaatgagagtggtgatccatcttcgaagtccaccgaaatcaaatggaaatctggaaaggatttgacgaaacgttcgagtcaaacgcagaataaagccagcaggaagaggcagcatgaggaaccagagagcttctttacctggtttactgaccattctgatgcaggtgctgatgagttaggagaggtcatcaaagatgatatttggccaaacccattacagtactacttggttcccgatatggatgatgaagaaggagaaggagaagaagatgatgatgatgatgaagaggaggaaggatgtctgaagagtcagatgatgacatgggattcggcctttttgattaaattcctgctcccctgcaaaataaaagcctttttacacatcaaaaaaaaaaaaaaaaaaaaaaaaaaaaaaaaaacaaaaaagaaaaacaaaaaaaaaaaaaaaaaagaaaaaaaaacaaaaaaaagaaaggaggggagacagaaacaaaaaaaaaaaacaaggaggaaccacaaaaaacaagagaagacacacccacacaagaagagaccgcgaccacgcacctcaacgaaaagcgcagaagagcatgcagaagcagagaacactacacgcaaagctaacaacccacagtcgagtgacaagaacacgaacacaggaaggcgcagcgataagcgaacaaacacaacaaataatgactaagacaacaagagactaggctgactcttgttcaccaccgtaaagagaggacgcaccgacagcgtaacacatgcagcagcactgagtgacgcagccagtcacaagtaggcgcaccaacagga

SEQ ID NO: 451285 - DNA, 1135 bp, Homo sapiens
cctcgccgtaggaggaggtggaggaggaggcggctcgggagagcgagcagcgagctggctggatcgccgagcgcgagtgagggagccgagccgcccgccgccgccgcctccgcctcccctccgcgaacaggagcccgggccggggcccggcacgccgccccagcccgtccctcggcgtcaggccgcgagggtagcgcgcgcgagcgagcgagggggagggagagcgagcgagcgccgggaggaggcggccggaccgagcgggcgcccgcgcgtgtggcgtgaggggaagccgcttgcccgcccccttcgccttcccttctctccccctccccgctccccccccgaccgcggagcagcaccatgtcggcgccggcggccaaagtcagtaaaaaggagctcaactccaaccacgacggggccgacgagacctcagaaaaagaacagcaagaagcgattgaacacattgatgaagtacaaaatgaaatagacagacttaatgaacaagccagtgaggagattttgaaagtagaacagaaatataacaaactccgccaaccattttttcagaagaggtcagaattgatcgccaaaatcccaaatttttgggtaacaacatttgtcaaccatccacaagtgtctgcactgcttggggaggaagatgaagaggcactgcattatttgaccagagttgaagtgacagaatttgaagatattaaatcaggttacagaatagatttttattttgatgaaaatccttactttgaaaataaagttctctccaaagaatttcatctgaatgagagtggtgatccatcttcgaagtccaccgaaatcaaatggaaatctggaaaggatttgacgaaacgttcgagtcaaacgcagaataaagccagcaggaagaggcagcatgaggaaccagagagcttctttacctggtttactgaccattctgatgcaggtgctgactatttgtggctagtcccctccccttcgctcaacaagattttaaaatgttaaccttaaaaaggaggagtacgtttattgggtcctttctttgcccttccctccacatttcatctcccattagatatatgatatatttttaaaccatatgaacaaatgaaccttgaaacgg

SEQ ID NO: 451286 - DNA, 4339 bp, Homo sapiens
tcaaagaactctgtcagcctttcatggcaacaaccagctttcgatggaggtagcaagattacaggctacattgttgagagacgtgaccttccagatggcagatggaccaaggccagcttcaccaatgttactgaaactcaattcatcatctctggcttgactcagaattcccagtatgaattccgtgtctttgctaggaatgctgttggttccattagcaatccatctgaggttgtagggcccattacttgcatcgattcttatggtggtcctgtaattgatttgcctctagaatatacagaagttgtcaaatacagagcaggtacatctgtgaagctcagagctggcatttctggcaaacctgcgcctactattgagtggtataaagatgataaagaattacaaaccaatgcactggtgtgtgttgaaaataccacggacctcgcatctatactcatcaaagatgccgatcgccttaatagtggatgctatgaattaaaactaaggaatgccatgggctcagcctcagccaccatcagagtacagatccttgacaaaccaggcccacctggtggaccaattgaatttaagactgtaactgctgagaagatcacccttctctggcggcctccagctgatgatggtggtgcaaaaatcactcactacattgtggaaaagcgtgagacaagccgcgttgtgtggtctatggtgtctgaacatttggaagagtgcatcattacaaccaccaaaattatcaaaggaaatgaatacatcttccgggtccgagccgtgaacaaatatggaattggcgagccactggaatctgattccgttgtagccaagaacgcatttgttacacctgggccaccaggcataccagaagtgacaaagattaccaagaattcgatgactgttgtatggagcaggccaattgcagatggcggtagtgatataagtggctatttccttgaaaaacgagacaagaagagcctaggatggtttaaagtactaaaagagactatccgtgacaccagacaaaaagtaacaggactcacagaaaacagtgactatcaatacagagtttgtgctgtaaacgctgctggacagggtccattttctgaaccatctgaattctacaaagctgctgatcctattgatcctccaggtccacctgctaagataagaatcgcagattcaaccaagtcatccatcacccttggctggagtaagcctgtctatgatgggggcagtgctgttactgggtatgttgtcgagataagacaaggagaggaagaggaatggactactgtctctaccaaaggagaggtcagaactacagaatatgtggtatccaacctgaaacctggagtcaattactacttccgggtatctgctgtaaactgtgctggacaaggagaacctatagaaatgaatgaacctgtacaagctaaagatatacttgaggcaccagagattgacctggatgtggctctcagaacttctgttattgccaaagctggtgaagatgtacaagtgttgattccctttaaaggcagacctccacctactgtcacatggagaaaagatgagaagaatcttggcagtgatgcagatacagcattgaaaacactgattcatcctcattactcaccattcctcaagttactcgcaatgatacaggaaaatatattctcacaatagaaaatggagttggtgaacctaagtcttcaactgtgagtgttaaagtgcttgacacaccagctgcctgccagaaactacaggttaaacatgtttctcgaggcacagtcactttgctctgggatcctcctctcattgatggaggatctccaataattaattatgtcattgaaaagagagatgccaccaagagaacatggtctgtcgtgtcacacaaatgttctagcacatccttcaagctaatagatttgtcggagaagactccattcttcttcagagttcttgcagaaaatgaaattggaattggggaaccctgtgaaactacagagccagtgaaggctgctgaagtaccagctcctatacgtgatctctcaatgaaagactcaacaaagacatctgtcatcctcagctggaccaaacctgactttgatggtggtagcgtcatcacagaatatgttgtagaaaggaaaggtaaaggtgaacagacgtggtcccacgctggcataagtaagacatgtgaaattgaggttagccaacttaaggagcagtcagtcctggagttcagagtgtttgccaaaaatgagaaaggactgagtgatcctgtcactattgggccaattacagtgaaagaacttattattacacctgaagttgacctgtcagatatccctggggcacaagtcactgtgagaattgggcacaatgtgcaccttgaattaccttataagggaaaacccaaaccatccatcagttggctgaaagatggcttgccactgaaagaaagtgaatttgttcgcttcagtaaaactgaaaacaaaattactttgagtattaagaatgccaagaaggagcatggaggaaaatacactgttattcttgataatgcagtgtgtagaattgcagtccccattacagtcatcacccttggcccaccatcaaagcccaaaggacccattcgatttgatgaaatcaaggctgatagtgtcatcctgtcatgggatgtacctgaagataatggaggaggagaaattacttgttacagcatcgagaagcgggaaacttcacaaactaactggaagatggtgtgttcaagtgttgccagaacgactttcaaagttcctaatctagtcaaagatgctgagtaccagtttagagtgagagcagaaaacagatacggagtcagccaaccacttgtctcaagcattattgtggcaaaacaccagttcaggattcctggtcccccaggaaagccagttatatacaatgtgacttctgatggcatgtcactaacttgggatgctccagtttatgatggtggttcagaagttactggattccatgttgaaaagaaagaaagaaatagcatcctctggcaaaaagttaatacatcaccaatctctggaagagaatatagagccactggactggtagaaggtctggattaccaattccgtgtatatgctgaaaattctgctggcctaagctcacctagtgacccaagcaaatttaccttagctgtttctccagtagacccacctggcactcctgactacattgatgtcacccgggaaaccatcacacttaaatggaacccaccattgcgtgatggaggcagtaagattgtgggctatagcattgagaaacggcaaggaaatgaacgctgggtgagatgcaactttactgacgtcagtgaatgtcagtacacagttacaggactcagtcctggggatcgctatgagttcagaataattgcaagaaatgctgttggaactataagcccgccctcacagtcttctggcattattatgacaagagatgaaaatgttccaccaatagtagagtttggccctgaatactttgatggtctcattattaagtccggagagagccttagaattaaagctttggtacaaggaagaccagtgcctcgagtaacttggttcaaagatggagtggaaatcgaaaagaggatgaatatggaaataaccgacgtacttggatccaccagcctatttgttagagatgctactcgggaccatcgtggtgtatacacagtggaagccaaaaatgcatctggttctgcaaaagcagaaattaaagtgaaagtacaagatacaccaggaaaagtagttgggccaataagattcaccaatattactggggagaagatgactctgtggtgggatgccccactcaatgacggttgtgctcccataacccactacatcattgaaaaacgggaaaccagcagacttgcctgggcactaattgaggataaatgtgaagcccaaagttacactgccattaaactaataaacggcaatgaataccaattccgtgtttctgcagttaacaagtttggtgttggcaggccacttgattctgatccagtggttgctcaaatacaatatactgttcctgatgcccctggcattccagaacctagcaacataacaggcaacagcattaccctgacatgggcaaggccagaatcagatggtggcagtgaaattcaacagtatatccaccacgatggtcccgagtagcatctctaacaaataggctggtggatccaagtacgtcggttatttccatattcatccccttttcgatttccattccatccttgaaccaagttact

SEQ ID NO: 451287 - DNA, 3837 bp, Homo sapiens
tcaaagaactctgtcagcctttcatggcaacaaccagctttcgatggaggtagcaagattacaggctacattgttgagagacgtgaccttccagatggcagatggaccaaggccagcttcaccaatgttactgaaactcaattcatcatctctggcttgactcagaattcccagtatgaattccgtgtctttgctaggaatgctgttggttccattagcaatccatctgaggttgtagggcccattacttgcatcgattcttatggtggtcctgtaattgatttgcctctagaatatacagaagttgtcaaatacagagcaggtacatctgtgaagctcagagctggcatttctggcaaacctgcgcctactattgagtggtataaagatgataaagaattacaaaccaatgcactggtgtgtgttgaaaataccacggacctcgcatctatactcatcaaagatgccgatcgccttaatagtggatgctatgaattaaaactaaggaatgccatgggctcagcctcagccaccatcagagtacagatccttgacaaaccaggcccacctggtggaccaattgaatttaagactgtaactgctgagaagatcacccttctctggcggcctccagctgatgatggtggtgcaaaaatcactcactacattgtggaaaagcgtgagacaagccgcgttgtgtggtctatggtgtctgaacatttggaagagtgcatcattacaaccaccaaaattatcaaaggaaatgaatacatcttccgggtccgagccgtgaacaaatatggaattggcgagccactggaatctgattccgttgtagccaagaacgcatttgttacacctgggccaccaggcataccagaagtgacaaagattaccaagaattcgatgactgttgtatggagcaggccaattgcagatggcggtagtgatataagtggctatttccttgaaaaacgagacaagaagagcctaggatggtttaaagtactaaaagagactatccgtgacaccagacaaaaagtaacaggactcacagaaaacagtgactatcaatacagagtttgtgctgtaaacgctgctggacagggtccattttctgaaccatctgaattctacaaagctgctgatcctattgatcctccaggtccacctgctaagataagaatcgcagattcaaccaagtcatccatcacccttggctggagtaagcctgtctatgatgggggcagtgctgttactgggtatgttgtcgagataagacaaggagaggaagaggaatggactactgtctctaccaaaggagaggtcagaactacagaatatgtggtatccaacctgaaacctggagtcaattactacttccgggtatctgctgtaaactgtgctggacaaggagaacctatagaaatgaatgaacctgtacaagctaaagatatacttgaggcaccagagattgacctggatgtggctctcagaacttctgttattgccaaagctggtgaagatgtacaagtgttgattccctttaaaggcagacctccacctactgtcacatggagaaaagatgagaagaatcttggcagtgatgcagatacagcattgaaaacactgattcatcctcattactcaccattcctcaagttactcgcaatgatacaggaaaatatattctcacaatagaaaatggagttggtgaacctaagtcttcaactgtgagtgttaaagtgcttgacacaccagctgcctgccagaaactacaggttaaacatgtttctcgaggcacagtcactttgctctgggatcctcctctcattgatggaggatctccaataattaattatgtcattgaaaagagagatgccaccaagagaacatggtctgtcgtgtcacacaaatgttctagcacatccttcaagctaatagatttgtcggagaagactccattcttcttcagagttcttgcagaaaatgaaattggaattggggaaccctgtgaaactacagagccagtgaaggctgctgaagtaccagctcctatacgtgatctctcaatgaaagactcaacaaagacatctgtcatcctcagctggaccaaacctgactttgatggtggtagcgtcatcacagaatatgttgtagaaaggaaaggtaaaggtgaacagacgtggtcccacgctggcataagtaagacatgtgaaattgaggttagccaacttaaggagcagtcagtcctggagttcagagtgtttgccaaaaatgagaaaggactgagtgatcctgtcactattgggccaattacagtgaaagaacttattattacacctgaagttgacctgtcagatatccctggggcacaagtcactgtgagaattgggcacaatgtgcaccttgaattaccttataagggaaaacccaaaccatccatcagttggctgaaagatggcttgccactgaaagaaagtgaatttgttcgcttcagtaaaactgaaaacaaaattactttgagtattaagaatgccaagaaggagcatggaggaaaatacactgttattcttgataatgcagtgtgtagaattgcagtccccattacagtcatcacccttggcccaccatcaaagcccaaaggacccattcgatttgatgaaatcaaggctgatagtgtcatcctgtcatgggatgtacctgaagataatggaggaggagaaattacttgttacagcatcgagaagcgggaaacttcacaaactaactggaagatggtgtgttcaagtgttgccagaacgactttcaaagttcctaatctagtcaaagatgctgagtaccagtttagagtgagagcagaaaacagatacggagtcagccaaccacttgtctcaagcattattgtggcaaaacaccagttcaggattcctggtcccccaggaaagccagttatatacaatgtgacttctgatggcatgtcactaacttgggatgctccagtttatgatggtggttcagaagttactggattccatgttgaaaagaaagaaagaaatagcatcctctggcaaaaagttaatacatcaccaatctctggaagagaatatagagccactggactggtagaaggtctggattaccaattccgtgtatatgctgaaaattctgctggcctaagctcacctagtgacccaagcaaatttaccttagctgtttctccagtagacccacctggcactcctgactacattgatgtcacccgggaaaccatcacacttaaatggaacccaccattgcgtgatggaggcagtaagattgtgggctatagcattgagaaacggcaaggaaatgaacgctgggtgagatgcaactttactgacgtcagtgaatgtcagtacacagttacaggactcagtcctggggatcgctatgagttcagaataattgcaagaaatgctgttggaactataagcccgccctcacagtcttctggcattattatgacaagagatgaaaatggtaagcatttacaacttatttccaatgagactaagagcattcacatttttaaaaaacacatttggcccctggctcgtaaaatggtaacagaaacaaattacccaaggttgctaagtggatgaattatgtctttctacctttcagatgaaaagaagaaaaaaataattgggcatcaattattttttctattatttcactccattcccatataaagagcatgcagcaagtgggaatgagtttttagctttgtaattttcgccacttaacagtacataaagaaaaggttctcgagaataagtgtccatctttactgaa

SEQ ID NO: 451288 - DNA, 2735 bp, Homo sapiens
  misc_feature (2692)..(2692): n is a, c, g, or t
tcaaagaactctgtcagcctttcatggcaacaaccagctttcgatggaggtagcaagattacaggctacattgttgagagacgtgaccttccagatggcagatggaccaaggccagcttcaccaatgttactgaaactcaattcatcatctctggcttgactcagaattcccagtatgaattccgtgtctttgctaggaatgctgttggttccattagcaatccatctgaggttgtagggcccattacttgcatcgattcttatggtggtcctgtaattgatttgcctctagaatatacagaagttgtcaaatacagagcaggtacatctgtgaagctcagagctggcatttctggcaaacctgcgcctactattgagtggtataaagatgataaagaattacaaaccaatgcactggtgtgtgttgaaaataccacggacctcgcatctatactcatcaaagatgccgatcgccttaatagtggatgctatgaattaaaactaaggaatgccatgggctcagcctcagccaccatcagagtacagatccttgacaaaccaggcccacctggtggaccaattgaatttaagactgtaactgctgagaagatcacccttctctggcggcctccagctgatgatggtggtgcaaaaatcactcactacattgtggaaaagcgtgagacaagccgcgttgtgtggtctatggtgtctgaacatttggaagagtgcatcattacaaccaccaaaattatcaaaggaaatgaatacatcttccgggtccgagccgtgaacaaatatggaattggcgagccactggaatctgattccgttgtagccaagaacgcatttgttacacctgggccaccaggcataccagaagtgacaaagattaccaagaattcgatgactgttgtatggagcaggccaattgcagatggcggtagtgatataagtggctatttccttgaaaaacgagacaagaagagcctaggatggtttaaagtactaaaagagactatccgtgacaccagacaaaaagtaacaggactcacagaaaacagtgactatcaatacagagtttgtgctgtaaacgctgctggacagggtccattttctgaaccatctgaattctacaaagctgctgatcctattgatcctccaggtccacctgctaagataagaatcgcagattcaaccaagtcatccatcacccttggctggagtaagcctgtctatgatgggggcagtgctgttactgggtatgttgtcgagataagacaaggagaggaagaggaatggactactgtctctaccaaaggagaggtcagaactacagaatatgtggtatccaacctgaaacctggagtcaattactacttccgggtatctgctgtaaactgtgctggacaaggagaacctatagaaatgaatgaacctgtacaagctaaagatatacttgaggcaccagagattgacctggatgtggctctcagaacttctgttattgccaaagctggtgaagatgtacaagtgttgattccctttaaaggcagacctccacctactgtcacatggagaaaagatgagaagaatcttggcagtgatgcagatacagcattgaaaacactgattcatcctcattactcaccattcctcaagttactcgcaatgatacaggaaaatatattctcacaatagaaaatggagttggtgaacctaagtcttcaactgtgagtgttaaagtgcttgacacaccagctgcctgccagaaactacaggttaaacatgtttctcgaggcacagtcactttgctctgggatcctcctctcattgatggaggatctccaataattaattatgtcattgaaaagagagatgccaccaagagaacatggtctgtcgtgtcacacaaatgttctagcacatccttcaagctaatagatttgtcggagaagactccattcttcttcagagttcttgcagaaaatgaaattggaattggggaaccctgtgaaactacagagccagtgaaggctgctgaagtaccagctcctatacgtgatctctcaatgaaagactcaacaaagacatctgtcatcctcagctggaccaaacctgactttgatggtggtagcgtcatcacagaatatgttgtagaaaggaaaggtaaaggtgaacagacgtggtcccacgctggcataagtaagacatgtgaaattgaggttagccaacttaaggagcagtcagtcctggagttcagagtgtttgccaaaaatgagaaaggactgagtgatcctgtcactattgggccaattacagtgaaagaacttattattacacctgaagttgacctgtcagatatccctggggcacaagtcactgtgagaattgggcacaatgtgcaccttgaattaccttataagggaaaacccaaaccatccatcagttggctgaaagatggcttgccactgaaagaaagtgaatttgttcgcttcagtaaaactgaaaacaaaattactttgagtattaagaatgccaagaaggagcatggaggaaaatacactgttattcttgataatgcagtgtgtagaattgcagtccccaattccaatttcattttctgcaaggactctgaagaaggatggagtcttctccgacaaatctattagcttgaaggatgtgctaggancatttgtgtgacacgggcagaccatgttctcttggtggcatct

SEQ ID NO: 451289 - DNA, 5964 bp, Homo sapiens
tcaaagaactctgtcagcctttcatggcaacaaccagctttcgatggaggtagcaagattacaggctacattgttgagagacgtgaccttccagatggcagatggaccaaggccagcttcaccaatgttactgaaactcaattcatcatctctggcttgactcagaattcccagtatgaattccgtgtctttgctaggaatgctgttggttccattagcaatccatctgaggttgtagggcccattacttgcatcgattcttatggtggtcctgtaattgatttgcctctagaatatacagaagttgtcaaatacagagcaggtacatctgtgaagctcagagctggcatttctggcaaacctgcgcctactattgagtggtataaagatgataaagaattacaaaccaatgcactggtgtgtgttgaaaataccacggacctcgcatctatactcatcaaagatgccgatcgccttaatagtggatgctatgaattaaaactaaggaatgccatgggctcagcctcagccaccatcagagtacagatccttgacaaaccaggcccacctggtggaccaattgaatttaagactgtaactgctgagaagatcacccttctctggcggcctccagctgatgatggtggtgcaaaaatcactcactacattgtggaaaagcgtgagacaagccgcgttgtgtggtctatggtgtctgaacatttggaagagtgcatcattacaaccaccaaaattatcaaaggaaatgaatacatcttccgggtccgagccgtgaacaaatatggaattggcgagccactggaatctgattccgttgtagccaagaacgcatttgttacacctgggccaccaggcataccagaagtgacaaagattaccaagaattcgatgactgttgtatggagcaggccaattgcagatggcggtagtgatataagtggctatttccttgaaaaacgagacaagaagagcctaggatggtttaaagtactaaaagagactatccgtgacaccagacaaaaagtaacaggactcacagaaaacagtgactatcaatacagagtttgtgctgtaaacgctgctggacagggtccattttctgaaccatctgaattctacaaagctgctgatcctattgatcctccaggtccacctgctaagataagaatcgcagattcaaccaagtcatccatcacccttggctggagtaagcctgtctatgatgggggcagtgctgttactgggtatgttgtcgagataagacaaggagaggaagaggaatggactactgtctctaccaaaggagaggtcagaactacagaatatgtggtatccaacctgaaacctggagtcaattactacttccgggtatctgctgtaaactgtgctggacaaggagaacctatagaaatgaatgaacctgtacaagctaaagatatacttgaggcaccagagattgacctggatgtggctctcagaacttctgttattgccaaagctggtgaagatgtacaagtgttgattccctttaaaggcagacctccacctactgtcacatggagaaaagatgagaagaatcttggcagtgatgcagatacagcattgaaaacactgattcatcctcattactcaccattcctcaagttactcgcaatgatacaggaaaatatattctcacaatagaaaatggagttggtgaacctaagtcttcaactgtgagtgttaaagtgcttgacacaccagctgcctgccagaaactacaggttaaacatgtttctcgaggcacagtcactttgctctgggatcctcctctcattgatggaggatctccaataattaattatgtcattgaaaagagagatgccaccaagagaacatggtctgtcgtgtcacacaaatgttctagcacatccttcaagctaatagatttgtcggagaagactccattcttcttcagagttcttgcagaaaatgaaattggaattggggaaccctgtgaaactacagagccagtgaaggctgctgaagtaccagctcctatacgtgatctctcaatgaaagactcaacaaagacatctgtcatcctcagctggaccaaacctgactttgatggtggtagcgtcatcacagaatatgttgtagaaaggaaaggtaaaggtgaacagacgtggtcccacgctggcataagtaagacatgtgaaattgaggttagccaacttaaggagcagtcagtcctggagttcagagtgtttgccaaaaatgagaaaggactgagtgatcctgtcactattgggccaattacagtgaaagaacttattattacacctgaagttgacctgtcagatatccctggggcacaagtcactgtgagaattgggcacaatgtgcaccttgaattaccttataagggaaaacccaaaccatccatcagttggctgaaagatggcttgccactgaaagaaagtgaatttgttcgcttcagtaaaactgaaaacaaaattactttgagtattaagaatgccaagaaggagcatggaggaaaatacactgttattcttgataatgcagtgtgtagaattgcagtccccattacagtcatcacccttggcccaccatcaaagcccaaaggacccattcgatttgatgaaatcaaggctgatagtgtcatcctgtcatgggatgtacctgaagataatggaggaggagaaattacttgttacagcatcgagaagcgggaaacttcacaaactaactggaagatggtgtgttcaagtgttgccagaacgactttcaaagttcctaatctagtcaaagatgctgagtaccagtttagagtgagagcagaaaacagatacggagtcagccaaccacttgtctcaagcattattgtggcaaaacaccagttcaggattcctggtcccccaggaaagccagttatatacaatgtgacttctgatggcatgtcactaacttgggatgctccagtttatgatggtggttcagaagttactggattccatgttgaaaagaaagaaagaaatagcatcctctggcaaaaagttaatacatcaccaatctctggaagagaatatagagccactggactggtagaaggtctggattaccaattccgtgtatatgctgaaaattctgctggcctaagctcacctagtgacccaagcaaatttaccttagctgtttctccagtagacccacctggcactcctgactacattgatgtcacccgggaaaccatcacacttaaatggaacccaccattgcgtgatggaggcagtaagattgtgggctatagcattgagaaacggcaaggaaatgaacgctgggtgagatgcaactttactgacgtcagtgaatgtcagtacacagttacaggactcagtcctggggatcgctatgagttcagaataattgcaagaaatgctgttggaactataagcccgccctcacagtcttctggcattattatgacaagagatgaaaatgttccaccaatagtagagtttggccctgaatactttgatggtctcattattaagtccggagagagccttagaattaaagctttggtacaaggaagaccagtgcctcgagtaacttggttcaaagatggagtggaaatcgaaaagaggatgaatatggaaataaccgacgtacttggatccaccagcctatttgttagagatgctactcgggaccatcgtggtgtatacacagtggaagccaaaaatgcatctggttctgcaaaagcagaaattaaagtgaaagtacaagatacaccaggaaaagtagttgggccaataagattcaccaatattactggggagaagatgactctgtggtgggatgccccactcaatgacggttgtgctcccataacccactacatcattgaaaaacgggaaaccagcagacttgcctgggcactaattgaggataaatgtgaagcccaaagttacactgccattaaactaataaacggcaatgaataccaattccgtgtttctgcagttaacaagtttggtgttggcaggccacttgattctgatccagtggttgctcaaatacaatatactgttcctgatgcccctggcattccagaacctagcaacataacaggcaacagcattaccctgacatgggcaaggccagaatcagatggtggcagtgaaattcaacagtatatccttgaaagaagagaaaagaaaagcacaagatgggtaaaagtgatcagcaaacgaccaatctctgaaacaagattcaaagtcactggtctgacagaaggcaatgagtatgaattccatgtcatggctgaaaatgctgcaggagttggacctgcaagtggcatctcaagactcattaaatgtagagagcccgtcaacccaccaggtcctcccacagtggtcaaagtaacagacacatcaaagacaactgtgagcttagaatggtccaaaccagtgtttgatggtggcatggaaataattgggtatattattgaaatgtgtaaggccgacttaggagactggcacaaggtgaatgcagaggcatgtgtgaaaacaagatatacagtcactgatctacaagcaggtgaagaatacaaattccgagttagtgctatcaatggtgctggaaaaggcgacagctgtgaagtgactggcacaattaaagcagttgaccggttaacagctcctgagttagacatagatgcaaacttcaaacagactcatgttgttagagctggggccagtattcgcctcttcattgcctaccaaggtagacctactcctacagctgtgtggagcaaaccagactctaaccttagccttcgggctgatatccatacaacagattccttcagcaccctcactgtggaaaactgcaacagaaatgatgcagggaaatatacccttactgtggaaaacaacagtggtagtaagtcaatcacattcaccgtgaaagtgctagacactccaggcccacctggcccaattaccttcaaagatgtgacccggggatctgctacattgatgtgggatgcccctcttcttgacggtggtgcccgaatccatcattatgtggtagagaaacgagaggcaagtcgccgtagttggcaggttatcagtgaaaaatgcactcgtcagatcttcaaggtcaatgacctggccgaaggtgttccgtactatttccgtgtttctgcagtaaatgagtatggtgttggtgagccctatgaaatgccagaaccaattgtagccacagaacagcctgctccacctaggagacttgatgttgttgatactagcaaatcctccgcagtcttagcttggcttaaacctgaccacgatggaggcagccggatcactggctacctgcttgaaatgagacaaaagggatctgacttctgggttgaagctggtcacaccaaacagctaactttcacagtagagcgtcttgttgagaaaactgaatatgaattccgtgtgaaggccaagaatgatgctggctatagtgaacccagagaagccttctcttctgtcatcattaaggagcctcaaatcgagcccactgctgacctcactggaattaccaatcagcttataacttgcaaagcaggaagcccatttaccattgacgtaccaatcagtggtcgtcctgcccccaaagtaacatggaaactggaagaaatgagacttaaagagacagatcgagtgagcattacaacaacaaaagacagaaccacactgactgtaaaggacagcatgagaggtgactctggaagatacttcttgaccctggaaaatacagctggtgttaaaacatttagcgtcacagttgtggtcattggaaggccaggtccagtaaccggccccattgaggtctcatctgtctcagctgaatcgtgtgtcctgtcatggggagaacctaaagatg

SEQ ID NO: 451290 - DNA, 3929 bp, Homo sapiens
cccagctgaggatgacagatgtctttgttgagtctttcattgagagatcacgtataggagctggtacttcagctggaccaaacctgactttgatggtggtagcgtcatcacagaatatgttgtagaaaggaaaggtaaaggtgaacagacgtggtcccacgctggcataagtaagacatgtgaaattgaggttagccaacttaaggagcagtcagtcctggagttcagagtgtttgccaaaaatgagaaaggactgagtgatcctgtcactattgggccaattacagtgaaagaacttattattacacctgaagttgacctgtcagatatccctggggcacaagtcactgtgagaattgggcacaatgtgcaccttgaattaccttataagggaaaacccaaaccatccatcagttggctgaaagatggcttgccactgaaagaaagtgaatttgttcgcttcagtaaaactgaaaacaaaattactttgagtattaagaatgccaagaaggagcatggaggaaaatacactgttattcttgataatgcagtgtgtagaattgcagtccccattacagtcatcacccttggcccaccatcaaagcccaaaggacccattcgatttgatgaaatcaaggctgatagtgtcatcctgtcatgggatgtacctgaagataatggaggaggagaaattacttgttacagcatcgagaagcgggaaacttcacaaactaactggaagatggtgtgttcaagtgttgccagaacgactttcaaagttcctaatctagtcaaagatgctgagtaccagtttagagtgagagcagaaaacagatacggagtcagccaaccacttgtctcaagcattattgtggcaaaacaccagttcaggattcctggtcccccaggaaagccagttatatacaatgtgacttctgatggcatgtcactaacttgggatgctccagtttatgatggtggttcagaagttactggattccatgttgaaaagaaagaaagaaatagcatcctctggcaaaaagttaatacatcaccaatctctggaagagaatatagagccactggactggtagaaggtctggattaccaattccgtgtatatgctgaaaattctgctggcctaagctcacctagtgacccaagcaaatttaccttagctgtttctccagtagacccacctggcactcctgactacattgatgtcacccgggaaaccatcacacttaaatggaacccaccattgcgtgatggaggcagtaagattgtgggctatagcattgagaaacggcaaggaaatgaacgctgggtgagatgcaactttactgacgtcagtgaatgtcagtacacagttacaggactcagtcctggggatcgctatgagttcagaataattgcaagaaatgctgttggaactataagcccgccctcacagtcttctggcattattatgacaagagatgaaaatgttccaccaatagtagagtttggccctgaatactttgatggtctcattattaagtccggagagagccttagaattaaagctttggtacaaggaagaccagtgcctcgagtaacttggttcaaagatggagtggaaatcgaaaagaggatgaatatggaaataaccgacgtacttggatccaccagcctatttgttagagatgctactcgggaccatcgtggtgtatacacagtggaagccaaaaatgcatctggttctgcaaaagcagaaattaaagtgaaagtacaagatacaccaggaaaagtagttgggccaataagattcaccaatattactggggagaagatgactctgtggtgggatgccccactcaatgacggttgtgctcccataacccactacatcattgaaaaacgggaaaccagcagacttgcctgggcactaattgaggataaatgtgaagcccaaagttacactgccattaaactaataaacggcaatgaataccaattccgtgtttctgcagttaacaagtttggtgttggcaggccacttgattctgatccagtggttgctcaaatacaatatactgttcctgatgcccctggcattccagaacctagcaacataacaggcaacagcattaccctgacatgggcaaggccagaatcagatggtggcagtgaaattcaacagtatatccttgaaagaagagaaaagaaaagcacaagatgggtaaaagtgatcagcaaacgaccaatctctgaaacaagattcaaagtcactggtctgacagaaggcaatgagtatgaattccatgtcatggctgaaaatgctgcaggagttggacctgcaagtggcatctcaagactcattaaatgtagagagcccgtcaacccaccaggtcctcccacagtggtcaaagtaacagacacatcaaagacaactgtgagcttagaatggtccaaaccagtgtttgatggtggcatggaaataattgggtatattattgaaatgtgtaaggccgacttaggagactggcacaaggtgaatgcagaggcatgtgtgaaaacaagatatacagtcactgatctacaagcaggtgaagaatacaaattccgagttagtgctatcaatggtgctggaaaaggcgacagctgtgaagtgactggcacaattaaagcagttgaccggttaacagctcctgagttagacatagatgcaaacttcaaacagactcatgttgttagagctggggccagtattcgcctcttcattgcctaccaaggtagacctactcctacagctgtgtggagcaaaccagactctaaccttagccttcgggctgatatccatacaacagattccttcagcaccctcactgtggaaaactgcaacagaaatgatgcagggaaatatacccttactgtggaaaacaacagtggtagtaagtcaatcacattcaccgtgaaagtgctagacactccaggcccacctggcccaattaccttcaaagatgtgacccggggatctgctacattgatgtgggatgcccctcttcttgacggtggtgcccgaatccatcattatgtggtagagaaacgagaggcaagtcgccgtagttggcaggttatcagtgaaaaatgcactcgtcagatcttcaaggtcaatgacctggccgaaggtgttccgtactatttccgtgtttctgcagtaaatgagtatggtgttggtgagccctatgaaatgccagaaccaattgtagccacagaacagcctgctccacctaggagacttgatgttgttgatactagcaaatcctccgcagtcttagcttggcttaaacctgaccacgatggaggcagccggatcactggctacctgcttgaaatgagacaaaagggatctgacttctgggttgaagctggtcacaccaaacagctaactttcacagtagagcgtcttgttgagaaaactgaatatgaattccgtgtgaaggccaagaatgatgctggctatagtgaacccagagaagccttctcttctgtcatcattaaggagcctcaaatcgagcccactgctgacctcactggaattaccaatcagcttataacttgcaaagcaggaagcccatttaccattgacgtaccaatcagtggtcgtcctgcccccaaagtaacatggaaactggaagaaatgagacttaaagagacagatcgagtgagcattacaacaacaaaagacagaaccacactgactgtaaaggacagcatgagaggtgactctggaagatacttcttgaccctggaaaatacagctggtgttaaaacatttagcgtcacagttgtggtcattggaaggccaggtccagtaaccggccccattgaggtctcatctgtctcagctgaatcgtgtgtcctgtcatggggagaacctaaagatg

SEQ ID NO: 451291 - DNA, 201 bp, Homo sapiens
cgtcgacagggcattaacgatctctcaaaactgatcagttttggcccttgaagtggtttttgtgggtgtgaaacaaatggtgagaatttgaattggtccctcctattatagtattgaaattaagtctacttaatttatcaagtcatgttcatgccctgattttatatacttgtatctatcaataaacattgtgatacttga

SEQ ID NO: 451292 - DNA, 600 bp, Homo sapiens
  misc_feature (600)..(600): n is a, c, g, or t
gtttttcaaaaagcttaatgtttccctagattctgtcactgtataggattttagaatgttgtatttaatatgttcgccaactgcatgttgttaatttagatatattttgttttcaattccagattagcctgaggcctgctcagtcgttcctaatgaataaaaatcaagtgccaaagcttcagccccagataactatgattcctcctagtgcacaaccaccacgcactcaaacaccacctctgggacagacacctcagcttggtctcaaaactaatccaccacttatccaggaaaagcctgccaagaccagcaaaaagccaccaccgtcaaaggaagaactccttaaactaactgaaactgttgtgactgaatatctaaatagtggaaatgcaaatgaggctgtcaatggtgtaagagaaatgagggctcctaaacactttcttcctgagatgttaagcaaagtaatcatcctgtcactagatagaagcgatgaagataaagaaaaagcaagttctttgatcagtttactcaaacaggaagggatagccacaagtgacaacttcatgcagcttggtggggaatcactagtgaattcgcgcn

SEQ ID NO: 451293 - DNA, 477 bp, Homo sapiens
ctctctccacactggaaccacagaacttactgaatgagggccattcctctttaagttttcttttcatctgaaaaccctattatctagcaataagttaaattagagacagacacctcagcttggtctcaaaactaatccaccacttatccaggaaaagcctgccaagaccagcaaaaagccaccaccgtcaaaggaagaactccttaaactaactgaaactgttgtgactgaatatctaaatagtggaaatgcaaatgaggctgtcaatggtgtaagagaaatgagggctcctaaacactttcttcctgagatgttaagcaaagtaatcatcctgtcactagatagaagcgatgaagataaagaaaaagcaagttctttgatcagtttactcaaacaggaagggatagccacaagtgacaacttcatgcagctttcctgaatgtattggaccgtgtggagagaggggatccccagagt

SEQ ID NO: 451294 - DNA, 539 bp, Homo sapiens
cacgcaaccctcatctcgacagcgctcggcgccccttacgccactggctcagcctcagagacttcgcgaatatggctttgcgcactgcggcggggctgcgccgcaaccgagctcagccctgtggctcctcctcgctgccctgcgcggattggtggcagacggcaaccgggccgctgattgggcggcgaaggagccattcggggagactctggtgggttcggctgccccaagagtgataagttcggcttcagacacgccttagcgccagcagtgagtcggagctctatggaggtggcagcgggtaccgagtggcggctgcagcagcgactcctctgagctgagtttgaggccgtccccgactccttcctcccccttccctcccccttttttttgttttccgttcccctttcccctcccttccctatccccgacgaccggatcctgaggaggcagctgcggtggcagctgctgagttctcggtgaaggtgagttgagccgtgccgccgccgagtggagcgctctaaaatggccgccgtccc

SEQ ID NO: 451295 - DNA, 1048 bp, Homo sapiens
cacgcaaccctcatctcgacagcgctcggcgccccttacgccactggctcagcctcagagacttcgcgaatatggctttgcgcactgcggcggggctgcgccgcaaccgagctcagccctgtggctcctcctcgctgccctgcgcggattggtggcagacggcaaccgggccgctgattgggcggcgaaggagccattcggggagactctggtgggttcggctgccccaagagtgataagttcggcttcagacacgccttagcgccagcagtgagtcggagctctatggaggtggcagcgggtaccgagtggcggctgcagcagcgactcctctgagctgagtttgaggccgtccccgactccttcctcccccgttaattctaacttagtattagtgaagctcacttctgacttcttgcgcacgtaccattctacataatactcttgctagacagagtatgcttcgccgtgcatgcgtaattcagtggtgagttcctacggagtctgcacttacagattgtcacggtgattgctaggatgaacctagttactccttactactgtctttagtttaaagtccttgtcgtcttctaaggtaccaatttcacattccagagcccccgattgtgctttacgtccagctaatcgtctaagtagtctgcacggtggtcccctcttggcgttgtctctaaacactctttatctctctttgcttcatcgtccgatagcgtcttgcaacacgtgtaagtggacattctagagtggtttagcgcttcgtgggccacgaactgcactagctcgactgttgtgtggcttaggcagccgctctttggtgccaagtgccctacatcgtgagcaattcgtgcagatttttagagcgtggtagtactctcgtactagtatccgtgtcgttatgccacagcaagatccaggtacgccaaagcccttttctagtcttgcagccgttactatttacaacacaacggactgcacagaatccagtaagcagtggtcacacttgcgatgtacatcagttgttcaccgacac

SEQ ID NO: 451296 - DNA, 4057 bp, Homo sapiens
cacgcaaccctcatctcgacagcgctcggcgccccttacgccactggctcagcctcagagacttcgcgaatatggctttgcgcactgcggcggggctgcgccgcaaccgagctcagccctgtggctcctcctcgctgccctgcgcggattggtggcagacggcaaccgggccgctgattgggcggcgaaggagccattcggggagactctggtgggttcggctgccccaagagtgataagttcggcttcagacacgccttagcgccagcagtgagtcggagctctatggaggtggcagcgggtaccgagtggcggctgcagcagcgactcctctgagctgagtttgaggccgtccccgactccttcctcccccttccctcccccttttttttgttttccgttcccctttcccctcccttccctatccccgacgaccggatcctgaggaggcagctgcggtggcagctgctgagttctcggtgaaggtatttcatttctcctgtcccctcccctccccaccccatctattaatattattcttttgaagattcttcgttgtcaagccgccaaagtggagagtgcgattgcagaagggggtgcttctcgtttcagtgcttcttcgggcggaggaggaagtaggggtgcacctcagcactatcccaagactgctggcaacagcgagttcctggggaaaaccccagggcaaaacgctcagaaatggattcctgcacgaagcactagacgagatgacaactccgcagcaaacaactccgcaaacgaaaaagaacgacatgatgcaatcttcaggaaagtaagaggcatactaaataagcttactcctgaaaagtttgacaagctatgccttgagctcctcaatgtgggtgtagagtctaaactcatccttaaaggggtcatactgctgattgtggacaaagccctagaagagccaaagtatagctcactgtatgctcagctatgtctgcgattggcagaagatgcaccaaactttgatggcccagcagcagagggtcaaccaggacagaagcaaagcaccacattcagacgcctcctaatttccaaattacaagatgaatttgaaaaccgaactagaaatgttgatgtctatgataagcgtgaaaatcccctcctccccgaggaggaggaacagagagccattgctaagatcaagatgttgggaaacatcaaattcattggagagcttggcaagcttgatcttattcacgaatctatccttcataagtgcatcaaaacacttttggaaaagaagaagagagtccaactcaaagatatgggagaggatttggagtgcctctgtcagataatgaggacagtgggacctagattagaccatgaacgagccaagtccttaatggatcagtactttgcccgaatgtgctccttgatgttaagtaaggaattgccagcaaggattcgtttcctgctgcaggataccgtagagttgcgagaacaccattgggttcctcgcaaggcttttcttgacaatggaccaaagacgatcaatcaaattcgtcaagatgcagtaaaagatctaggggtgtttattcctgctcctatggctcaagggatgagaagtgacttctttctggagggaccgttcatgccacccaggatgaaaatggatagggacccacttggaggacttgctgatatgtttggacaaatgccaggtagcggaattggtactggtccaggagttatccaggatagattttcacccaccatgggacgtcatcgttcaaatcaactcttcaatggccatgggggacacatcatgcctcccacacaatcgcagtttggagagatgggaggcaagtttatgaaaagccaggggctaagccagctctaccataaccagagtcagggactcttatcccagctgcaaggacagtcgaaggatatgccacctcggttttctaagaaaggacagcttaatgcagatgagattagcctgaggcctgctcagtcgttcctaatgaataaaaatcaagtgccaaagcttcagccccagataactatgattcctcctagtgcacaaccaccacgcactcaaacaccacctctgggacagacacctcagcttggtctcaaaactaatccaccacttatccaggaaaagcctgccaagaccagcaaaaagccaccaccgtcaaaggaagaactccttaaactaactgaaactgttgtgactgaatatctaaatagtggaaatgcaaatgaggctgtcaatggtgtaagagaaatgagggctcctaaacactttcttcctgagatgttaagcaaagtaatcatcctgtcactagatagaagcgatgaagataaagaaaaagcaagttctttgatcagtttactcaaacaggaagggatagccacaagtgacaacttcatgcaggctttcctgaatgtattggaccagtgtcccaaactggaggttgacatccctttggtgaaatcctatttagcacagtttgcagctcgtgccatcatttcagagctggtgagcatttcagaactagctcaaccactagaaagtggcacccattttcctctcttcctactttgtcttcagcagttagctaaattacaagatcgagaatggttaacagaactttttcaacaaagcaaggtcaatatgcagaaaatgctcccagaaattgatcagaataaggaccgcatgttggagattttggaaggaaagggactgagtttcttattcccactcctcaaattggagaaggaactgttgaagcaaataaagttggatccatcccctcaaaccatatataaatggattaaagataacatctctcccaaacttcatgtagataaaggatttgtgaacatcttaatgactagcttcttacagtacatttctagtgaagtaaacccccccagcgatgaaacagattcatcctctgctccttccaaagaacagttagagcaggaaaaacaactactactatctttcaagccagtaatgcagaaatttcttcatgatcacgttgatctacaagtcagtgccctgtatgctctccaggtgcactgctataacagcaacttcccaaaaggcatgttacttcgcttttttgtgcacttctatgacatggaaattattgaagaagaagctttcttggcttggaaagaagatataacccaagagtttccgggaaaaggcaaggctttgttccaggtgaatcagtggctaacctggttagaaactgctgaagaagaagaatcagaggaagaagctgactaaagaaccagccaaagccttaaattgtgcaaaacatactgttgctatgatgtaactgcatttgacctaaccactgcgaaaattcattccgctgtaatgttttcacaatatttaaagcagaagcacgtcagttaggatttccttctgcataaggtttttttgtagtgtaatgtcttaatcatagtctaccatcaaatattttaggagtatctttaatgtttagatagtatattagcagcatgcaataattacatcataagttctcaagcagaggcagtctattgcaaggaccttctttgctgccagttatcataggctgttttaagttagaaaactgaatagcaacactgaatactgtagaaatgcactttgctcagtaatacttgagttgttgcaatatttgattatccatttggttgttacagaaaaattcttaactgtaattgatggttgttgccgtaatagtatattgcctgtatttctacctctagtaatgggctttatgtgctagattttaatatccttgagcctgggcaagtgcacaagtctttttaaaagaaacatggtttacttgcacaaaactgatcagttttgagagatcgttaatgcccttgaagtggtttttgtgggtgtgaaacaaatggtgagaatttgaattggtccctcctattatagtattgaaattaagtctacttaatttatcaagtcatgttcatgccctgattttatatacttgtatctatcaataaacattgtgatacttga

SEQ ID NO: 451297 - DNA, 510 bp, Homo sapiens
tggtacaaaatggcggccgcaggcggagccgggtggggcgacccttttttagcatttcctctgcgcttcagacacctggaaagtcttggcttttgttctctcttcctgttgctgacggagtagaaggaaaacgtcagtgttggccaggccgccgtgcggtcatggccggatggccgacgcctgcagggacgaggccgtggcggaccgaggcacggctgtgctcggacggcgagggagcgtggctcggaccgctagcgccgtggcgggaggcacgcgggccggcagggaaggccaggccgttggcgcgggaccagggaaccgcaggcgtcccggagcctggcctcccggcggggaggtgtgtaggacctggagtcggcaggggctgcccttcgtcggggaggaaagagagagtgatgatttctgccccttttgtcagcagaggaggccgtggcgaggcggttgtcagtcccggggggatttatggtgcaggagggggcccgcttggaggcg

SEQ ID NO: 451298 - DNA, 2830 bp, Homo sapiens
actacatacttccggactacatacttccgaaagacgatcaatcaaattcgtcaagatgcagtaaaagatctaggggtgtttattcctgctcctatggctcaagggatgagaagtgacttctttctggagggaccgttcatgccacccaggatgaaaatggatagggacccacttggaggacttgctgatatgtttggacaaatgccaggtagcggaattggtactggtccaggagttatccaggatagattttcacccaccatgggacgtcatcgttcaaatcaactcttcaatggccatgggggacacatcatgcctcccacacaatcgcagtttggagagatgggaggcaagtttatgaaaagccaggtaagtaatatttgagtgtgcatgttttctaaaccttatctgcaacatttatttcaaactgaaatgtttatccttaagattagtaaagtattagtaaaatcacatcactttatttgataggttagatttttattcttccctgtttcatcttttactttctctgggcaaattcagttaaactaactttatggcttggctcatccctttggtacttgattaccataatttgtggacccctttttatctagactttctttctccttttctgaaataggggctaagccagctctaccataaccagagtcagggactcttatcccagctgcaaggacagtcgaaggatatgccacctcggttttctaagaaaggacagcttaatgcagatgagattagcctgaggcctgctcagtcgttcctaatgaataaaaatcaagtgccaaagcttcagccccagataactatgattcctcctagtgcacaaccaccacgcactcaaacaccacctctgggacagacacctcagcttggtctcaaaactaatccaccacttatccaggaaaagcctgccaagaccagcaaaaagccaccaccgtcaaaggaagaactccttaaactaactgaaactgttgtgactgaatatctaaatagtggaaatgcaaatgaggctgtcaatggtgtaagagaaatgagggctcctaaacactttcttcctgagatgttaagcaaagtaatcatcctgtcactagatagaagcgatgaagataaagaaaaagcaagttctttgatcagtttactcaaacaggaagggatagccacaagtgacaacttcatgcaggctttcctgaatgtattggaccagtgtcccaaactggaggttgacatccctttggtgaaatcctatttagcacagtttgcagctcgtgccatcatttcagagctggtgagcatttcagaactagctcaaccactagaaagtggcacccattttcctctcttcctactttgtcttcagcagttagctaaattacaagatcgagaatggttaacagaactttttcaacaaagcaaggtcaatatgcagaaaatgctcccagaaattgatcagaataaggaccgcatgttggagattttggaaggaaagggactgagtttcttattcccactcctcaaattggagaaggaactgttgaagcaaataaagttggatccatcccctcaaaccatatataaatggattaaagataacatctctcccaaacttcatgtagataaaggatttgtgaacatcttaatgactagcttcttacagtacatttctagtgaagtaaacccccccagcgatgaaacagattcatcctctgctccttccaaagaacagttagagcaggaaaaacaactactactatctttcaagccagtaatgcagaaatttcttcatgatcacgttgatctacaagtcagtgccctgtatgctctccaggtgcactgctataacagcaacttcccaaaaggcatgttacttcgcttttttgtgcacttctatgacatggaaattattgaagaagaagctttcttggcttggaaagaagatataacccaagagtttccgggaaaaggcaaggctttgttccaggtgaatcagtggctaacctggttagaaactgctgaagaagaagaatcagaggaagaagctgactaaagaaccagccaaagccttaaattgtgcaaaacatactgttgctatgatgtaactgcatttgacctaaccactgcgaaaattcattccgctgtaatgttttcacaatatttaaagcagaagcacgtcagttaggatttccttctgcataaggtttttttgtagtgtaatgtcttaatcatagtctaccatcaaatattttaggagtatctttaatgtttagatagtatattagcagcatgcaataattacatcataagttctcaagcagaggcagtctattgcaaggaccttctttgctgccagttatcataggctgttttaagttagaaaactgaatagcaacactgaatactgtagaaatgcactttgctcagtaatacttgagttgttgcaatatttgattatccatttggttgttacagaaaaattcttaactgtaattgatggttgttgccgtaatagtatattgcctgtatttctacctctagtaatgggctttatgtgctagattttaatatccttgagcctgggcaagtgcacaagtctttttaaaagaaacatggtttacttgcacaaaactgatcagttttgagagatcgttaatgcccttgaagtggtttttgtgggtgtgaaacaaatggtgagaatttgaattggtccctcctattatagtattgaaattaagtctacttaatttatcaagtcatgttcatgccctgattttatatacttgtatctatcaataaacattgtgatacttga

SEQ ID NO: 451299 - DNA, 2639 bp, Homo sapiens
actacatacttccggactacatacttccgaaagacgatcaatcaaattcgtcaagatgcagtaaaagatctaggggtgtttattcctgctcctatggctcaagggatgagaagtgacttctttctggagggaccgttcatgccacccaggatgaaaatggatagggacccacttggaggacttgctgatatgtttggacaaatgccaggtagcggaattggtactggtccaggagttatccaggatagattttcacccaccatgggacgtcatcgttcaaatcaactcttcaatggccatgggggacacatcatgcctcccacacaatcgcagtttggagagatgggaggcaagtttatgaaaagccaggggctaagccagctctaccataaccagagtcagggactcttatcccagctgcaaggacagtcgaaggatatgccacctcggttttctaagaaaggacagcttaatgcagatgagattagcctgaggcctgctcagtcgttcctaatgaataaaaatcaagtgccaaagcttcagccccagataactatgattcctcctagtgcacaaccaccacgcactcaaacaccacctctgggacagacacctcagcttggtctcaaaactaatccaccacttatccaggaaaagcctgccaagaccagcaaaaagccaccaccgtcaaaggaagaactccttaaactaactgtaagtttcaaatatcccattttagtgtaattagcctgtatttgagatagagaatacattaaagatacttgtgttcttcacaggaaactgttgtgactgaatatctaaatagtggaaatgcaaatgaggctgtcaatggtgtaagagaaatgagggctcctaaacactttcttcctgagatgttaagcaaagtaatcatcctgtcactagatagaagcgatgaagataaagaaaaagcaagttctttgatcagtttactcaaacaggaagggatagccacaagtgacaacttcatgcaggctttcctgaatgtattggaccagtgtcccaaactggaggttgacatccctttggtgaaatcctatttagcacagtttgcagctcgtgccatcatttcagagctggtgagcatttcagaactagctcaaccactagaaagtggcacccattttcctctcttcctactttgtcttcagcagttagctaaattacaagatcgagaatggttaacagaactttttcaacaaagcaaggtcaatatgcagaaaatgctcccagaaattgatcagaataaggaccgcatgttggagattttggaaggaaagggactgagtttcttattcccactcctcaaattggagaaggaactgttgaagcaaataaagttggatccatcccctcaaaccatatataaatggattaaagataacatctctcccaaacttcatgtagataaaggatttgtgaacatcttaatgactagcttcttacagtacatttctagtgaagtaaacccccccagcgatgaaacagattcatcctctgctccttccaaagaacagttagagcaggaaaaacaactactactatctttcaagccagtaatgcagaaatttcttcatgatcacgttgatctacaagtcagtgccctgtatgctctccaggtgcactgctataacagcaacttcccaaaaggcatgttacttcgcttttttgtgcacttctatgacatggaaattattgaagaagaagctttcttggcttggaaagaagatataacccaagagtttccgggaaaaggcaaggctttgttccaggtgaatcagtggctaacctggttagaaactgctgaagaagaagaatcagaggaagaagctgactaaagaaccagccaaagccttaaattgtgcaaaacatactgttgctatgatgtaactgcatttgacctaaccactgcgaaaattcattccgctgtaatgttttcacaatatttaaagcagaagcacgtcagttaggatttccttctgcataaggtttttttgtagtgtaatgtcttaatcatagtctaccatcaaatattttaggagtatctttaatgtttagatagtatattagcagcatgcaataattacatcataagttctcaagcagaggcagtctattgcaaggaccttctttgctgccagttatcataggctgttttaagttagaaaactgaatagcaacactgaatactgtagaaatgcactttgctcagtaatacttgagttgttgcaatatttgattatccatttggttgttacagaaaaattcttaactgtaattgatggttgttgccgtaatagtatattgcctgtatttctacctctagtaatgggctttatgtgctagattttaatatccttgagcctgggcaagtgcacaagtctttttaaaagaaacatggtttacttgcacaaaactgatcagttttgagagatcgttaatgcccttgaagtggtttttgtgggtgtgaaacaaatggtgagaatttgaattggtccctcctattatagtattgaaattaagtctacttaatttatcaagtcatgttcatgccctgattttatatacttgtatctatcaataaacattgtgatacttga

SEQ ID NO: 451300 - DNA, 2889 bp, Homo sapiens
actacatacttccggactacatacttccgaaagacgatcaatcaaattcgtcaagatgcagtaaaagatctaggggtgtttattcctgctcctatggctcaagggatgagaagtgacttctttctggagggaccgttcatgccacccaggatgaaaatggatagggacccacttggaggacttgctgatatgtttggacaaatgccaggtagcggaattggtactggtccaggagttatccaggatagattttcacccaccatgggacgtcatcgttcaaatcaactcttcaatggccatgggggacacatcatgcctcccacacaatcgcagtttggagagatgggaggcaagtttatgaaaagccaggggctaagccagctctaccataaccagagtcagggactcttatcccagctgcaaggacagtcgaaggatatgccacctcggttttctaagaaaggacagcttaatgcagatgagattagcctgaggcctgctcagtcgttcctaatgaataaaaatcaagtgccaaagcttcagccccagataactatgattcctcctagtgcacaaccaccacgcactcaaacaccacctctgggacagacacctcagcttggtctcaaaactaatccaccacttatccaggaaaagcctgccaagaccagcaaaaagccaccaccgtcaaaggaagaactccttaaactaactgaaactgttgtgactgaatatctaaatagtggaaatgcaaatgaggctgtcaatggtgtaagagaaatgagggctcctaaacactttcttcctgagatgttaagcaaagtaatcatcctgtcactagatagaagcgatgaagataaagaaaaagcaagttctttgatcagtttactcaaacaggaagggatagccacaagtgacaacttcatgcaggctttcctgaatgtattggaccagtgtcccaaactggaggttgacatccctttggtgaaatcctatttagcacagtttgcagctcgtgccatcatttcagagctggtgagcatttcagaactagctcaaccactagaaagtggcacccattttcctctcttcctactttgtcttcagcagttagctaaattacaagatcgagaatggttaacagaactttttcaacaaagcaaggtcaatatgcagaaaatgctcccaggtaagagaatgctgacttgtttgttttgtttttttaatattatatctagagatttcaggtaccttgagtggatttatgtaggtcagacagtctgattgtcctgctcagataatgataaacattaccacagatctcacctataaagagagatttataatttaactactttcatttgatccgtatgttgagtttttttcatttgctgggttggttctctattctgctacatggatcttacatacttggggacatcatttgtgaagctctgctctctggacaggacaacttggtaaaatgaactattagatgatgcaggtggctttgtctcttcagaaattgatcagaataaggaccgcatgttggagattttggaaggaaagggactgagtttcttattcccactcctcaaattggagaaggaactgttgaagcaaataaagttggatccatcccctcaaaccatatataaatggattaaagataacatctctcccaaacttcatgtagataaaggatttgtgaacatcttaatgactagcttcttacagtacatttctagtgaagtaaacccccccagcgatgaaacagattcatcctctgctccttccaaagaacagttagagcaggaaaaacaactactactatctttcaagccagtaatgcagaaatttcttcatgatcacgttgatctacaagtcagtgccctgtatgctctccaggtgcactgctataacagcaacttcccaaaaggcatgttacttcgcttttttgtgcacttctatgacatggaaattattgaagaagaagctttcttggcttggaaagaagatataacccaagagtttccgggaaaaggcaaggctttgttccaggtgaatcagtggctaacctggttagaaactgctgaagaagaagaatcagaggaagaagctgactaaagaaccagccaaagccttaaattgtgcaaaacatactgttgctatgatgtaactgcatttgacctaaccactgcgaaaattcattccgctgtaatgttttcacaatatttaaagcagaagcacgtcagttaggatttccttctgcataaggtttttttgtagtgtaatgtcttaatcatagtctaccatcaaatattttaggagtatctttaatgtttagatagtatattagcagcatgcaataattacatcataagttctcaagcagaggcagtctattgcaaggaccttctttgctgccagttatcataggctgttttaagttagaaaactgaatagcaacactgaatactgtagaaatgcactttgctcagtaatacttgagttgttgcaatatttgattatccatttggttgttacagaaaaattcttaactgtaattgatggttgttgccgtaatagtatattgcctgtatttctacctctagtaatgggctttatgtgctagattttaatatccttgagcctgggcaagtgcacaagtctttttaaaagaaacatggtttacttgcacaaaactgatcagttttgagagatcgttaatgcccttgaagtggtttttgtgggtgtgaaacaaatggtgagaatttgaattggtccctcctattatagtattgaaattaagtctacttaatttatcaagtcatgttcatgccctgattttatatacttgtatctatcaataaacattgtgatacttga

SEQ ID NO: 451301 - DNA, 2492 bp, Homo sapiens
actacatacttccggactacatacttccgaaagacgatcaatcaaattcgtcaagatgcagtaaaagatctaggggtgtttattcctgctcctatggctcaagggatgagaagtgacttctttctggagggaccgttcatgccacccaggatgaaaatggatagggacccacttggaggacttgctgatatgtttggacaaatgccaggtagcggaattggtactggtccaggagttatccaggatagattttcacccaccatgggacgtcatcgttcaaatcaactcttcaatggccatgggggacacatcatgcctcccacacaatcgcagtttggagagatgggaggcaagtttatgaaaagccaggggctaagccagctctaccataaccagagtcagggactcttatcccagctgcaaggacagtcgaaggatatgccacctcggttttctaagaaaggacagcttaatgcagatgagattagcctgaggcctgctcagtcgttcctaatgaataaaaatcaagtgccaaagcttcagccccagataactatgattcctcctagtgcacaaccaccacgcactcaaacaccacctctgggacagacacctcagcttggtctcaaaactaatccaccacttatccaggaaaagcctgccaagaccagcaaaaagccaccaccgtcaaaggaagaactccttaaactaactgaaactgttgtgactgaatatctaaatagtggaaatgcaaatgaggctgtcaatggtgtaagagaaatgagggctcctaaacactttcttcctgagatgttaagcaaagtaatcatcctgtcactagatagaagcgatgaagataaagaaaagctttcctgaatgtattggaccagtgtcccaaactggaggttgacatccctttggtgaaatcctatttagcacagtttgcagctcgtgccatcatttcagagctggtgagcatttcagaactagctcaaccactagaaagtggcacccattttcctctcttcctactttgtcttcagcagttagctaaattacaagatcgagaatggttaacagaactttttcaacaaagcaaggtcaatatgcagaaaatgctcccagaaattgatcagaataaggaccgcatgttggagattttggaaggaaagggactgagtttcttattcccactcctcaaattggagaaggaactgttgaagcaaataaagttggatccatcccctcaaaccatatataaatggattaaagataacatctctcccaaacttcatgtagataaaggatttgtgaacatcttaatgactagcttcttacagtacatttctagtgaagtaaacccccccagcgatgaaacagattcatcctctgctccttccaaagaacagttagagcaggaaaaacaactactactatctttcaagccagtaatgcagaaatttcttcatgatcacgttgatctacaagtcagtgccctgtatgctctccaggtgcactgctataacagcaacttcccaaaaggcatgttacttcgcttttttgtgcacttctatgacatggaaattattgaagaagaagctttcttggcttggaaagaagatataacccaagagtttccgggaaaaggcaaggctttgttccaggtgaatcagtggctaacctggttagaaactgctgaagaagaagaatcagaggaagaagctgactaaagaaccagccaaagccttaaattgtgcaaaacatactgttgctatgatgtaactgcatttgacctaaccactgcgaaaattcattccgctgtaatgttttcacaatatttaaagcagaagcacgtcagttaggatttccttctgcataaggtttttttgtagtgtaatgtcttaatcatagtctaccatcaaatattttaggagtatctttaatgtttagatagtatattagcagcatgcaataattacatcataagttctcaagcagaggcagtctattgcaaggaccttctttgctgccagttatcataggctgttttaagttagaaaactgaatagcaacactgaatactgtagaaatgcactttgctcagtaatacttgagttgttgcaatatttgattatccatttggttgttacagaaaaattcttaactgtaattgatggttgttgccgtaatagtatattgcctgtatttctacctctagtaatgggctttatgtgctagattttaatatccttgagcctgggcaagtgcacaagtctttttaaaagaaacatggtttacttgcacaaaactgatcagttttgagagatcgttaatgcccttgaagtggtttttgtgggtgtgaaacaaatggtgagaatttgaattggtccctcctattatagtattgaaattaagtctacttaatttatcaagtcatgttcatgccctgattttatatacttgtatctatcaataaacattgtgatacttga

SEQ ID NO: 451302 - DNA, 2612 bp, Homo sapiens
actacatacttccggactacatacttccgaaagacgatcaatcaaattcgtcaagatgcagtaaaagatctaggggtgtttattcctgctcctatggctcaagggatgagaagtgacttctttctggagggaccgttcatgccacccaggatgaaaatggatagggacccacttggaggacttgctgatatgtttggacaaatgccaggtagcggaattggtactggtccaggagttatccaggatagattttcacccaccatgggacgtcatcgttcaaatcaactcttcaatggccatgggggacacatcatgcctcccacacaatcgcagtttggagagatgggaggcaagtttatgaaaagccaggggctaagccagctctaccataaccagagtcagggactcttatcccagctgcaaggacagtcgaaggatatgccacctcggttttctaagaaaggacagcttaatgcagatgagattagcctgaggcctgctcagtcgttcctaatgaataaaaatcaagtgccaaagcttcagccccagataactatgattcctcctagtgcacaaccaccacgcactcaaacaccacctctgggacagacacctcagcttggtctcaaaactaatccaccacttatccaggaaaagcctgccaagaccagcaaaaagccaccaccgtcaaaggaagaactccttaaactaactgaaactgttgtgactgaatatctaaatagtggaaatgcaaatgaggctgtcaatggtgtaagagaaatgagggctcctaaacactttcttcctgagatgttaagcaaagtaatcatcctgtcactagatagaagcgatgaagataaagaaaaagcaagttctttgatcagtttactcaaacaggaagggatagccacaagtgacaacttcatgcaggctttcctgaatgtattggaccagtgtcccaaactggaggttgacatccctttggtgaaatcctatttagcacagtttgcagctcgtgccatcatttcagagctggtgagcatttcagaactagctcaaccactagaaagtggcacccattttcctctcttcctactttgtcttcagcagttagctaaattacaagatcgagaatggttaacagaactttttcaacaaagcaaggtcaatatgcagaaaatgctcccagaaattgatcagaataaggaccgcatgttggagattttggaaggaaagggactgagtttcttattcccactcctcaaattggagaaggaactgttgaagcaaataaagttggatccatcccctcaaaccatatataaatggattaaagataacatctctcccaaacttcatgtagataaaggatttgtgaacatcttaatgactagcttcttacagtacatttctagtgaagtaaacccccccagcgatgaaacagattcatcctctgctctaactgttctttggaaggagcagaggatgaatctgtttcatcgctgggggggtttacttccaaagaacagttagagcaggaaaaacaactactactatctttcaagccagtaatgcagaaatttcttcatgatcacgttgatctacaagtcagtgccctgtatgctctccaggtgcactgctataacagcaacttcccaaaaggcatgttacttcgcttttttgtgcacttctatgacatggaaattattgaagaagaagctttcttggcttggaaagaagatataacccaagagtttccgggaaaaggcaaggctttgttccaggtgaatcagtggctaacctggttagaaactgctgaagaagaagaatcagaggaagaagctgactaaagaaccagccaaagccttaaattgtgcaaaacatactgttgctatgatgtaactgcatttgacctaaccactgcgaaaattcattccgctgtaatgttttcacaatatttaaagcagaagcacgtcagttaggatttccttctgcataaggtttttttgtagtgtaatgtcttaatcatagtctaccatcaaatattttaggagtatctttaatgtttagatagtatattagcagcatgcaataattacatcataagttctcaagcagaggcagtctattgcaaggaccttctttgctgccagttatcataggctgttttaagttagaaaactgaatagcaacactgaatactgtagaaatgcactttgctcagtaatacttgagttgttgcaatatttgattatccatttggttgttacagaaaaattcttaactgtaattgatggttgttgccgtaatagtatattgcctgtatttctacctctagtaatgggctttatgtgctagattttaatatccttgagcctgggcaagtgcacaagtctttttaaaagaaacatggtttacttgcacaaaactgatcagttttgagagatcgttaatgcccttgaagtggtttttgtgggtgtgaaacaaatggtgagaatttgaattggtccctcctattatagtattgaaattaagtctacttaatttatcaagtcatgttcatgccctgattttatatacttgtatctatcaataaacattgtgatacttga

SEQ ID NO: 451303 - DNA, 2408 bp, Homo sapiens
actacatacttccggactacatacttccgaaagacgatcaatcaaattcgtcaagatgcagtaaaagatctaggggtgtttattcctgctcctatggctcaagggatgagaagtgacttctttctggagggaccgttcatgccacccaggatgaaaatggatagggacccacttggaggacttgctgatatgtttggacaaatgccaggtagcggaattggtactggtccaggagttatccaggatagattttcacccaccatgggacgtcatcgttcaaatcaactcttcaatggccatgggggacacatcatgcctcccacacaatcgcagtttggagagatgggaggcaagtttatgaaaagccaggggctaagccagctctaccataaccagagtcagggactcttatcccagctgcaaggacagtcgaaggatatgccacctcggttttctaagaaaggacagcttaatgcagatgagattagcctgaggcctgctcagtcgttcctaatgaataaaaatcaagtgccaaagcttcagccccagataactatgattcctcctagtgcacaaccaccacgcactcaaacaccacctctgggacagacacctcagcttggtctcaaaactaatccaccacttatccaggaaaagcctgccaagaccagcaaaaagccaccaccgtcaaaggaagaactccttaaactaactgaaactgttgtgactgaatatctaaatagtggaaatgcaaatgaggctgtcaatggtgtaagagaaatgagggctcctaaacactttcttcctgagatgttaagcaaagtaatcatcctgtcactagatagaagcgatgaagataaagaaaaagcaagttctttgatcagtttactcaaacaggaagggatagccacaagtgacaacttcatgcaggctttcctgaatgtattggaccagtgtcccaaactggaggttgacatccctttggtgaaatcctatttagcacagtttgcagctcgtgccatcatttcagagctggtgagcatttcagaactagctcaaccactagaaagtggcacccattttcctctcttcctactttgtcttcagcagttagctaaattacaagatcgagaatggttaacagaactttttcaacaaagcaaggtcaatatgcagaaaatgctcccagtaacatctctcccaaacttcatgtagataaaggatttgtgaacatcttaatgactagcttcttacagtacatttctagtgaagtaaacccccccagcgatgaaacagattcatcctctgctccttccaaagaacagttagagcaggaaaaacaactactactatctttcaagccagtaatgcagaaatttcttcatgatcacgttgatctacaagtcagtgccctgtatgctctccaggtgcactgctataacagcaacttcccaaaaggcatgttacttcgcttttttgtgcacttctatgacatggaaattattgaagaagaagctttcttggcttggaaagaagatataacccaagagtttccgggaaaaggcaaggctttgttccaggtgaatcagtggctaacctggttagaaactgctgaagaagaagaatcagaggaagaagctgactaaagaaccagccaaagccttaaattgtgcaaaacatactgttgctatgatgtaactgcatttgacctaaccactgcgaaaattcattccgctgtaatgttttcacaatatttaaagcagaagcacgtcagttaggatttccttctgcataaggtttttttgtagtgtaatgtcttaatcatagtctaccatcaaatattttaggagtatctttaatgtttagatagtatattagcagcatgcaataattacatcataagttctcaagcagaggcagtctattgcaaggaccttctttgctgccagttatcataggctgttttaagttagaaaactgaatagcaacactgaatactgtagaaatgcactttgctcagtaatacttgagttgttgcaatatttgattatccatttggttgttacagaaaaattcttaactgtaattgatggttgttgccgtaatagtatattgcctgtatttctacctctagtaatgggctttatgtgctagattttaatatccttgagcctgggcaagtgcacaagtctttttaaaagaaacatggtttacttgcacaaaactgatcagttttgagagatcgttaatgcccttgaagtggtttttgtgggtgtgaaacaaatggtgagaatttgaattggtccctcctattatagtattgaaattaagtctacttaatttatcaagtcatgttcatgccctgattttatatacttgtatctatcaataaacattgtgatacttga

SEQ ID NO: 451304 - DNA, 2962 bp, Homo sapiens
actacatacttccggactacatacttccgaaagacgatcaatcaaattcgtcaagatgcagtaaaagatctaggggtgtttattcctgctcctatggctcaagggatgagaagtgacttctttctggagggaccgttcatgccacccaggatgaaaatggatagggacccacttggaggacttgctgatatgtttggacaaatgccaggtagcggaattggtactggtccaggagttatccaggatagattttcacccaccatgggacgtcatcgttcaaatcaactcttcaatggccatgggggacacatcatgcctcccacacaatcgcagtttggagagatgggaggcaagtttatgaaaagccaggggctaagccagctctaccataaccagagtcagggactcttatcccagctgcaaggacagtcgaaggatatgccacctcggttttctaagaaaggacagcttaatgcagatgagattagcctgaggcctgctcagtcgttcctaatgaataaaaatcaagtgccaaagcttcagccccagataactatgattcctcctagtgcacaaccaccacgcactcaaacaccacctctgggacagacacctcagcttggtctcaaaactaatccaccacttatccaggaaaagcctgccaagaccagcaaaaagccaccaccgtcaaaggaagaactccttaaactaactgaaactgttgtgactgaatatctaaatagtggaaatgcaaatgaggctgtcaatggtgtaagagaaatgagggctcctaaacactttcttcctgagatgttaagcaaagtaatcatcctgtcactagatagaagcgatgaagataaagaaaaagcaagttctttgatcagtttactcaaacaggaagggatagccacaagtgacaacttcatgcaggctttcctgaatgtattggaccagtgtcccaaactggaggttgacatccctttggtgaaatcctatttagcacagtttgcagctcgtgccatcatttcagagctggtgagcatttcagaactagctcaaccactagaaagtggcacccattttcctctcttcctactttgtcttcagcagttagctaaattacaagatcgagaatggttaacagaactttttcaacaaagcaaggtcaatatgcagaaaatgctcccagaaattgatcagaataaggaccgcatgttggagattttggaaggaaagggactgagtttcttattcccactcctcaaattggagaaggaactgttgaagcaaataaagttggatccatcccctcaaaccatatataaatggattaaagataacatctctcccaaacttcatgtagataaaggatttgtgaacatcttaatgactagcttcttacagtacatttctagtgaagtaaacccccccagcgatgaaacagattcatcctctgctccttccaaagaacagttagagcaggaaaaacaactactactatctttcaagccagtaatgcagaaatttcttcatgatcacgttgatctacaagtcagtgccctgtatgctctccaggtgcactgctataacagcaacttcccaaaaggcatgttacttcgcttttttgtgcacttctatgacatggaaattattgaagaagaagctttcttggcttggaaagaagatataacccaagagtttccgggaaaaggcaaggctttgttccaggtgaatcagtggctaacctggttagaaactgctgaagaagaagaatcagaggaagaagctgactaaagaaccagccaaagccttaaattgtgcaaaacatactgttgctatgatgtaactgcatttgacctaaccactgcgaaaattcattccgctgtaatgttttcacaatatttaaagcagaagcacgtcagttaggatttccttctgcataaggtttttttgtagtgtaatgtcttaatcatagtctaccatcaaatattttaggagtatctttaatgtttagatagtatattagcagcatgcaataattacatcataagttctcaagcagaggcagtctattgcaaggaccttctttgctgccagttatcataggctgttttaagttagaaaactgaatagcaacactgaatactgtagaaatgcactttgctcagtaatacttgagttgttgcaatatttgattatccatttggttgttacagaaaaattcttaactgtaattgatggttgttgccgtaatagtatattgcctgtatttctacctctagtaatgggctttatgtgctagattttaatatccttgagcctgggcaagtgcacaagtctttttaaaagaaacatggtttacttgcacaaaactgatcagttttgagagatcgttaatgcccttgaagtggtttttgtgggtgtgaaacaaatggtgagaatttgaattggtccctcctattatagtattgaaattaagtctacttaatttatcaagtcatgttcatgccctgattttatatacttgtatctatcaataaacattgtgatacttgaaaaaaaaaaaaaaaaaaaaaaaaaaaaaacaaaaaaaaaaaaaaaaaaaaaaaaaaaaaaaaaaaaaaaaaaaaaaaaaaaaaaaaaaaaaaaaaaaaaaaaaaaaaaaaaaaaaaaaaaaaaaaaaaaaataaagggccggtgttttaaaaccttgggaatgggaaaaccctggggtttcccaatttaaaccccttggaaaaaaatccccttttcccaggtggggtaaaatccaaaaggccctcccccttcgccctttcaaaaaatgtcgccacccttaatgggcaatgggaaattggaacgcgataatttttgggaaaatccgcgttaaaattttgggaaaaaccccttttttttttaacccaaaggcccaaaatcggcatcccctttttatttgtggcccgcg

SEQ ID NO: 451305 - DNA, 2581 bp, Homo sapiens
  misc_feature (2574)..(2574): n is a, c, g, or t
actacatacttccggactacatacttccgaaagacgatcaatcaaattcgtcaagatgcagtaaaagatctaggggtgtttattcctgctcctatggctcaagggatgagaagtgacttctttctggagggaccgttcatgccacccaggatgaaaatggatagggacccacttggaggacttgctgatatgtttggacaaatgccaggtagcggaattggtactggtccaggagttatccaggatagattttcacccaccatgggacgtcatcgttcaaatcaactcttcaatggccatgggggacacatcatgcctcccacacaatcgcagtttggagagatgggaggcaagtttatgaaaagccaggggctaagccagctctaccataaccagagtcagggactcttatcccagctgcaaggacagtcgaaggatatgccacctcggttttctaagaaaggacagcttaatgcagatgagattagcctgaggcctgctcagtcgttcctaatgaataaaaatcaagtgccaaagcttcagccccagataactatgattcctcctagtgcacaaccaccacgcactcaaacaccacctctgggacagacacctcagcttggtctcaaaactaatccaccacttatccaggaaaagcctgccaagaccagcaaaaagccaccaccgtcaaaggaagaactccttaaactaactgaaactgttgtgactgaatatctaaatagtggaaatgcaaatgaggctgtcaatggtgtaagagaaatgagggctcctaaacactttcttcctgagatgttaagcaaagtaatcatcctgtcactagatagaagcgatgaagataaagaaaaagcaagttctttgatcagtttactcaaacaggaagggatagccacaagtgacaacttcatgcaggctttcctgaatgtattggaccagtgtcccaaactggaggttgacatccctttggtgaaatcctatttagcacagtttgcagctcgtgccatcatttcagagctggtgagcatttcagaactagctcaaccactagaaagtggcacccattttcctctcttcctactttgtcttcagcagttagctaaattacaagatcgagaatggttaacagaactttttcaacaaagcaaggtcaatatgcagaaaatgctcccagaaattgatcagaataaggaccgcatgttggagattttggaaggaaagggactgagtttcttattcccactcctcaaattggagaaggaactgttgaagcaaataaagttggatccatcccctcaaaccatatataaatggattaaagataacatctctcccaaacttcatgtagataaaggatttgtgaacatcttaatgactagcttcttacagtacatttctagtgaagtaaacccccccagcgatgaaacagattcatcctctgctccttccaaagaacagttagagcaggaaaaacaactactactatctttcaagccagtaatgcagaaatttcttcatgatcacgttgatctacaagtcagtgccctgtatgctctccaggtgcactgctataacagcaacttcccaaaaggcatgttacttcgcttttttgtgcacttctatgacatggaaattattgaagaagaagctttcttggcttggaaagaagatataacccaagagtttccgggaaaaggcaaggctttgttccaggtgaatcagtggctaacctggttagaaactgctgaagaagaagaatcagaggaagaagctgactaaagaaccagccaaagccttaaattgtgcaaaacatactgttgctatgatgtaactgcatttgacctaaccactgcgaaaattcattccgctgtaatgttttcacaatatttaaagcagaagcacgtcagttaggatttccttctgcataaggtttttttgtagtgtaatgtcttaatcatagtctaccatcaaatattttaggagtatctttaatgtttagatagtatattagcagcatgcaataattacatcataagttctcaagcagaggcagtctattgcaaggaccttctttgctgccagttatcataggctgttttaagttagaaaactgaatagcaacactgaatactgtagaaatgcactttgctcagtaatacttgagttgttgcaatatttgattatccatttggttgttacagaaaaattcttaactgtaattgatggttgttgccgtaatagtatattgcctgtatttctacctctagtaatgggctttatgtgctagattttaatatccttgagcctgggcaagtgcacaagtctttttaaaagaaacatggtttacttgcacaaaactgatcagttttgagagatcgttaatgcccttgaagtggtttttgtgggtgtgaaacaaatggtgagaatttgaattggtccctcctattatagtattgaaattaagtctacttaatttatcaagtcatgttcatgccctgattttatatacttgtatctatcaataaacattgtgatacttgaaaaaaaaaaaacaaaaanaaaaaaa

SEQ ID NO: 451306 - DNA, 2534 bp, Homo sapiens
actacatacttccggactacatacttccgaaagacgatcaatcaaattcgtcaagatgcagtaaaagatctaggggtgtttattcctgctcctatggctcaagggatgagaagtgacttctttctggagggaccgttcatgccacccaggatgaaaatggatagggacccacttggaggacttgctgatatgtttggacaaatgccaggtagcggaattggtactggtccaggagttatccaggatagattttcacccaccatgggacgtcatcgttcaaatcaactcttcaatggccatgggggacacatcatgcctcccacacaatcgcagtttggagagatgggaggcaagtttatgaaaagccaggggctaagccagctctaccataaccagagtcagggactcttatcccagctgcaaggacagtcgaaggatatgccacctcggttttctaagaaaggacagcttaatgcagatgagattagcctgaggcctgctcagtcgttcctaatgaataaaaatcaagtgccaaagcttcagccccagataactatgattcctcctagtgcacaaccaccacgcactcaaacaccacctctgggacagacacctcagcttggtctcaaaactaatccaccacttatccaggaaaagcctgccaagaccagcaaaaagccaccaccgtcaaaggaagaactccttaaactaactgaaactgttgtgactgaatatctaaatagtggaaatgcaaatgaggctgtcaatggtgtaagagaaatgagggctcctaaacactttcttcctgagatgttaagcaaagtaatcatcctgtcactagatagaagcgatgaagataaagaaaaagcaagttctttgatcagtttactcaaacaggaagggatagccacaagtgacaacttcatgcaggctttcctgaatgtattggaccagtgtcccaaactggaggttgacatccctttggtgaaatcctatttagcacagtttgcagctcgtgccatcatttcagagctggtgagcatttcagaactagctcaaccactagaaagtggcacccattttcctctcttcctactttgtcttcagcagttagctaaattacaagatcgagaatggttaacagaactttttcaacaaagcaaggtcaatatgcagaaaatgctcccagaaattgatcagaataaggaccgcatgttggagattttggaaggaaagggactgagtttcttattcccactcctcaaattggagaaggaactgttgaagcaaataaagttggatccatcccctcaaaccatatataaatggattaaagataacatctctcccaaacttcatgtagataaaggatttgtgaacatcttaatgactagcttcttacagtacatttctagtgaagtaaacccccccagcgatgaaacagattcatcctctgctccttccaaagaacagttagagcaggaaaaacaactactactatctttcaagccagtaatgcagaaatttcttcatgatcacgttgatctacaagtcagtgccctgtatgctctccaggtgcactgctataacagcaacttcccaaaaggcatgttacttcgcttttttgtgcacttctatgacatggaaattattgaagaagaagctttcttggcttggaaagaagatataacccaagagtttccgggaaaaggcaaggctttgttccaggtgaatcagtggctaacctggttagaaactgctgaagaagaagaatcagaggaagaagctgactaaagaaccagccaaagccttaaattgtgcaaaacatactgttgctatgatgtaactgcatttgacctaaccactgcgaaaattcattccgctgtaatgttttcacaatatttaaagcagaagcacgtcagttaggatttccttctgcataaggtttttttgtagtgtaatgtcttaatcatagtctaccatcaaatattttaggagtatctttaatgtttagatagtatattagcagcatgcaataattacatcataagttctcaagcagaggcagtctattgcaaggaccttctttgctgccagttatcataggctgttttaagttagaaaactgaatagcaacactgaatactgtagaaatgcactttgctcagtaatacttgagttgttgcaatatttgattatccatttggttgttacagaaaaattcttaactgtaattgatggttgttgccgtaatagtatattgcctgtatttctacctctagtaatgggctttatgtgctagattttaatatccttgagcctgggcaagtgcacaagtctttttaaaagaaacatggtttacttgcacaaaactgatcagttttgagagatcgttaatgcccttgaagtggtttttgtgggtgtgaaacaaatggtgagaatttgaattggtccctcctattatagtattgaaattaaggtcctaattttaaggatgtcaggctcgatttactcgatcattaatccatgggccg

SEQ ID NO: 451307 - DNA, 2452 bp, Homo sapiens
actacatacttccggactacatacttccgaaagacgatcaatcaaattcgtcaagatgcagtaaaagatctaggggtgtttattcctgctcctatggctcaagggatgagaagtgacttctttctggagggaccgttcatgccacccaggatgaaaatggatagggacccacttggaggacttgctgatatgtttggacaaatgccaggtagcggaattggtactggtccaggagttatccaggatagattttcacccaccatgggacgtcatcgttcaaatcaactcttcaatggccatgggggacacatcatgcctcccacacaatcgcagtttggagagatgggaggcaagtttatgaaaagccaggggctaagccagctctaccataaccagagtcagggactcttatcccagctgcaaggacagtcgaaggatatgccacctcggttttctaagaaaggacagcttaatgcagatgagattagcctgaggcctgctcagtcgttcctaatgaataaaaatcaagtgccaaagcttcagccccagataactatgattcctcctagtgcacaaccaccacgcactcaaacaccacctctgggacagacacctcagcttggtctcaaaactaatccaccacttatccaggaaaagcctgccaagaccagcaaaaagccaccaccgtcaaaggaagaactccttaaactaactgaaactgttgtgactgaatatctaaatagtggaaatgcaaatgaggctgtcaatggtgtaagagaaatgagggctcctaaacactttcttcctgagatgttaagcaaagtaatcatcctgtcactagatagaagcgatgaagataaagaaaaagcaagttctttgatcagtttactcaaacaggaagggatagccacaagtgacaacttcatgcaggctttcctgaatgtattggaccagtgtcccaaactggaggttgacatccctttggtgaaatcctatttagcacagtttgcagctcgtgccatcatttcagagctggtgagcatttcagaactagctcaaccactagaaagtggcacccattttcctctcttcctactttgtcttcagcagttagctaaattacaagatcgagaatggttaacagaactttttcaacaaagcaaggtcaatatgcagaaaatgctcccagaaattgatcagaataaggaccgcatgttggagattttggaaggaaagggactgagtttcttattcccactcctcaaattggagaaggaactgttgaagcaaataaagttggatccatcccctcaaaccatatataaatggattaaagataacatctctcccaaacttcatgtagataaaggatttgtgaacatcttaatgactagcttcttacagtacatttctagtgaagtaaacccccccagcgatgaaacagattcatcctctgctccttccaaagaacagttagagcaggaaaaacaactactactatctttcaagccagtaatgcagaaatttcttcatgatcacgttgatctacaagtcagtgccctgtatgctctccaggtgcactgctataacagcaacttcccaaaaggcatgttacttcgcttttttgtgcacttctatgacatggaaattattgaagaagaagctttcttggcttggaaagaagatataacccaagagtttccgggaaaaggcaaggctttgttccaggtgaatcagtggctaacctggttagaaactgctgaagaagaagaatcagaggaagaagctgactaaagaaccagccaaagccttaaattgtgcaaaacatactgttgctatgatgtaactgcatttgacctaaccactgcgaaaattcattccgctgtaatgttttcacaatatttaaagcagaagcacgtcagttaggatttccttctgcataaggtttttttgtagtgtaatgtcttaatcatagtctaccatcaaatattttaggagtatctttaatgtttagatagtatattagcagcatgcaataattacatcataagttctcaagcagaggcagtctattgcaaggaccttctttgctgccagttatcataggctgttttaagttagaaaactgaatagcaacactgaatactgtagaaatgcactttgctcagtaatacttgagttgttgcaatatttgattatccatttggttgttacagaaaaattcttaactgtaattgatggttgttgccgtaatagtatattgcctgtatttctacctctagtaatgggctttatgtgctagattttaatatccttgagcctgggcaagtgcacaagtctttttaaaagaaacatggtttacttgcacaaaactgatcagttttgagagatcgttaataaagagttttcagtgctgataggtggtgctatgatcgatggtgtagaaattgaa

SEQ ID NO: 451308 - DNA, 2350 bp, Homo sapiens
actacatacttccggactacatacttccgaaagacgatcaatcaaattcgtcaagatgcagtaaaagatctaggggtgtttattcctgctcctatggctcaagggatgagaagtgacttctttctggagggaccgttcatgccacccaggatgaaaatggatagggacccacttggaggacttgctgatatgtttggacaaatgccaggtagcggaattggtactggtccaggagttatccaggatagattttcacccaccatgggacgtcatcgttcaaatcaactcttcaatggccatgggggacacatcatgcctcccacacaatcgcagtttggagagatgggaggcaagtttatgaaaagccaggggctaagccagctctaccataaccagagtcagggactcttatcccagctgcaaggacagtcgaaggatatgccacctcggttttctaagaaaggacagcttaatgcagatgagattagcctgaggcctgctcagtcgttcctaatgaataaaaatcaagtgccaaagcttcagccccagataactatgattcctcctagtgcacaaccaccacgcactcaaacaccacctctgggacagacacctcagcttggtctcaaaactaatccaccacttatccaggaaaagcctgccaagaccagcaaaaagccaccaccgtcaaaggaagaactccttaaactaactgaaactgttgtgactgaatatctaaatagtggaaatgcaaatgaggctgtcaatggtgtaagagaaatgagggctcctaaacactttcttcctgagatgttaagcaaagtaatcatcctgtcactagatagaagcgatgaagataaagaaaaagcaagttctttgatcagtttactcaaacaggaagggatagccacaagtgacaacttcatgcaggctttcctgaatgtattggaccagtgtcccaaactggaggttgacatccctttggtgaaatcctatttagcacagtttgcagctcgtgccatcatttcagagctggtgagcatttcagaactagctcaaccactagaaagtggcacccattttcctctcttcctactttgtcttcagcagttagctaaattacaagatcgagaatggttaacagaactttttcaacaaagcaaggtcaatatgcagaaaatgctcccagaaattgatcagaataaggaccgcatgttggagattttggaaggaaagggactgagtttcttattcccactcctcaaattggagaaggaactgttgaagcaaataaagttggatccatcccctcaaaccatatataaatggattaaagataacatctctcccaaacttcatgtagataaaggatttgtgaacatcttaatgactagcttcttacagtacatttctagtgaagtaaacccccccagcgatgaaacagattcatcctctgctccttccaaagaacagttagagcaggaaaaacaactactactatctttcaagccagtaatgcagaaatttcttcatgatcacgttgatctacaagtcagtgccctgtatgctctccaggtgcactgctataacagcaacttcccaaaaggcatgttacttcgcttttttgtgcacttctatgacatggaaattattgaagaagaagctttcttggcttggaaagaagatataacccaagagtttccgggaaaaggcaaggctttgttccaggtgaatcagtggctaacctggttagaaactgctgaagaagaagaatcagaggaagaagctgactaaagaaccagccaaagccttaaattgtgcaaaacatactgttgctatgatgtaactgcatttgacctaaccactgcgaaaattcattccgctgtaatgttttcacaatatttaaagcagaagcacgtcagttaggatttccttctgcataaggtttttttgtagtgtaatgtcttaatcatagtctaccatcaaatattttaggagtatctttaatgtttagatagtatattagcagcatgcaataattacatcataagttctcaagcagaggcagtctattgcaaggaccttctttgctgccagttatcataggctgttttaagttagaaaactgaatagcaacactgaatactgtagaaatgcactttgctcagtaatacttgagttgttgcaatatttgattatccatttggttgttacagaaaaattcttaactgtaattgatggttgttgccgtaatagtatattgcctgtatttctacctctagtattactgagcaaagtgcatttctacagtattcagtgttgctattcagttttctgtgtagaaattgaa

SEQ ID NO: 451309 - DNA, 2269 bp, Homo sapiens
actacatacttccggactacatacttccgaaagacgatcaatcaaattcgtcaagatgcagtaaaagatctaggggtgtttattcctgctcctatggctcaagggatgagaagtgacttctttctggagggaccgttcatgccacccaggatgaaaatggatagggacccacttggaggacttgctgatatgtttggacaaatgccaggtagcggaattggtactggtccaggagttatccaggatagattttcacccaccatgggacgtcatcgttcaaatcaactcttcaatggccatgggggacacatcatgcctcccacacaatcgcagtttggagagatgggaggcaagtttatgaaaagccaggggctaagccagctctaccataaccagagtcagggactcttatcccagctgcaaggacagtcgaaggatatgccacctcggttttctaagaaaggacagcttaatgcagatgagattagcctgaggcctgctcagtcgttcctaatgaataaaaatcaagtgccaaagcttcagccccagataactatgattcctcctagtgcacaaccaccacgcactcaaacaccacctctgggacagacacctcagcttggtctcaaaactaatccaccacttatccaggaaaagcctgccaagaccagcaaaaagccaccaccgtcaaaggaagaactccttaaactaactgaaactgttgtgactgaatatctaaatagtggaaatgcaaatgaggctgtcaatggtgtaagagaaatgagggctcctaaacactttcttcctgagatgttaagcaaagtaatcatcctgtcactagatagaagcgatgaagataaagaaaaagcaagttctttgatcagtttactcaaacaggaagggatagccacaagtgacaacttcatgcaggctttcctgaatgtattggaccagtgtcccaaactggaggttgacatccctttggtgaaatcctatttagcacagtttgcagctcgtgccatcatttcagagctggtgagcatttcagaactagctcaaccactagaaagtggcacccattttcctctcttcctactttgtcttcagcagttagctaaattacaagatcgagaatggttaacagaactttttcaacaaagcaaggtcaatatgcagaaaatgctcccagaaattgatcagaataaggaccgcatgttggagattttggaaggaaagggactgagtttcttattcccactcctcaaattggagaaggaactgttgaagcaaataaagttggatccatcccctcaaaccatatataaatggattaaagataacatctctcccaaacttcatgtagataaaggatttgtgaacatcttaatgactagcttcttacagtacatttctagtgaagtaaacccccccagcgatgaaacagattcatcctctgctccttccaaagaacagttagagcaggaaaaacaactactactatctttcaagccagtaatgcagaaatttcttcatgatcacgttgatctacaagtcagtgccctgtatgctctccaggtgcactgctataacagcaacttcccaaaaggcatgttacttcgcttttttgtgcacttctatgacatggaaattattgaagaagaagctttcttggcttggaaagaagatataacccaagagtttccgggaaaaggcaaggctttgttccaggtgaatcagtggctaacctggttagaaactgctgaagaagaagaatcagaggaagaagctgactaaagaaccagccaaagccttaaattgtgcaaaacatactgttgctatgatgtaactgcatttgacctaaccactgcgaaaattcattccgctgtaatgttttcacaatatttaaagcagaagcacgtcagttaggatttccttctgcataaggtttttttgtagtgtaatgtcttaatcatagtctaccatcaaatattttaggagtatctttaatgtttagatagtatattagcagcatgcaataattacatcataagttctcaagcagaggcagtctattgcaaggaccttctttgctgccagttatcataggctgttttaagttagaaaactgaatagcactgatactgggaatgccttgtccgatatggggggccattgggtcccctggtgttcgaacaacctacggtggggggggcccaaaatatggggttcacccacaagggggggagaaaaacgcgcggaggaagcctta

SEQ ID NO: 451310 - DNA, 1036 bp, Homo sapiens
actacatacttccggactacatacttccgaaagacgatcaatcaaattcgtcaagatgcagtaaaagatctaggggtgtttattcctgctcctatggctcaagggatgagaagtgacttctttctggagggaccgttcatgccacccaggatgaaaatggatagggacccacttggaggacttgctgatatgtttggacaaatgccaggtgaatcagtggctaacctggttagaaactgctgaagaagaagaatcagaggaagaagctgactaaagaaccagccaaagccttaaattgtgcaaaacatactgttgctatgatgtaactgcatttgacctaaccactgcgaaaattcattccgctgtaatgttttcacaatatttaaagcagaagcacgtcagttaggatttccttctgcataaggtttttttgtagtgtaatgtcttaatcatagtctaccatcaaatattttaggagtatctttaatgtttagatagtatattagcagcatgcaataattacatcataagttctcaagcagaggcagtctattgcaaggaccttctttgctgccagttatcataggctgttttaagttagaaaactgaatagcaacactgaatactgtagaaatgcactttgctcagtaatacttgagttgttgcaatatttgattatccatttggttgttacagaaaaattcttaactgtaattgatggttgttgccgtaatagtatattgcctgtatttctacctctagtaatgggctttatgtgctagattttaatatccttgagcctgggcaagtgcacaagtctttttaaaagaaacatggtttacttgcacaaaactgatcagttttgagagatcgttaatgcccttgaagtggtttttgtgggtgtgaaacaaatggtgagaatttgaattggtccctcctattatagtattgaaattaagtctacttaatttatcaagtcatgttcatgccctgattttatatacttgtatctatcaataaacattgtgatacttga

SEQ ID NO: 451311 - DNA, 2555 bp, Homo sapiens
actacatacttccggactacatacttccgaaagacgatcaatcaaattcgtcaagatgcagtaaaagatctaggggtgtttattcctgctcctatggctcaagggatgagaagtgacttctttctggagggaccgttcatgccacccaggatgaaaatggatagggacccacttggaggacttgctgatatgtttggacaaatgccaggtagcggaattggtactggtccaggagttatccaggatagattttcacccaccatgggacgtcatcgttcaaatcaactcttcaatggccatgggggacacatcatgcctcccacacaatcgcagtttggagagatgggaggcaagtttatgaaaagccaggggctaagccagctctaccataaccagagtcagggactcttatcccagctgcaaggacagtcgaaggatatgccacctcggttttctaagaaaggacagcttaatgcagatgagattagcctgaggcctgctcagtcgttcctaatgaataaaaatcaagtgccaaagcttcagccccagataactatgattcctcctagtgcacaaccaccacgcactcaaacaccacctctgggacagacacctcagcttggtctcaaaactaatccaccacttatccaggaaaagcctgccaagaccagcaaaaagccaccaccgtcaaaggaagaactccttaaactaactgaaactgttgtgactgaatatctaaatagtggaaatgcaaatgaggctgtcaatggtgtaagagaaatgagggctcctaaacactttcttcctgagatgttaagcaaagtaatcatcctgtcactagatagaagcgatgaagataaagaaaaagcaagttctttgatcagtttactcaaacaggaagggatagccacaagtgacaacttcatgcaggctttcctgaatgtattggaccagtgtcccaaactggaggttgacatccctttggtgaaatcctatttagcacagtttgcagctcgtgccatcatttcagagctggtgagcatttcagaactagctcaaccactagaaagtggcacccattttcctctcttcctactttgtcttcagcagttagctaaattacaagatcgagaatggttaacagaactttttcaacaaagcaaggtcaatatgcagaaaatgctcccagaaattgatcagaataaggaccgcatgttggagattttggaaggaaagggactgagtttcttattcccactcctcaaattggagaaggaactgttgaagcaaataaagttggatccatcccctcaaaccatatataaatggattaaagataacatctctcccaaacttcatgtagataaaggatttgtgaacatcttaatgactagcttcttacagtacatttctagtgaagtaaacccccccagcgatgaaacagattcatcctctgctccttccaaagaacagttagagcaggaaaaacaactactactatctttcaagccagtaatgcagaaatttcttcatgatcacgttgatctacaagtcagtgccctgtatgctctccaggtgcactgctataacagcaacttcccaaaagcatgtcacttcgcttacctgtgcacttctatgacatggaaacattatccgaccagcaagaagctataccttggcctctggccacgacagaatactaaccccacagacgttacccggcgcaacaaggccaagggctatcggtatccagagttgcacattcagctcggcctcacaccttgggttcaaccaacacttgtctgcacagcacacaaataaacatcaccaagcgaagagccaacgcctggcacattcacccgaaaccccaaggccaaaccagcgcccttacacacttcggctggccacaaaatccataccgtggacacggccttaattgaccctggttaaaacgttggcccgattaaaggaaatccttcaaaacccaaccatggccgtaaaccacacaatccacactataccccgcactggactcaacatcgataaacaaccatctaaaagagtaacatctacataaacaagacctatgcaaaaaccgccacaggctacacaacccctacaccgtgcaacatctctcccccctattccattggccaattaacagctgtcaccatcaatctctccgcgctcacgacgcgcatcaaacattggcttcccctatcaccactacccaaatataacaaccttccttaataccccaactatcaacaaaccaccacactcccacaaccgctcaaccctcacccccaattctcaacccctcagctacacaccccaaatctacccccactttcactcacacacacccagcaccacagggtacaaaccacccaaaccctcgcacacccgactcccgaacctaacacgactgattcaactgccaaacggggcacacagcaagagtgccacaagaccaccgtaaattctggggcacaaaaagacacaccactgtaccccttacgaggactaaggagacacaagcgcaaatgtcacaa

SEQ ID NO: 451312 - DNA, 1354 bp, Homo sapiens
actacatacttccggactacatacttccgaaagacgatcaatcaaattcgtcaagatgcagtaaaagatctaggggtgtttattcctgctcctatggctcaagggatgagaagtgacttctttctggagggaccgttcatgccacccaggatgaaaatggatagggacccacttggaggacttgctgatatgtttggacaaatgccaggtagcggaattggtactggtccaggagttatccaggatagattttcacccaccatgggacgtcatcgttcaaatcaactcttcaatggccatgggggacacatcatgcctcccacacaatcgcagtttggagagatgggaggcaagtttatgaaaagccaggggctaagccagctctaccataaccagagtcagggactcttatcccagctgcaaggacagtcgaaggatatgccacctcggttttctaagaaaggacagcttaatgcagatgagattagcctgaggcctgctcagtcgttcctaatgaataaaaatcaagtgccaaagcttcagccccagataactatgattcctcctagtgcacaaccaccacgcactcaaacaccacctctgggacagacacctcagcttggtctcaaaactaatccaccacttatccaggaaaagcctgccaagaccagcaaaaagccaccaccgtcaaaggaagaactccttaaactaactgaaactgttgtgactgaatatctaaatagtggaaatgcaaatgaggctgtcaatggtgtaagagaaatgagggctcctaaacactttcttcctgagatgttaagcaaagtaatcatcctgtcactagatagaagcgatgaagataaagaaaaagcaagttctttgatcagtttactcaaacaggaagggatagccacaagtgacaacttcatgcaggctttcctgaatgtattggaccagtgtcccaaactggaggttgacatccctttggtgaaatcctatttagcacagtttgcagctcgtgccatcatttcagagctggtgagcatttcagaactagctcaaccactagaaagtggcacccattttcctctcttcctactttgtcttcagcagttagctaaattacaagatcgagaatggttaacagaactttttcaacaaagcaaggtcaatatgcagaaaatgctcccagaaattgatcagaataaggaccgcatgttggagattttggaaggaaagggactgagtttcttattcccactcctcaaattggagaaggaactgttgaagcaaataaagttggatccatcccctacaagaataaaggatgcagaacagaataactgacgcactggga

SEQ ID NO: 451313 - DNA, 931 bp, Homo sapiens
  misc_feature (931)..(931): n is a, c, g, or t
actacatacttccggactacatacttccgaaagacgatcaatcaaattcgtcaagatgcagtaaaagatctaggggtgtttattcctgctcctatggctcaagggatgagaagtgacttctttctggagggaccgttcatgccacccaggatgaaaatggatagggacccacttggaggacttgctgatatgtttggacaaatgccaggtagcggaattggtactggtccaggagttatccaggatagattttcacccaccatgggacgtcatcgttcaaatcaactcttcaatggccatgggggacacatcatgcctcccacacaatcgcagtttggagagatgggaggcaagtttatgaaaagccaggggctaagccagctctaccataaccagagtcagggactcttatcccagctgcaaggacagtcgaaggatatgccacctcggttttctaagaaaggacagcttaatgcagatgagattagcctgaggcctgctcagtcgttcctaatgaataaaaatcaagtgccaaagcttcagccccagataactatgattcctcctagtgcacaaccaccacgcactcaaacaccacctctgggacagacacctcagcttggtctcaaaactaatccaccacttatccaggaaaagcctgccaagaccagcaaaaagccaccaccgtcaaaggaagaactccttaaactaactgaaactgttgtgactgaatatctaaatagtggaaatgcaaatgaggctgtcaatggtgtaagagaaatgagggctcctaaacactttcttcctgagatgttaagcaaagtaatcatcctgtcactagatagaagcgatgaagataaagaaaaagcaagttctttgatcagtttactcaaacaggaacttggtggggaatcactagtgaattcgcgcn

SEQ ID NO: 451314 - DNA, 755 bp, Homo sapiens
actacatacttccggactacatacttccgaaagacgatcaatcaaattcgtcaagatgcagtaaaagatctaggggtgtttattcctgctcctatggctcaagggatgagaagtgacttctttctggagggaccgttcatgccacccaggatgaaaatggatagggacccacttggaggacttgctgatatgtttggacaaatgccaggtagcggaattggtactggtccaggagttatccaggatagattttcacccaccatgggacgtcatcgttcaaatcaactcttcaatggccatgggggacacatcatgcctcccacacaatcgcagtttggagagatgggaggcaagtttatgaaaagccaggggctaagccagctctaccataaccagagtcagggactcttatcccagctgcaaggacagtcgaaggatatgccacctcggttttctaagaaaggacagcttaatgcagatgagattagcctgaggcctgctcagtcgttcctaatgaataaaaatcaagtgccaaagcttcagccccagataactatgattcctcctagtgcacaaccaccacgcactcaaacaccacctctgggacagacacctcagcttggtctcaaaactaatccaccacttatccaggaaaagcctgccaagaccagcaaaaagccaccaccgtcaaaggaagaactccttaaactaactggagctgttgtaactggggctgttgtaactggagctgttgt

SEQ ID NO: 451315 - DNA, 639 bp, Homo sapiens
actacatacttccggactacatacttccgaaagacgatcaatcaaattcgtcaagatgcagtaaaagatctaggggtgtttattcctgctcctatggctcaagggatgagaagtgacttctttctggagggaccgttcatgccacccaggatgaaaatggatagggacccacttggaggacttgctgatatgtttggacaaatgccaggtagcggaattggtactggtccaggagttatccaggatagattttcacccaccatgggacgtcatcgttcaaatcaactcttcaatggccatgggggacacatcatgcctcccacacaatcgcagtttggagagatgggaggcaagtttatgaaaagccaggggctaagccagctctaccataaccagagtcagggactcttatcccagctgcaaggacagtcgaaggatatgccacctcggttttctaagaaaggacagcttaatgcagatgagattagcctgaggcctgctcagtcgttcctaatgaataaaaatcaagtgccaaagcttcagccccagataactatgattcctcctagtgcacaaccaccacgcactcaaacaccacctctgggacaggtcgacgcggccgcgaatttagtagtagta

SEQ ID NO: 451316 - DNA, 507 bp, Homo sapiens
actacatacttccggactacatacttccgaaagacgatcaatcaaattcgtcaagatgcagtaaaagatctaggggtgtttattcctgctcctatggctcaagggatgagaagtgacttctttctggagggaccgttcatgccacccaggatgaaaatggatagggacccacttggaggacttgctgatatgtttggacaaatgccaggtagcggaattggtactggtccaggagttatccaggatagattttcacccaccatgggacgtcatcgttcaaatcaactcttcaatggccatgggggacacatcatgcctcccacacaatcgcagtttggagagatgggaggcaagtttatgaaaagccaggggctaagccagctctaccataaccagagtcagggactcttatcccagctgcaaggacagtcgaaggatatgccacctcggttttctaagcggatcagcctaagcggatcctaagcggatgagatcctctagagtgac

SEQ ID NO: 451317 - DNA, 902 bp, Homo sapiens
actacatacttccggactacatacttccgaaagacgatcaatcaaattcgtcaagatgcagtaaaagatctaggggtgtttattcctgctcctatggctcaagggatgagaagtgacttctttctggagggaccgttcatgccacccaggatgaaaatggatagggacccacttggaggacttgctgatatgtttggacaaatgccaggtagcggaattggtactggtccaggagttatccaggatagattttcacccaccatgggacgtcatcgttcaaatcaactcttcaatggccatgggggacacatcatgcctcccacacaatcgcagtttggagagatgggaggcaagtttatgaaaagccaggtaagtaatatttgagtgtgcatgttttctaaaccttatctgcaacatttatttcaaactgaaatgtttatccttaagattagtaaagtattagtaaaatcacatcactttatttgataggttagatttttattcttccctgtttcatcttttactttctctgggcaaattcagttaaactaactttatggcttggctcatccctttggtacttgattaccataatttgtggacccctttttatctagactttctttctccttttctgaaataggggctaagccagctctaccataaccagagtcagggactcttatcccagctgcaaggacagtcgaaggatatgccacctcggttttctaagaaaggacagcttaatgcagatgaggtacatttgcctatgttacttatataccatagtttgtccattcagaaatttattgcccgatgattataaaaagacgcgttattaagaggactttatgctggagttcttgacgtttttctctcttttctatacttctttttctttc

SEQ ID NO: 451318 - DNA, 236 bp, Homo sapiens
actacatacttccggactacatacttccgaaagacgatcaatcaaattcgtcaagatgcagtaaaagatctaggggtgtttattcctgctcctatggctcaagggatgagaagtgacttctttctggagggaccgttcatgccacccaggatgaaaatggatagggacccacttggaggacttgctgatatgtttggacaaatgccagtagcgaagagtaggtacgacgtactctc

SEQ ID NO: 451319 - DNA, 967 bp, Homo sapiens
ataaactgttgtatatttctttcaagctttcctgaatgtattggaccagtgtcccaaactggaggttgacatccctttggtgaaatcctatttagcacagtttgcagctcgtgccatcatttcagagctggtgagcatttcagaactagctcaaccactagaaagtggcacccattttcctctcttcctactttgtcttcagcagttagctaaattacaagatcgagaatggttaacagaactttttcaacaaagcaaggtcaatatgcagaaaatgctcccagaaattgatcagaataaggaccgcatgttggagattttggaaggaaagggactgagtttcttattcccactcctcaaattggagaaggaactgttgaagcaaataaagttggatccatcccctcaaaccatatataaatggattaaagataacatctctcccaaacttcatgtagataaaggatttgtgaacatcttaatgactagcttcttacagtacatttctagtgaagtaaacccccccagcgatgaaacagattcatcctctgctccttccaaagaacagttagagcaggaaaaacaactactactatctttcaagccagtaatgcagaaatttcttcatgatcacgttgatctacaagtcagtgccctgtatgctctccaggtgcactgctataacagcaacttcccaaaagaagaattccaaaggatgttattcggtttttgtgccttcatgacatggaattggagaggagttttgggtggaaggagatattaccagagttcggaacgcaggttgtccgggatcagcgctactgttgacgtggacgagatgagagaagggtaggacggcagttatgtgaaattgggtagttttaggttggcacaggaaatcggtggtacttaggaggggagacttgaaggtgggggtacacataggttggtaagaaataagaggtgt

SEQ ID NO: 451320 - DNA, 490 bp, Homo sapiens
  misc_feature (446)..(446): n is a, c, g, or t
  misc_feature (458)..(458): n is a, c, g, or t
  misc_feature (460)..(460): n is a, c, g, or t
  misc_feature (466)..(466): n is a, c, g, or t
  misc_feature (468)..(468): n is a, c, g, or t
  misc_feature (471)..(471): n is a, c, g, or t
  misc_feature (483)..(483): n is a, c, g, or t
cacgcaaccctcatctcgacagcgctcggcgccccttacgccactggctcagcctcagagacttcgcgaatatggctttgcgcactgcggcggggctgcgccgcaaccgagctcagccctgtggctcctcctcgctgccctgcgcggattggtggcagacggcaaccgggccgctgattgggcggcgaaggagccattcggggagactctggtgggttcggctgccccaagagtgataagttcggcttcagacacgccttagcgccagcagtgagtcggagctctatggaggtggcagcgggtaccgagtggcggctgcagcagcgactcctctgagctgagtttgaggccgtccccgactccttcctcccccaaaaaaaaaaaaaaaaaaaaaaaaaaaaaaaaaaaaaaaaaaaaaaagaagaaaggataatgaggaggaagcngcggtggcagangntgagtnanaanagaaggtatttnatttata

SEQ ID NO: 451321 - DNA, 2556 bp, Homo sapiens
actacatacttccggactacatacttccgaaagacgatcaatcaaattcgtcaagatgcagtaaaagatctaggggtgtttattcctgctcctatggctcaagggatgagaagtgacttctttctggagggaccgttcatgccacccaggatgaaaatggatagggacccacttggaggacttgctgatatgtttggacaaatgccaggtagcggaattggtactggtccaggagttatccaggatagattttcacccaccatgggacgtcatcgttcaaatcaactcttcaatggccatgggggacacatcatgcctcccacacaatcgcagtttggagagatgggaggcaagtttatgaaaagccaggggctaagccagctctaccataaccagagtcagggactcttatcccagctgcaaggacagtcgaaggatatgccacctcggttttctaagaaaggacagcttaatgcagatgagattagcctgaggcctgctcagtcgttcctaatgaataaaaatcaagtgccaaagcttcagccccagataactatgattcctcctagtgcacaaccaccacgcactcaaacaccacctctgggacagacacctcagcttggtctcaaaactaatccaccacttatccaggaaaagcctgccaagaccagcaaaaagccaccaccgtcaaaggaagaactccttaaactaactgaaactgttgtgactgaatatctaaatagtggaaatgcaaatgaggctgtcaatggtgtaagagaaatgagggctcctaaacactttcttcctgagatgttaagcaaagtaatcatcctgtcactagatagaagcgatgaagataaagaaaaagcaagttctttgatcagtttactcaaacaggaagggatagccacaagtgacaacttcatgcaggctttcctgaatgtattggaccagtgtcccaaactggaggttgacatccctttggtgaaatcctatttagcacagtttgcagctcgtgccatcatttcagagctggtgagcatttcagaactagctcaaccactagaaagtggcacccattttcctctcttcctactttgtcttcagcagttagctaaattacaagatcgagaatggttaacagaactttttcaacaaagcaaggtcaatatgcagaaaatgctcccagaaattgatcagaataaggaccgcatgttggagattttggaaggaaagggactgagtttcttattcccactcctcaaattggagaaggaactgttgaagcaaataaagttggatccatcccctcaaaccatatataaatggattaaagataacatctctcccaaacttcatgtagataaaggatttgtgaacatcttaatgactagcttcttacagtacatttctagtgaagtaaacccccccagcgatgaaacagattcatcctctgctccttccaaagaacagttagagcaggaaaaacaactactactatctttcaagccagtaatgcagaaatttcttcatgatcacgttgatctacaagtcagtgccctgtatgctctccaggtgcactgctataacagcaacttcccaaaaggcatgttacttcgcttttttgtgcacttctatgacatggaaattattgaagaagaagctttcttggcttggaaagaagatataacccaagagtttccgggaaaaggcaaggctttgttccaggtgaatcagtggctaacctggttagaaactgctgaagaagaagaatcagaggaagaagctgactaaagaaccagccaaagccttaaattgtgcaaaacatactgttgctatgatgtaactgcatttgacctaaccactgcgaaaattcattccgctgtaatgttttcacaatatttaaagcagaagcacgtcagttaggatttccttctgcataaggtttttttgtagtgtaatgtcttaatcatagtctaccatcaaatattttaggagtatctttaatgtttagatagtatattagcagcatgcaataattacatcataagttctcaagcagaggcagtctattgcaaggaccttctttgctgccagttatcataggctgttttaagttagaaaactgaatagcaacactgaatactgtagaaatgcactttgctcagtaatacttgagttgttgcaatatttgattatccatttggttgttacagaaaaattcttaactgtaattgatggttgttgccgtaatagtatattgcctgtatttctacctctagtaatgggctttatgtgctagattttaatatccttgagcctgggcaagtgcacaagtctttttaaaagaaacatggtttacttgcacaaaactgatcagttttgagagatcgttaatgcccttgaagtggtttttgtgggtgtgaaacaaatggtgagaatttgaattggtccctcctattatagtattgaaattaagtctacttaatttatcaagtcatgttcatgccctgattttatatacttgtatctatcaataaacattgtgatacttga

SEQ ID NO: 451322 - DNA, 2442 bp, Homo sapiens
actacatacttccggactacatacttccgaaagacgatcaatcaaattcgtcaagatgcagtaaaagatctaggggtgtttattcctgctcctatggctcaagggatgagaagtgacttctttctggagggaccgttcatgccacccaggatgaaaatggatagggacccacttggaggacttgctgatatgtttggacaaatgccaggtagcggaattggtactggtccaggagttatccaggatagattttcacccaccatgggacgtcatcgttcaaatcaactcttcaatggccatgggggacacatcatgcctcccacacaatcgcagtttggagagatgggaggcaagtttatgaaaagccagattagcctgaggcctgctcagtcgttcctaatgaataaaaatcaagtgccaaagcttcagccccagataactatgattcctcctagtgcacaaccaccacgcactcaaacaccacctctgggacagacacctcagcttggtctcaaaactaatccaccacttatccaggaaaagcctgccaagaccagcaaaaagccaccaccgtcaaaggaagaactccttaaactaactgaaactgttgtgactgaatatctaaatagtggaaatgcaaatgaggctgtcaatggtgtaagagaaatgagggctcctaaacactttcttcctgagatgttaagcaaagtaatcatcctgtcactagatagaagcgatgaagataaagaaaaagcaagttctttgatcagtttactcaaacaggaagggatagccacaagtgacaacttcatgcaggctttcctgaatgtattggaccagtgtcccaaactggaggttgacatccctttggtgaaatcctatttagcacagtttgcagctcgtgccatcatttcagagctggtgagcatttcagaactagctcaaccactagaaagtggcacccattttcctctcttcctactttgtcttcagcagttagctaaattacaagatcgagaatggttaacagaactttttcaacaaagcaaggtcaatatgcagaaaatgctcccagaaattgatcagaataaggaccgcatgttggagattttggaaggaaagggactgagtttcttattcccactcctcaaattggagaaggaactgttgaagcaaataaagttggatccatcccctcaaaccatatataaatggattaaagataacatctctcccaaacttcatgtagataaaggatttgtgaacatcttaatgactagcttcttacagtacatttctagtgaagtaaacccccccagcgatgaaacagattcatcctctgctccttccaaagaacagttagagcaggaaaaacaactactactatctttcaagccagtaatgcagaaatttcttcatgatcacgttgatctacaagtcagtgccctgtatgctctccaggtgcactgctataacagcaacttcccaaaaggcatgttacttcgcttttttgtgcacttctatgacatggaaattattgaagaagaagctttcttggcttggaaagaagatataacccaagagtttccgggaaaaggcaaggctttgttccaggtgaatcagtggctaacctggttagaaactgctgaagaagaagaatcagaggaagaagctgactaaagaaccagccaaagccttaaattgtgcaaaacatactgttgctatgatgtaactgcatttgacctaaccactgcgaaaattcattccgctgtaatgttttcacaatatttaaagcagaagcacgtcagttaggatttccttctgcataaggtttttttgtagtgtaatgtcttaatcatagtctaccatcaaatattttaggagtatctttaatgtttagatagtatattagcagcatgcaataattacatcataagttctcaagcagaggcagtctattgcaaggaccttctttgctgccagttatcataggctgttttaagttagaaaactgaatagcaacactgaatactgtagaaatgcactttgctcagtaatacttgagttgttgcaatatttgattatccatttggttgttacagaaaaattcttaactgtaattgatggttgttgccgtaatagtatattgcctgtatttctacctctagtaatgggctttatgtgctagattttaatatccttgagcctgggcaagtgcacaagtctttttaaaagaaacatggtttacttgcacaaaactgatcagttttgagagatcgttaatgcccttgaagtggtttttgtgggtgtgaaacaaatggtgagaatttgaattggtccctcctattatagtattgaaattaagtctacttaatttatcaagtcatgttcatgccctgattttatatacttgtatctatcaataaacattgtgatacttga

SEQ ID NO: 451323 - DNA, 3219 bp, Homo sapiens
  misc_feature (3212)..(3212): n is a, c, g, or t
actacatacttccggactacatacttccgaaagacgatcaatcaaattcgtcaagatgcagtaaaagatctaggggtgtttattcctgctcctatggctcaagggatgagaagtgacttctttctggagggaccgttcatgccacccaggatgaaaatggatagggacccacttggaggacttgctgatatgtttggacaaatgccaggtagcggaattggtactggtccaggagttatccaggatagattttcacccaccatgggacgtcatcgttcaaatcaactcttcaatggccatgggggacacatcatgcctcccacacaatcgcagtttggagagatgggaggcaagtttatgaaaagccaggggctaagccagctctaccataaccagagtcagggactcttatcccagctgcaaggacagtcgaaggatatgccacctcggttttctaagaaaggacagcttaatgcagatgagattagcctgaggcctgctcagtcgttcctaatgaataaaaatcaagtgccaaagcttcagccccagataactatgattcctcctagtgcacaaccaccacgcactcaaacaccacctctgggacagacacctcagcttggtctcaaaactaatccaccacttatccaggaaaagcctgccaagaccagcaaaaagccaccaccgtcaaaggaagaactccttaaactaactgaaactgttgtgactgaatatctaaatagtggaaatgcaaatgaggctgtcaatggtgtaagagaaatgagggctcctaaacactttcttcctgagatgttaagcaaagtaatcatcctgtcactagatagaagcgatgaagataaagaaaaagcaagttctttgatcagtttactcaaacaggaagggatagccacaagtgacaacttcatgcaggctttcctgaatgtattggaccagtgtcccaaactggaggttgacatccctttggtgaaatcctatttagcacagtttgcagctcgtgccatcatttcagagctggtgagcatttcagaactagctcaaccactagaaagtggcacccattttcctctcttcctactttgtcttcagcagttagctaaattacaagatcgagaatggttaacagaactttttcaacaaagcaaggtcaatatgcagaaaatgctcccagaaattgatcagaataaggaccgcatgttggagattttggaaggaaagggactgagtttcttattcccactcctcaaattggagaaggaactgttgaagcaaataaagttggatccatcccctcaaaccatatataaatggattaaagataacatctctcccaaacttcatgtagataaaggatttgtgaacatcttaatgactagcttcttacagtacatttctagtgaagtaaacccccccagcgatgaaacagattcatcctctgctccttccaaagaacagttagagcaggaaaaacaactactactatctttcaagccagtaatgcagaaatttcttcatgatcacgttgatctacaagtcagtgccctgtatgctctccaggtgcactgctataacagcaacttcccaaaaggcatgttacttcgcttttttgtgcacttctatgacatggaaattattgaagaagaagctttcttggcttggaaagaagatataacccaagagtttccgggaaaaggcaaggctttgttccaggtgaatcagtggctaacctggttagaaactgctgaagaagaagaatcagaggaagaagctgactaaagaaccagccaaagccttaaattgtgcaaaacatactgttgctatgatgtaactgcatttgacctaaccactgcgaaaattcattccgctgtaatgttttcacaatatttaaagcagaagcacgtcagttaggatttccttctgcataaggtttttttgtagtgtaatgtcttaatcatagtctaccatcaaatattttaggagtatctttaatgtttagatagtatattagcagcatgcaataattacatcataagttctcaagcagaggcagtctattgcaaggaccttctttgctgccagttatcataggctgttttaagttagaaaactgaatagcaacactgaatactgtagaaatgcactttgctcagtaatacttgagttgttgcaatatttgattatccatttggttgttacagaaaaattcttaactgtaattgatggttgttgccgtaatagtatattgcctgtatttctacctctagtaatgggctttatgtgctagattttaatatccttgagcctgggcaagtgcacaagtctttttaaaagaaacatggtttacttgcacaaaactgatcagttttgagagatcgttaatgcccttgaagtggtttttgtgggtgtgaaacaaatggtgagaatttgaattggtccctcctattatagtattgaaattaagtctacttaatttatcaagtcatgttcatgccctgattttatatacttgtatctatcaataaacattgtgatacttgaaaaaaaaaaaacaaaaacaaaaaaaaaaaaaaaaaaaaaaaaaaaaaaaaaaaaaaaaaaaaaaaaaaaaaaaaaaaaaaaacaaaaaaaaaaaaaaaaaaaaaaaaaaaaaaaaaaaaaaaaaaaaaaaaagggggggcgcgagcgcagcacattaatataactccgctaccagggggagccacgacacacttccaccccgcacagatattttaagtaaaagaggcggccactccaaaagtgataggatctatataaaaaacaacaagacggcggccgactataaaaaacgactaggagaggaaaaaacataagtcacacgttacttatatgagaaaaaccacacacaacctagagggtaggcaaccaaataggcgaagtacacccaacaacgaacaaaagtaaaatagtagccggcaggaggaaaaaacaacaacaaaaagagtaatataatgctcaaaacaaccccaaaggacacataattaggcgcgcagaaagaacaaactcacgaaaccacgcgaaatcagtaatacaaacaataactaccgacggagtgaatgaaaataataagaaacacagaaacaagaagaagagacaaacgcgagcagacaagaaaacaatgaaagaaagaaaagagaaaaaaaaaaaacaaaaanaaaaaaa

SEQ ID NO: 451324 - DNA, 2574 bp, Homo sapiens
actacatacttccggactacatacttccgaaagacgatcaatcaaattcgtcaagatgcagtaaaagatctaggggtgtttattcctgctcctatggctcaagggatgagaagtgacttctttctggagggaccgttcatgccacccaggatgaaaatggatagggacccacttggaggacttgctgatatgtttggacaaatgccaggtagcggaattggtactggtccaggagttatccaggatagattttcacccaccatgggacgtcatcgttcaaatcaactcttcaatggccatgggggacacatcatgcctcccacacaatcgcagtttggagagatgggaggcaagtttatgaaaagccaggggctaagccagctctaccataaccagagtcagggactcttatcccagctgcaaggacagtcgaaggatatgccacctcggttttctaagaaaggacagcttaatgcagatgagattagcctgaggcctgctcagtcgttcctaatgaataaaaatcaagtgccaaagcttcagccccagataactatgattcctcctagtgcacaaccaccacgcactcaaacaccacctctgggacagacacctcagcttggtctcaaaactaatccaccacttatccaggaaaagcctgccaagaccagcaaaaagccaccaccgtcaaaggaagaactccttaaactaactgaaactgttgtgactgaatatctaaatagtggaaatgcaaatgaggctgtcaatggtgtaagagaaatgagggctcctaaacactttcttcctgagatgttaagcaaagtaatcatcctgtcactagatagaagcgatgaagataaagaaaaagcaagttctttgatcagtttactcaaacaggaagggatagccacaagtgacaacttcatgcaggctttcctgaatgtattggaccagtgtcccaaactggaggttgacatccctttggtgaaatcctatttagcacagtttgcagctcgtgccatcatttcagagctggtgagcatttcagaactagctcaaccactagaaagtggcacccattttcctctcttcctactttgtcttcagcagttagctaaattacaagatcgagaatggttaacagaactttttcaacaaagcaaggtcaatatgcagaaaatgctcccaggtggctttgtctcttcagaaattgatcagaataaggaccgcatgttggagattttggaaggaaagggactgagtttcttattcccactcctcaaattggagaaggaactgttgaagcaaataaagttggatccatcccctcaaaccatatataaatggattaaagataacatctctcccaaacttcatgtagataaaggatttgtgaacatcttaatgactagcttcttacagtacatttctagtgaagtaaacccccccagcgatgaaacagattcatcctctgctccttccaaagaacagttagagcaggaaaaacaactactactatctttcaagccagtaatgcagaaatttcttcatgatcacgttgatctacaagtcagtgccctgtatgctctccaggtgcactgctataacagcaacttcccaaaaggcatgttacttcgcttttttgtgcacttctatgacatggaaattattgaagaagaagctttcttggcttggaaagaagatataacccaagagtttccgggaaaaggcaaggctttgttccaggtgaatcagtggctaacctggttagaaactgctgaagaagaagaatcagaggaagaagctgactaaagaaccagccaaagccttaaattgtgcaaaacatactgttgctatgatgtaactgcatttgacctaaccactgcgaaaattcattccgctgtaatgttttcacaatatttaaagcagaagcacgtcagttaggatttccttctgcataaggtttttttgtagtgtaatgtcttaatcatagtctaccatcaaatattttaggagtatctttaatgtttagatagtatattagcagcatgcaataattacatcataagttctcaagcagaggcagtctattgcaaggaccttctttgctgccagttatcataggctgttttaagttagaaaactgaatagcaacactgaatactgtagaaatgcactttgctcagtaatacttgagttgttgcaatatttgattatccatttggttgttacagaaaaattcttaactgtaattgatggttgttgccgtaatagtatattgcctgtatttctacctctagtaatgggctttatgtgctagattttaatatccttgagcctgggcaagtgcacaagtctttttaaaagaaacatggtttacttgcacaaaactgatcagttttgagagatcgttaatgcccttgaagtggtttttgtgggtgtgaaacaaatggtgagaatttgaattggtccctcctattatagtattgaaattaagtctacttaatttatcaagtcatgttcatgccctgattttatatacttgtatctatcaataaacattgtgatacttga

SEQ ID NO: 451325 - DNA, 2683 bp, Homo sapiens
actacatacttccggactacatacttccgaaagacgatcaatcaaattcgtcaagatgcagtaaaagatctaggggtgtttattcctgctcctatggctcaagggatgagaagtgacttctttctggagggaccgttcatgccacccaggatgaaaatggatagggacccacttggaggacttgctgatatgtttggacaaatgccaggtagcggaattggtactggtccaggagttatccaggatagattttcacccaccatgggacgtcatcgttcaaatcaactcttcaatggccatgggggacacatcatgcctcccacacaatcgcagtttggagagatgggaggcaagtttatgaaaagccaggggctaagccagctctaccataaccagagtcagggactcttatcccagctgcaaggacagtcgaaggatatgccacctcggttttctaagaaaggacagcttaatgcagatgagattagcctgaggcctgctcagtcgttcctaatgaataaaaatcaagtgccaaagcttcagccccagataactatgattcctcctagtgcacaaccaccacgcactcaaacaccacctctgggacagacacctcagcttggtctcaaaactaatccaccacttatccaggaaaagcctgccaagaccagcaaaaagccaccaccgtcaaaggaagaactccttaaactaactgaaactgttgtgactgaatatctaaatagtggaaatgcaaatgaggctgtcaatggtgtaagagaaatgagggctcctaaacactttcttcctgagatgttaagcaaagtaatcatcctgtcactagatagaagcgatgaagataaagaaaaagcaagttctttgatcagtttactcaaacaggaagggatagccacaagtgacaacttcatgcaggctttcctgaatgtattggaccagtgtcccaaactggaggttgacatccctttggtgaaatcctatttagcacagtttgcagctcgtgccatcatttcagagctggtgagcatttcagaactagctcaaccactagaaagtggcacccattttcctctcttcctactttgtcttcagcagttagctaaattacaagatcgagaatggttaacagaactttttcaacaaagcaaggtcaatatgcagaaaatgctcccagaaattgatcagaataaggaccgcatgttggagattttggaaggaaagggactgagtttcttattcccactcctcaaattggagaaggaactgttgaagcaaataaagttggatccatcccctcaaaccatatataaatggattaaagataacatctctcccaaacttcatgtagataaaggatttgtgaacatcttaatgactaggtaagacgaatggttttctgcatatggtaatgtttcatgtactagaaaagaagcgtaggagactaagagttgtctcttgagcaagaaaactcactgttgggttctaacaagacctctttctgtccagcttcttacagtacatttctagtgaagtaaacccccccagcgatgaaacagattcatcctctgctccttccaaagaacagttagagcaggaaaaacaactactactatctttcaagccagtaatgcagaaatttcttcatgatcacgttgatctacaagtcagtgccctgtatgctctccaggtgcactgctataacagcaacttcccaaaaggcatgttacttcgcttttttgtgcacttctatgacatggaaattattgaagaagaagctttcttggcttggaaagaagatataacccaagagtttccgggaaaaggcaaggctttgttccaggtgaatcagtggctaacctggttagaaactgctgaagaagaagaatcagaggaagaagctgactaaagaaccagccaaagccttaaattgtgcaaaacatactgttgctatgatgtaactgcatttgacctaaccactgcgaaaattcattccgctgtaatgttttcacaatatttaaagcagaagcacgtcagttaggatttccttctgcataaggtttttttgtagtgtaatgtcttaatcatagtctaccatcaaatattttaggagtatctttaatgtttagatagtatattagcagcatgcaataattacatcataagttctcaagcagaggcagtctattgcaaggaccttctttgctgccagttatcataggctgttttaagttagaaaactgaatagcaacactgaatactgtagaaatgcactttgctcagtaatacttgagttgttgcaatatttgattatccatttggttgttacagaaaaattcttaactgtaattgatggttgttgccgtaatagtatattgcctgtatttctacctctagtaatgggctttatgtgctagattttaatatccttgagcctgggcaagtgcacaagtctttttaaaagaaacatggtttacttgcacaaaactgatcagttttgagagatcgttaatgcccttgaagtggtttttgtgggtgtgaaacaaatggtgagaatttgaattggtccctcctattatagtattgaaattaagtctacttaatttatcaagtcatgttcatgccctgattttatatacttgtatctatcaataaacattgtgatacttga

SEQ ID NO: 451326 - DNA, 3166 bp, Homo sapiens
  misc_feature (3159)..(3159): n is a, c, g, or t
actacatacttccggactacatacttccgaaagacgatcaatcaaattcgtcaagatgcagtaaaagatctaggggtgtttattcctgctcctatggctcaagggatgagaagtgacttctttctggagggaccgttcatgccacccaggatgaaaatggatagggacccacttggaggacttgctgatatgtttggacaaatgccaggtagcggaattggtactggtccaggagttatccaggatagattttcacccaccatgggacgtcatcgttcaaatcaactcttcaatggccatgggggacacatcatgcctcccacacaatcgcagtttggagagatgggaggcaagtttatgaaaagccaggggctaagccagctctaccataaccagagtcagggactcttatcccagctgcaaggacagtcgaaggatatgccacctcggttttctaagaaaggacagcttaatgcagatgagattagcctgaggcctgctcagtcgttcctaatgaataaaaatcaagtgccaaagcttcagccccagataactatgattcctcctagtgcacaaccaccacgcactcaaacaccacctctgggacagacacctcagcttggtctcaaaactaatccaccacttatccaggaaaagcctgccaagaccagcaaaaagccaccaccgtcaaaggaagaactccttaaactaactgaaactgttgtgactgaatatctaaatagtggaaatgcaaatgaggctgtcaatggtgtaagagaaatgagggctcctaaacactttcttcctgagatgttaagcaaagtaatcatcctgtcactagatagaagcgatgaagataaagaaaaagcaagttctttgatcagtttactcaaacaggaagggatagccacaagtgacaacttcatgcaggctttcctgaatgtattggaccagtgtcccaaactggaggttgacatccctttggtgaaatcctatttagcacagtttgcagctcgtgccatcatttcagagctggtgagcatttcagaactagctcaaccactagaaagtggcacccattttcctctcttcctactttgtcttcagcagttagctaaattacaagatcgagaatggttaacagaactttttcaacaaagcaaggtcaatatgcagaaaatgctcccagaaattgatcagaataaggaccgcatgttggagattttggaaggaaagggactgagtttcttattcccactcctcaaattggagaaggaactgttgaagcaaataaagttggatccatcccctcaaaccatatataaatggattaaagataacatctctcccaaacttcatgtagataaaggatttgtgaacatcttaatgactagcttcttacagtacatttctagtgaagtaaacccccccagcgatgaaacagattcatcctctgctccttccaaagaacagttagagcaggaaaaacaactactactatctttcaagccagtaatgcagaaatttcttcatgatcacgttgatctacaagtcagtgccctgtatgctctccaggtgcactgctataacagcaacttcccaaaaggcatgttacttcgcttttttgtgcacttctatgacatggaaattattgaagaagaagctttcttggcttggaaagaagatataacccaagagtttccgggaaaaggcaaggctttgttccaggtgaatcagtggctaacctggttagaaactgctgaagaagaagaatcagaggaagaagctgactaaagaaccagccaaagccttaaattgtgcaaaacatactgttgctatgatgtaactgcatttgacctaaccactgcgaaaattcattccgctgtaatgttttcacaatatttaaagcagaagcacgtcagttaggatttccttctgcataaggtttttttgtagtgtaatgtcttaatcatagtctaccatcaaatattttaggagtatctttaatgtttagatagtatattagcagcatgcaataattacatcataagttctcaagcagaggcagtctattgcaaggaccttctttgctgccagttatcataggctgttttaagttagaaaactgaatagcaacactgaatactgtagaaatgcactttgctcagtaatacttgagttgttgcaatatttgattatccatttggttgttacagaaaaattcttaactgtaattgatggttgttgccgtaatagtatattgcctgtatttctacctctagtaatgggctttatgtgctagattttaatatccttgagcctgggcaagtgcacaagtctttttaaaagaaacatggtttacttgcacaaaactgatcagttttgagagatcgttaatgcccttgaagtggtttttgtgggtgtgaaacaaatggtgagaatttgaattggtccctcctattatagtattgaaattaagtctacttaatttatcaagtcatgttcatgccctgattttatatacttgtatctatcaataaacattgtgatacttgaaaaaaaaaaaaaaaaaaaaaaaaaaaaaacaaaaaaaaaaaaaaaaaaaaaaaaaaaaaaaaaaaaaaaaaaaaaaaaagggggggcgcgagcgcagcacattaatataactccgctaccagggggagccacgacacacttccaccccgcacagatattttaagtaaaagaggcggccactccaaaagtgataggatctatataaaaaacaacaagacggcggccgactataaaaaacgactaggagaggaaaaaacataagtcacacgttacttatatgagaaaaaccacacacaacctagagggtaggcaaccaaataggcgaagtacacccaacaacgaacaaaagtaaaatagtagccggcaggaggaaaaaacaacaacaaaaagagtaatataatgctcaaaacaaccccaaaggacacataattaggcgcgcagaaagaacaaactcacgaaaccacgcgaaatcagtaatacaaacaataactaccgacggagtgaatgaaaataataagaaacacagaaacaagaagaagagacaaacgcgagcagacaagaaaacaatgaaagaaagaaaagagaaaaaaaaaaaacaaaaanaaaaaaa

SEQ ID NO: 451327 - DNA, 2605 bp, Homo sapiens
actacatacttccggactacatacttccgaaagacgatcaatcaaattcgtcaagatgcagtaaaagatctaggggtgtttattcctgctcctatggctcaagggatgagaagtgacttctttctggagggaccgttcatgccacccaggatgaaaatggatagggacccacttggaggacttgctgatatgtttggacaaatgccaggtagcggaattggtactggtccaggagttatccaggatagattttcacccaccatgggacgtcatcgttcaaatcaactcttcaatggccatgggggacacatcatgcctcccacacaatcgcagtttggagagatgggaggcaagtttatgaaaagccaggggctaagccagctctaccataaccagagtcagggactcttatcccagctgcaaggacagtcgaaggatatgccacctcggttttctaagaaaggacagcttaatgcagatgagattagcctgaggcctgctcagtcgttcctaatgaataaaaatcaagtgccaaagcttcagccccagataactatgattcctcctagtgcacaaccaccacgcactcaaacaccacctctgggacagacacctcagcttggtctcaaaactaatccaccacttatccaggaaaagcctgccaagaccagcaaaaagccaccaccgtcaaaggaagaactccttaaactaactgaaactgttgtgactgaatatctaaatagtggaaatgcaaatgaggctgtcaatggtgtaagagaaatgagggctcctaaacactttcttcctgagatgttaagcaaagtaatcatcctgtcactagatagaagcgatgaagataaagaaaaagcaagttctttgatcagtttactcaaacaggaagggatagccacaagtgacaacttcatgcaggctttcctgaatgtattggaccagtgtcccaaactggaggttgacatccctttggtgaaatcctatttagcacagtttgcagctcgtgccatcatttcagagctggtgagcatttcagaactagctcaaccactagaaagtggcacccattttcctctcttcctactttgtcttcagcagttagctaaattacaagatcgagaatggttaacagaactttttcaacaaagcaaggtcaatatgcagaaaatgctcccagaaattgatcagaataaggaccgcatgttggagattttggaaggaaagggactgagtttcttattcccactcctcaaattggagaaggaactgttgaagcaaataaagttggatccatcccctcaaaccatatataaatggattaaagataacatctctcccaaacttcatgtagataaaggatttgtgaacatcttaatgactagcttcttacagtacatttctagtgaagtaaacccccccagcgatgaaacagattcatcctctgctccttccaaagaacagttagagcaggaaaaacaactactactatctttcaagccagtaatgcagaaatttcttcatgatcacgttgatctacaagtcagtgccctgtatgctctccaggtgcactgctataacagcaacttcccaaaaggcatgttacttcgcttttttgtgcacttctatgacatggaaattattgaagaagaagctttcttggcttggaaagaagatataacccaagagtttccgggaaaaggcaaggctttgttccaggtgaatcagtggctaacctggttagaaactgctgaagaagaagaatcagaggaagaagctgactaaagaaccagccaaagccttaaattgtgcaaaacatactgttgctatgatgtaactgcatttgacctaaccactgcgaaaattcattccgctgtaatgttttcacaatatttaaagcagaagcacgtcagttaggatttccttctgcataaggtttttttgtagtgtaatgtcttaatcatagtctaccatcaaatattttaggagtatctttaatgtttagatagtatattagcagcatgcaataattacatcataagttctcaagcagaggcagtctattgcaaggaccttctttgctgccagttatcataggctgttttaagttagaaaactgaatagcaacactgaatactgtagaaatgcactttgctcagtaatacttgagttgttgcaatatttgattatccatttggttgttacagaaaaattcttaactgtaattgatggttgttgccgtaatagtatattgcctgtatttctacctctagtaatgggctttatgtgctagattttaatatccttgagcctgggcaagtgcacaagtctttttaaaagaaacatggtttacttgcacaaaactgatcagttttgagagatcgttaatgcccttgaagtggtttttgtgggtgtgaaacaaatggtgagaatttgaattggtccctcctattatagtattgaaattaagtctacttaatttatcaagtcatgttcatgccctgattttatatacttgtatctatcaataaacattgtgatacttgaaaaaaaaaaagtagaacgatgcaaccctaaattaagtgataccatcgaa

SEQ ID NO: 451328 - DNA, 2536 bp, Homo sapiens
actacatacttccggactacatacttccgaaagacgatcaatcaaattcgtcaagatgcagtaaaagatctaggggtgtttattcctgctcctatggctcaagggatgagaagtgacttctttctggagggaccgttcatgccacccaggatgaaaatggatagggacccacttggaggacttgctgatatgtttggacaaatgccaggtagcggaattggtactggtccaggagttatccaggatagattttcacccaccatgggacgtcatcgttcaaatcaactcttcaatggccatgggggacacatcatgcctcccacacaatcgcagtttggagagatgggaggcaagtttatgaaaagccaggggctaagccagctctaccataaccagagtcagggactcttatcccagctgcaaggacagtcgaaggatatgccacctcggttttctaagaaaggacagcttaatgcagatgagattagcctgaggcctgctcagtcgttcctaatgaataaaaatcaagtgccaaagcttcagccccagataactatgattcctcctagtgcacaaccaccacgcactcaaacaccacctctgggacagacacctcagcttggtctcaaaactaatccaccacttatccaggaaaagcctgccaagaccagcaaaaagccaccaccgtcaaaggaagaactccttaaactaactgaaactgttgtgactgaatatctaaatagtggaaatgcaaatgaggctgtcaatggtgtaagagaaatgagggctcctaaacactttcttcctgagatgttaagcaaagtaatcatcctgtcactagatagaagcgatgaagataaagaaaaagcaagttctttgatcagtttactcaaacaggaagggatagccacaagtgacaacttcatgcaggctttcctgaatgtattggaccagtgtcccaaactggaggttgacatccctttggtgaaatcctatttagcacagtttgcagctcgtgccatcatttcagagctggtgagcatttcagaactagctcaaccactagaaagtggcacccattttcctctcttcctactttgtcttcagcagttagctaaattacaagatcgagaatggttaacagaactttttcaacaaagcaaggtcaatatgcagaaaatgctcccagaaattgatcagaataaggaccgcatgttggagattttggaaggaaagggactgagtttcttattcccactcctcaaattggagaaggaactgttgaagcaaataaagttggatccatcccctcaaaccatatataaatggattaaagataacatctctcccaaacttcatgtagataaaggatttgtgaacatcttaatgactagcttcttacagtacatttctagtgaagtaaacccccccagcgatgaaacagattcatcctctgctccttccaaagaacagttagagcaggaaaaacaactactactatctttcaagccagtaatgcagaaatttcttcatgatcacgttgatctacaagtcagtgccctgtatgctctccaggtgcactgctataacagcaacttcccaaaaggcatgttacttcgcttttttgtgcacttctatgacatggaaattattgaagaagaagctttcttggcttggaaagaagatataacccaagagtttccgggaaaaggcaaggctttgttccaggtgaatcagtggctaacctggttagaaactgctgaagaagaagaatcagaggaagaagctgactaaagaaccagccaaagccttaaattgtgcaaaacatactgttgctatgatgtaactgcatttgacctaaccactgcgaaaattcattccgctgtaatgttttcacaatatttaaagcagaagcacgtcagttaggatttccttctgcataaggtttttttgtagtgtaatgtcttaatcatagtctaccatcaaatattttaggagtatctttaatgtttagatagtatattagcagcatgcaataattacatcataagttctcaagcagaggcagtctattgcaaggaccttctttgctgccagttatcataggctgttttaagttagaaaactgaatagcaacactgaatactgtagaaatgcactttgctcagtaatacttgagttgttgcaatatttgattatccatttggttgttacagaaaaattcttaactgtaattgatggttgttgccgtaatagtatattgcctgtatttctacctctagtaatgggctttatgtgctagattttaatatccttgagcctgggcaagtgcacaagtctttttaaaagaaacatggtttacttgcacaaaactgatcagttttgagagatcgttaatgcccttgaagtggtttttgtgggtgtgaaacaaatggtgagaatttgaattggtccctcctattatagtattgaaattaagtctacttaatttatcaagtcatgttcatgccctagaacctgattagactggcggtct

SEQ ID NO: 451329 - DNA, 2503 bp, Homo sapiens
actacatacttccggactacatacttccgaaagacgatcaatcaaattcgtcaagatgcagtaaaagatctaggggtgtttattcctgctcctatggctcaagggatgagaagtgacttctttctggagggaccgttcatgccacccaggatgaaaatggatagggacccacttggaggacttgctgatatgtttggacaaatgccaggtagcggaattggtactggtccaggagttatccaggatagattttcacccaccatgggacgtcatcgttcaaatcaactcttcaatggccatgggggacacatcatgcctcccacacaatcgcagtttggagagatgggaggcaagtttatgaaaagccaggggctaagccagctctaccataaccagagtcagggactcttatcccagctgcaaggacagtcgaaggatatgccacctcggttttctaagaaaggacagcttaatgcagatgagattagcctgaggcctgctcagtcgttcctaatgaataaaaatcaagtgccaaagcttcagccccagataactatgattcctcctagtgcacaaccaccacgcactcaaacaccacctctgggacagacacctcagcttggtctcaaaactaatccaccacttatccaggaaaagcctgccaagaccagcaaaaagccaccaccgtcaaaggaagaactccttaaactaactgaaactgttgtgactgaatatctaaatagtggaaatgcaaatgaggctgtcaatggtgtaagagaaatgagggctcctaaacactttcttcctgagatgttaagcaaagtaatcatcctgtcactagatagaagcgatgaagataaagaaaaagcaagttctttgatcagtttactcaaacaggaagggatagccacaagtgacaacttcatgcaggctttcctgaatgtattggaccagtgtcccaaactggaggttgacatccctttggtgaaatcctatttagcacagtttgcagctcgtgccatcatttcagagctggtgagcatttcagaactagctcaaccactagaaagtggcacccattttcctctcttcctactttgtcttcagcagttagctaaattacaagatcgagaatggttaacagaactttttcaacaaagcaaggtcaatatgcagaaaatgctcccagaaattgatcagaataaggaccgcatgttggagattttggaaggaaagggactgagtttcttattcccactcctcaaattggagaaggaactgttgaagcaaataaagttggatccatcccctcaaaccatatataaatggattaaagataacatctctcccaaacttcatgtagataaaggatttgtgaacatcttaatgactagcttcttacagtacatttctagtgaagtaaacccccccagcgatgaaacagattcatcctctgctccttccaaagaacagttagagcaggaaaaacaactactactatctttcaagccagtaatgcagaaatttcttcatgatcacgttgatctacaagtcagtgccctgtatgctctccaggtgcactgctataacagcaacttcccaaaaggcatgttacttcgcttttttgtgcacttctatgacatggaaattattgaagaagaagctttcttggcttggaaagaagatataacccaagagtttccgggaaaaggcaaggctttgttccaggtgaatcagtggctaacctggttagaaactgctgaagaagaagaatcagaggaagaagctgactaaagaaccagccaaagccttaaattgtgcaaaacatactgttgctatgatgtaactgcatttgacctaaccactgcgaaaattcattccgctgtaatgttttcacaatatttaaagcagaagcacgtcagttaggatttccttctgcataaggtttttttgtagtgtaatgtcttaatcatagtctaccatcaaatattttaggagtatctttaatgtttagatagtatattagcagcatgcaataattacatcataagttctcaagcagagttagaaaactgaatagcaacactgaatactgtagaaatgcactttgctcagtaatacttgagttgttgcaatatttgattatccatttggttgttacagaaaaattcttaactgtaattgatggttgttgccgtaatagtatattgcctgtatttctacctctagtaatgggctttatgtgctagattttaatatccttgagcctgggcaagtgcacaagtctttttaaaagaaacatggtttacttgcacaaaactgatcagttttgagagatcgttaatgcccttgaagtggtttttgtgggtgtgaaacaaatggtgagaatttgaattggtccctcctattatagtattgaaattaagtctacttaatttatcaagtcatgttcatgccctgattttatatacttgtatctatcaataaacattgtgatacttga

SEQ ID NO: 451330 - DNA, 2484 bp, Homo sapiens
actacatacttccggactacatacttccgaaagacgatcaatcaaattcgtcaagatgcagtaaaagatctaggggtgtttattcctgctcctatggctcaagggatgagaagtgacttctttctggagggaccgttcatgccacccaggatgaaaatggatagggacccacttggaggacttgctgatatgtttggacaaatgccaggtagcggaattggtactggtccaggagttatccaggatagattttcacccaccatgggacgtcatcgttcaaatcaactcttcaatggccatgggggacacatcatgcctcccacacaatcgcagtttggagagatgggaggcaagtttatgaaaagccaggggctaagccagctctaccataaccagagtcagggactcttatcccagctgcaaggacagtcgaaggatatgccacctcggttttctaagaaaggacagcttaatgcagatgagattagcctgaggcctgctcagtcgttcctaatgaataaaaatcaagtgccaaagcttcagccccagataactatgattcctcctagtgcacaaccaccacgcactcaaacaccacctctgggacagacacctcagcttggtctcaaaactaatccaccacttatccaggaaaagcctgccaagaccagcaaaaagccaccaccgtcaaaggaagaactccttaaactaactgaaactgttgtgactgaatatctaaatagtggaaatgcaaatgaggctgtcaatggtgtaagagaaatgagggctcctaaacactttcttcctgagatgttaagcaaagtaatcatcctgtcactagatagaagcgatgaagataaagaaaaagcaagttctttgatcagtttactcaaacaggaagggatagccacaagtgacaacttcatgcaggctttcctgaatgtattggaccagtgtcccaaactggaggttgacatccctttggtgaaatcctatttagcacagtttgcagctcgtgccatcatttcagagctggtgagcatttcagaactagctcaaccactagaaagtggcacccattttcctctcttcctactttgtcttcagcagttagctaaattacaagatcgagaatggttaacagaactttttcaacaaagcaaggtcaatatgcagaaaatgctcccagaaattgatcagaataaggaccgcatgttggagattttggaaggaaagggactgagtttcttattcccactcctcaaattggagaaggaactgttgaagcaaataaagttggatccatcccctcaaaccatatataaatggattaaagataacatctctcccaaacttcatgtagataaaggatttgtgaacatcttaatgactagcttcttacagtacatttctagtgaagtaaacccccccagcgatgaaacagattcatcctctgctccttccaaagaacagttagagcaggaaaaacaactactactatctttcaagccagtaatgcagaaatttcttcatgatcacgttgatctacaagtcagtgccctgtatgctctccaggtgcactgctataacagcaacttcccaaaaggcatgttacttcgcttttttgtgcacttctatgacatggaaattattgaagaagaagctttcttggcttggaaagaagatataacccaagagtttccgggaaaaggcaaggctttgttccaggtgaatcagtggctaacctggttagaaactgctgaagaagaagaatcagaggaagaagctgactaaagaaccagccaaagccttaaattgtgcaaaacatactgttgctatgatgtaactgcatttgacctaaccactgcgaaaattcattccgctgtaatgttttcacaatatttaaagcagaagcacgtcagttaggatttccttctgcataaggtttttttgtagtgtaatgtcttaatcatagtctaccatcaaatattttaggagtatctttaatgtttagatagtatattagcagcatgcaataattacatcataagttctcaagcagagttagaaaactgaatagcaacactgaatactgtagaaatgcactttgctcagtaatacttgagttgttgcaatatttgattatccatttggttgttacagaaaaattcttaactgtaattgatggttgttgccgtaatagtatattgcctgtatttctacctctagtaatgggctttatgtgctagattttaatatccttgagcctgggcaagtgcacaagtctttttaaaagaaacatggtttacttgcacaaaactgatcagttttgagagatcgttaatgcccttgaagtggtttttgtgggtgtgaaacaaatggtgagaatttgaattggtccctcctattatagtattgaaattaagtctacttaatttatcaagtcatgttcatgccctgcggggggggcccccccctttttta

SEQ ID NO: 451331 - DNA, 2774 bp, Homo sapiens
actacatacttccggactacatacttccgaaagacgatcaatcaaattcgtcaagatgcagtaaaagatctaggggtgtttattcctgctcctatggctcaagggatgagaagtgacttctttctggagggaccgttcatgccacccaggatgaaaatggatagggacccacttggaggacttgctgatatgtttggacaaatgccaggtagcggaattggtactggtccaggagttatccaggatagattttcacccaccatgggacgtcatcgttcaaatcaactcttcaatggccatgggggacacatcatgcctcccacacaatcgcagtttggagagatgggaggcaagtttatgaaaagccaggggctaagccagctctaccataaccagagtcagggactcttatcccagctgcaaggacagtcgaaggatatgccacctcggttttctaagaaaggacagcttaatgcagatgagattagcctgaggcctgctcagtcgttcctaatgaataaaaatcaagtgccaaagcttcagccccagataactatgattcctcctagtgcacaaccaccacgcactcaaacaccacctctgggacagacacctcagcttggtctcaaaactaatccaccacttatccaggaaaagcctgccaagaccagcaaaaagccaccaccgtcaaaggaagaactccttaaactaactgaaactgttgtgactgaatatctaaatagtggaaatgcaaatgaggctgtcaatggtgtaagagaaatgagggctcctaaacactttcttcctgagatgttaagcaaagtaatcatcctgtcactagatagaagcgatgaagataaagaaaaagcaagttctttgatcagtttactcaaacaggaagggatagccacaagtgacaacttcatgcaggctttcctgaatgtattggaccagtgtcccaaactggaggttgacatccctttggtgaaatcctatttagcacagtttgcagctcgtgccatcatttcagagctggtgagcatttcagaactagctcaaccactagaaagtggcacccattttcctctcttcctactttgtcttcagcagttagctaaattacaagatcgagaatggttaacagaactttttcaacaaagcaaggtcaatatgcagaaaatgctcccagaaattgatcagaataaggaccgcatgttggagattttggaaggaaagggactgagtttcttattcccactcctcaaattggagaaggaactgttgaagcaaataaagttggatccatcccctcaaaccatatataaatggattaaagataacatctctcccaaacttcatgtagataaaggatttgtgaacatcttaatgactagcttcttacagtacatttctagtgaagtaaacccccccagcgatgaaacagattcatcctctgctccttccaaagaacagttagagcaggaaaaacaactactactatctttcaagccagtaatgcagaaatttcttcatgatcacgttgatctacaagtcagtgccctgtatgctctccaggtgcactgctataacagcaacttcccaaaaggcatgttacttcgcttttttgtgcacttctatgacatggaaattattgaagaagaagctttcttggcttggaaagaagatataacccaagagtttccgggaaaaggcaaggctttgttccagggtaagtcttttgttaaaaatttggtctgcttacttcagtttgcttggtattaacttcaagttaagagcctttttcaactgaaatacaggcaaggtagtcctagttagtagtttgtcttcacctgtacatttcattctgcactatttgaagctatgattaagtaaagctacacaatgaatcaattctagtggtgtataagatgttagaggtagctaacttttcaaggagtatagctacttatatacatgggagtgactgtacaagtttcgatttaagcttttttaaaaacatcagtaaagaggaaattgtagctgggcacgtggctcatgcctgtaatcctagcactttaagaggctgaggtgggaggatcacttgagctcaggagttcaagaccagcctgggcagcatagtgaaaccctgtctctaaaaaatacaaaaaattagccagacgtggtgacatgttctgtggtcctggtcccagctactcgggaggatgtcttgagcccaggaggcagaggttgcagtgagctgagatcacaccactgcactctagtctgggcaacagagtgagactgtgtctcaaaaaaagaaaaaaagtttaaatactatatatttttctaaaaagaggagatgtttctgatttctcacaatttgatttttcttattgaatgaacttgtagccctaggggaagaacatcagggcattctctcaaatcacctgaagagcagtttaaaaagcaggttccaggcctattcctagagattctggtttagtaggtctgtggtacaaaatccaggtgattctttctcatgctactagttttccagggggcccaggcttgagaaacattggtcctgcagcatcttcctacctttttattgctgatgataaacaagattcacgaggatcatccttgcaggattaaatctttagctctgtgttgtcccaaatctggataatataccactgttcgttaacttaatatacaaattgttggtagggatatccttgtttcatattctaaaactgtgtagtaccacctaa

SEQ ID NO: 451332 - DNA, 1411 bp, Homo sapiens
actacatacttccggactacatacttccgaaagacgatcaatcaaattcgtcaagatgcagtaaaagatctaggggtgtttattcctgctcctatggctcaagggatgagaagtgacttctttctggagggaccgttcatgccacccaggatgaaaatggatagggacccacttggaggacttgctgatatgtttggacaaatgccaggtagcggaattggtactggtccaggagttatccaggatagattttcacccaccatgggacgtcatcgttcaaatcaactcttcaatggccatgggggacacatcatgcctcccacacaatcgcagtttggagagatgggaggcaagtttatgaaaagccaggggctaagccagctctaccataaccagagtcagggactcttatcccagctgcaaggacagtcgaaggatatgccacctcggttttctaagaaaggacagcttaatgcagatgagattagcctgaggcctgctcagtcgttcctaatgaataaaaatcaagtgccaaagcttcagccccagataactatgattcctcctagtgcacaaccaccacgcactcaaacaccacctctgggacagacacctcagcttggtctcaaaactaatccaccacttatccaggaaaagcctgccaagaccagcaaaaagccaccaccgtcaaaggaagaactccttaaactaactgaaactgttgtgactgaatatctaaatagtggaaatgcaaatgaggctgtcaatggtgtaagagaaatgagggctcctaaacactttcttcctgagatgttaagcaaagtaatcatcctgtcactagatagaagcgatgaagataaagaaaaagcaagttctttgatcagtttactcaaacaggaagggatagccacaagtgacaacttcatgcaggctttcctgaatgtattggaccagtgtcccaaactggaggttgacatccctttggtgaaatcctatttagcacagtttgcagctcgtgccatcatttcagagctggtgagcatttcagaactagctcaaccactagaaagtggcacccattttcctctcttcctactttgtcttcagcagttagctaaattacaagatcgagaatggttaacagaactttttcaacaaagcaaggtcaatatgcagaaaatgctcccagaaattgatcagaataaggaccgcatgttggagattttggaaggaaagggactgagtttcttattcccactcctcaaattggagaaggaactgttgaagcaaataaagttggatccatcccctcaaaccatatataaatggattaaagagaggcccaagaaagaaattaaaaagaagaggtggaaccgtcccaaaatgtcccttgctcagattaaggatagag

SEQ ID NO: 451333 - DNA, 1307 bp, Homo sapiens
actacatacttccggactacatacttccgaaagacgatcaatcaaattcgtcaagatgcagtaaaagatctaggggtgtttattcctgctcctatggctcaagggatgagaagtgacttctttctggagggaccgttcatgccacccaggatgaaaatggatagggacccacttggaggacttgctgatatgtttggacaaatgccaggtagcggaattggtactggtccaggagttatccaggatagattttcacccaccatgggacgtcatcgttcaaatcaactcttcaatggccatgggggacacatcatgcctcccacacaatcgcagtttggagagatgggaggcaagtttatgaaaagccaggggctaagccagctctaccataaccagagtcagggactcttatcccagctgcaaggacagtcgaaggatatgccacctcggttttctaagaaaggacagcttaatgcagatgagattagcctgaggcctgctcagtcgttcctaatgaataaaaatcaagtgccaaagcttcagccccagataactatgattcctcctagtgcacaaccaccacgcactcaaacaccacctctgggacagacacctcagcttggtctcaaaactaatccaccacttatccaggaaaagcctgccaagaccagcaaaaagccaccaccgtcaaaggaagaactccttaaactaactgaaactgttgtgactgaatggtcgtcgaagttgcttcgacggaccattcaccaagcaactccatccctagctatagatacccaggaaaataagtatgtatcttcacagaaataattgtatgagaatattcatagttacttatgcacagtagttatcaagtaaacctgtctcccatcagaaaaatggatataaaattgtgtgataatcatacactcaataggatattacttggccaaaacaaaatgaaacaagggaaaaacacaatcaaacaaattagtggcatatatacccacctgagtaaagagaagtcggccgtgagccaccatgcccggcctcttttttatatttaaaaaatatcattttatatattaccagggcaaaagagaaaactcgtatgattacgtggtcatacacagtaaaagcatttggcaaaatggaaaacttttttcatgatttataaaaacaaaccccagaaaatgctcagcatgatgagaacagaaggcacacttccaaccccattaagggcagatttgaagaaccacaggtacatttattaatggctaagatgatgcgtcgcggggatctcagatcgc

SEQ ID NO: 451334 - DNA, 668 bp, Homo sapiens
actacatacttccggactacatacttccgaaagacgatcaatcaaattcgtcaagatgcagtaaaagatctaggggtgtttattcctgctcctatggctcaagggatgagaagtgacttctttctggagggaccgttcatgccacccaggatgaaaatggatagggacccacttggaggacttgctgatatgtttggacaaatgccaggtagcggaattggtactggtccaggagttatccaggatagattttcacccaccatgggacgtcatcgttcaaatcaactcttcaatggccatgggggacacatcatgcctcccacacaatcgcagtttggagagatgggaggcaagtttatgaaaagccaggggctaagccagctctaccataaccagagtcagggactcttatcccagctgcaaggacagtcgaaggatatgccacctcggttttctaagaaaggacagcttaatgcagatgagattagcctgaggcctgctcagtcgttcctaatgaataaaaatcaagtgccaaagcttcagccccagataactatgattcctcctagtgcacaaccaccacgcactcaaacaccacctctgggacagacacctcagcttggtgcgaatatctaatccccagtgaatccaggtttggcggggataca

SEQ ID NO: 451335 - DNA, 590 bp, Homo sapiens
actacatacttccggactacatacttccgaaagacgatcaatcaaattcgtcaagatgcagtaaaagatctaggggtgtttattcctgctcctatggctcaagggatgagaagtgacttctttctggagggaccgttcatgccacccaggatgaaaatggatagggacccacttggaggacttgctgatatgtttggacaaatgccaggtagcggaattggtactggtccaggagttatccaggatagattttcacccaccatgggacgtcatcgttcaaatcaactcttcaatggccatgggggacacatcatgcctcccacacaatcgcagtttggagagatgggaggcaagtttatgaaaagccaggggctaagccagctctaccataaccagagtcagggactcttatcccagctgcaaggacagtcgaaggatatgccacctcggttttctaagaaaggacagcttaatgcagatgagattagcctgaggcctgctcagtcgttcctaatgaataaaaatcaagtgccaaagcttcagccccagataactatgattccgtcactgcggggtcctctagagtcggc

SEQ ID NO: 451336 - DNA, 3834 bp, Homo sapiens
  misc_feature (3106)..(3106): n is a, c, g, or t
cccggcgtctagagcggcggcggctggctagggctgcggcgcgcgtggagggttcgctgctggtttgccgccgggtcgggctccgtgggccggggcaggaggaccagcacctgaggccgggccgcaggccgacttcacagccaggcgcgcgcgtcgctgctgctgctgcggggctctggcgcgccagccggcgggacagcgggggctggcgggggccggggagcgccagatgatggatttggacatgcttctatgaagaaatgccacatggtccgagagcaaacatgtccaggctactcactttagtgactagggctcggtgccagcacttcccgggtaatcagacgtggtctgaccgaggatcaagaagcacatcatcaccaatgacatcatgacagcaagagagcacagccctcgccatggtgccagggcccgtgcaatgcagcgggcttccaccatcgacgtggcggccgacatgctgggcctctctctggcaggaaatatacaagacccagatgagcccattttagaatttagcttagcttgcagtgagctgcatactccatcgctagatcgaaagccaaatagttttgttgcggtgagtgtcaccacccctcctcaggcattctggacgaagcatgcacagacggagatcattgagggaaccaacaatcctatatttctaagcagtattgccttctttcaagactctcttatcaatcagatgacacaagtcaaactctccgtgtatgatgtcaaagatagatctcagggaacaatgtatttactgggctctggaacgttcattgtcaaagatctgctccaggacaggcatcataggttgcatttaacactaaggtctgcagagagtgaccgtgtaggtaacatcaccgtgattggctggcagatggaggagaagtcagaccaacggccccctgtgacccggtctgtggacactgtcaatgggaggatggttcttcctgtcgatgagagcttgacggaggcgttaggaatccgatccaaatacgcttcattgcgaaaggacactttgctgaaatcggtgttcggtggtgccatctgccgcatgtaccggtttccaaccactgatggtaaccatttgcggatcctggagcagatggcagagagcgtgctctccctgcacgtgccccggcagttcgtgaagctcctactagaggaagatgcagccagagtgtgtgagctggaggagctgggagagctgtccccttgctgggagagcctccggcgccaaattgtcacccagtaccagaccatcatcctcacataccaggagaacctgaccgacctccatcagtacagagggccctcgtttaaagcaagcagtttgaaagcagataaaaagttagaatttgttcccacaaacttgcacatacaaaggatgagagttcaagacgatggaggatcagatcagaactacgacatcgtcaccattggggcgccagcagcacactgccaaggttttaagtcaggaggtctccgcaaaaagctgcacaaatttgaagagaccaagaaacattttgaggagtgttgtacatcatctggctgccagtccataatctacataccccaggatgttgtcagagccaaggagatcatcgcccagatcaacaccctgaaaacccaagtgagttactacgcagagcggctgtcaagggcagccaaggacaggtctgccactggccttgagaggacactcgccatcttggcagacaagacacggcagctggtcacggtctgcgactgcaagctcctggccaactccatccatgggctgaacgctgcacggcctgactacattgcctccaaggcctctcccacttcgactgaggaggagcaggtgatgcttagaaatgaccaggacaccctcatggcccggtggacagggagaaacagccgatcttccctgcaggtggactggcacgaggaggagtgggagaaagtgtggctgaacgtggacaagagcctagagtgcatcattcagcgtgtggacaagctgctgcagaaggagcggctgcatggcgagggctgtgaggatgtcttcccctgtgcaggcagctgcaccagcaagaaagattgcagtccccctcctgaagagtccagcccaggtgaatggagtgaggccctttacccgctgctgaccactctcaccgactgcgtggccatgatgagtgacaaggccaagaaggccatggtattcctgctcatgcaggacagcgcgcccaccatagccacctacctgagcctgcagtaccgccgtgacgtggtcttctgccagacgctgaccgccctcatctgcggcttcatcattaagctgaggaactgcctgcatgacgacggcttcctgcgccagctctacaccatcgggctgctggcccagttcgagagcctgctgagcacctacggggaggagctggcaatgctggaggacatgagccttgggatcatggacttgaggaacgtgaccttcaaagtcactcaggccacttccagcgcctccgcagacatgctgcccgtcatcacaggaaatcgcgacgggtttaacgtgcgggtccctctgccgggcccgctgtttgacgccttgccccgggagatccagagtggcatgctgctgcgagtgcagcccgtcctcttcaacgtgggcatcaatgagcagcagacactggccgagaggtttggcgatacgtctttacaagaagtcatcaacgtggagagtttggtgcggttaaattcctactttgagcagtttaaggaagttttgcctgaggattgcctgcctcggtctcgcagtcagacgtgcctgccagagctgctgcggtttctgggtcagaacgtgcatgcccggaagaataagaacgtcgacattctctggcaagctgctgagatctgccgccgccttaatggggtccggttcaccagctgcaagagcgctaaggaccgtacagccatgtcggtgacactggagcagtgcctgatcctgcaacacgagcatggcatggccccgcaggtcttcacccaggccctggagtgcatgcgcagcattggaacacgggaggtagtcacccagaanaacttgagcggcctggtgcccatccgagacttaaggctagaccccagcctcctctgttccatccctttattagctctgagccccaatttactgattgtgtggctctttctgagcatagcatacctggtgaccaaattgcgttgcaaatgaatatcattatgaaaaattaataagtcacaagaaaaacaaaagtgccagaacatgtccagccaccgtgtacctaactggacagaaggaatgtgtcaaaccgtggtctgccaagaaatatttcatgccttacattttgacgttttgttcttctgaactgtaaatatctgccaaattatttcaccaagaagacttgtttgtttagctcctgtagcatcttcagtgcttgtaacatgttcttacggtgccctgtcactgcatcgtttagctggcctggaattccttgtaccacgtctctaccttctgatgtacaactatttatcacctgtacctctcatgtgccctgtttccaagagaaacgagttctgtttaaagagaatttgtatatttgatactattctttaagtgtactgctaacccttcctttccttttgatgacaaacgaaaagaaaaaaacatgctttataactggcttatctagaaaaacctatctaataggacatgtactttctgctttcatttcaaagcgtagtccctgaattacagtagcaaacagtttgcagaatcctaccatttccttg

SEQ ID NO: 451337 - DNA, 1853 bp, Homo sapiens
  misc_feature (1125)..(1125): n is a, c, g, or t
ctggggtgttcctgtccccagtcctggggctgaacccctcgaagtaggccttcctgagtagccacagggccccgccagcctctcctggcagggaatgtggcagtgggtcggtgctccgcagcttgggaattgtgccctctcagaatggcacattccagcagggccatgggggcttcggggctcctctgggagagctggggagggctctgtgtgaagaggaaccctgggcctcctgcctccccatctccaagtggagccttcacaggctgcctgctgtgtcctcaggcctctgattctgtgtcactgctgccacttggcagacataaatgtgcttccagagtcatgtggttctaggtaccatctcacctcagtgcagttcttctgtagcaccaaaagggggaagaagccccaaatttctagtgtggtattgtttggattccacccttggggatgctttcagaaccctaacttgcaaagatggaaacagcagtcgctcatgcctgccactgctgagcctggaacccgaggcggggctggtgggggctctgcgcttggttggttggtacctgaggtaaatggtttttgtttgcgtggttgatcaagaggcagctttggccaaatcctttgtaccaccccctgctcaggcatctgtgagaaggtcaaatccccaatggttcttcatgttccgcttgcttctcagaaatccctgtctgtgcagcatgtgggggcatggccgggcagcatggagttgtgcttggccagccgagagagtgaacatggaaaaccattcgttcaacctacatgtgtttattttcagtagattgcagtattttttcttattttcacttctctttctctccttttttcctgtaactgtgctggttttgttttggtcttcctctcatacccgtttctgcatttcatcttttctttctattgtgacttcatttcatttttttttaaccttatcttttgtttctcttgtttatcccatcctttttgataaaatccatcgcatgtgtcttctttttttctttattttctttcctttcctttttcctttttctttctcccaaactttttccttttcacagcattggaacacgggaggtagtcacccagaanaacttgagcggcctggtgcccatccgagacttaaggctagaccccagcctcctctgttccatccctttattagctctgagccccaatttactgattgtgtggctctttctgagcatagcatacctggtgaccaaattgcgttgcaaatgaatatcattatgaaaaattaataagtcacaagaaaaacaaaagtgccagaacatgtccagccaccgtgtacctaactggacagaaggaatgtgtcaaaccgtggtctgccaagaaatatttcatgccttacattttgacgttttgttcttctgaactgtaaatatctgccaaattatttcaccaagaagacttgtttgtttagctcctgtagcatcttcagtgcttgtaacatgttcttacggtgccctgtcactgcatcgtttagctggcctggaattccttgtaccacgtctctaccttctgatgtacaactatttatcacctgtacctctcatgtgccctgtttccaagagaaacgagttctgtttaaagagaatttgtatatttgatactattctttaagtgtactgctaacccttcctttccttttgatgacaaacgaaaagaaaaaaacatgctttataactggcttatctagaaaaacctatctaataggacatgtactttctgctttcatttcaaagcgtagtccctgaattacagtagcaaacagtttgcagaatcctaccatttccttg

SEQ ID NO: 451338 - DNA, 6648 bp, Homo sapiens
cccggcgtctagagcggcggcggctggctagggctgcggcgcgcgtggagggttcgctgctggtttgccgccgggtcgggctccgtgggccggggcaggaggaccagcacctgaggccgggccgcaggccgacttcacagccaggcgcgcgcgtcgctgctgctgctgcggggctctggcgcgccagccggcgggacagcgggggctggcgggggccggggagcgccagatgatggatttggacatgcttctatgaagaaatgccacatggtccgagagcaaacatgtccaggctactcactttagtgactagggctcggtgccagcacttcccgggtaatcagacgtggtctgaccgaggatcaagaagcacatcatcaccaatgacatcatgacagcaagagagcacagccctcgccatggtgccagggcccgtgcaatgcagcgggcttccaccatcgacgtggcggccgacatgctgggcctctctctggcaggaaatatacaagacccagatgagcccattttagaatttagcttagcttgcagtgagctgcatactccatcgctagatcgaaagccaaatagttttgttgcggtgagtgtcaccacccctcctcaggcattctggacgaagcatgcacagacggagatcattgagggaaccaacaatcctatatttctaagcagtattgccttctttcaagactctcttatcaatcagatgacacaagtcaaactctccgtgtatgatgtcaaagatagatctcagggaacaatgtatttactgggctctggaacgttcattgtcaaagatctgctccaggacaggcatcataggttgcatttaacactaaggtctgcagagagtgaccgtgtaggtaacatcaccgtgattggctggcagatggaggagaagtcagaccaacggccccctgtgacccggtctgtggacactgtcaatgggaggatggttcttcctgtcgatgagagcttgacggaggcgttaggaatccgatccaaatacgcttcattgcgaaaggacactttgctgaaatcggtgttcggtggtgccatctgccgcatgtaccggtttccaaccactgatggtaaccatttgcggatcctggagcagatggcagagagcgtgctctccctgcacgtgccccggcagttcgtgaagctcctactagaggaagatgcagccagagtgtgtgagctggaggagctgggagagctgtccccttgctgggagagcctccggcgccaaattgtcacccagtaccagaccatcatcctcacataccaggagaacctgaccgacctccatcagtacagagggccctcgtttaaagcaagcagtttgaaagcagataaaaagttagaatttgttcccacaaacttgcacatacaaaggatgagagttcaagacgatggaggatcagatcagaactacgacatcgtcaccattggggcgccagcagcacactgccaaggttttaagtcaggaggtctccgcaaaaagctgcacaaatttgaagagaccaagaaacattttgaggagtgttgtacatcatctggctgccagtccataatctacataccccaggatgttgtcagagccaaggagatcatcgcccagatcaacaccctgaaaacccaagtgagttactacgcagagcggctgtcaagggcagccaaggacaggtctgccactggccttgagaggacactcgccatcttggcagacaagacacggcagctggtcacggtctgcgactgcaagctcctggccaactccatccatgggctgaacgctgcacggcctgactacattgcctccaaggcctctcccacttcgactgaggaggagcaggtgatgcttagaaatgaccaggacaccctcatggcccggtggacagggagaaacagccgatcttccctgcaggtggactggcacgaggaggagtgggagaaagtgtggctgaacgtggacaagagcctagagtgcatcattcagcgtgtggacaagctgctgcagaaggagcggctgcatggcgagggctgtgaggatgtcttcccctgtgcaggcagctgcaccagcaagaaagattgcagtccccctcctgaagagtccagcccaggtgaatggagtgaggccctttacccgctgctgaccactctcaccgactgcgtggccatgatgagtgacaaggccaagaaggccatggtattcctgctcatgcaggacagcgcgcccaccatagccacctacctgagcctgcagtaccgccgtgacgtggtcttctgccagacgctgaccgccctcatctgcggcttcatcattaagctgaggaactgcctgcatgacgacggcttcctgcgccagctctacaccatcgggctgctggcccagttcgagagcctgctgagcacctacggggaggagctggcaatgctggaggacatgagccttgggatcatggacttgaggaacgtgaccttcaaagtcactcaggccacttccagcgcctccgcagacatgctgcccgtcatcacaggaaatcgcgacgggtttaacgtgcgggtccctctgccgggcccgctgtttgacgccttgccccgggagatccagagtggcatgctgctgcgagtgcagcccgtcctcttcaacgtgggcatcaatgagcagcagacactggccgagaggtttggcgatacgtctttacaagaagtcatcaacgtggagagtttggtgcggttaaattcctactttgagcagtttaaggaagttttgcctgaggattgcctgcctcggtctcgcagtcagacgtgcctgccagagctgctgcggtttctgggtcagaacgtgcatgcccggaagaataagaacgtcgacattctctggcaagctgctgagatctgccgccgccttaatggggtccggttcaccagctgcaagagcgctaaggaccgtacagccatgtcggtgacactggagcagtgcctgatcctgcaacacgagcatggcatggccccgcaggtcttcacccaggccctggagtgcatgcgcagtgagggttgtcgaagagaaaatacaatgaagaatgttggaagtcgcaaatatgcatttaattccctgcagctgaaggctttccccaagcattacaggcctcccgaagggacttacggaaaagttgaaacgtgaacacacggtttcctctaattagctgttacataataaatgtgggtaccctctagtgtcatatatgaattcttcaagaagacctgaaggattggtttttattttttgtggtttttttaaaaaaaacatttcactaaagagtctctggagcatgttttttgttttttgggtttttttccccattggaatcaataggaggtaatgtttggctcaatagtgtggatagtaacaactgcctatttaaattaaatagcctttggctgtaactacacagatctcatcaatagttacctacatgaatcaagctaggtttgtctgaaatgctagaagactttttcaaatgcctgcttgctcacttacttttctacagagtaactcaaaagtaaccattgaattacaatccactttgtaaaaatctgaatgtaaaacagtaaataataaattaaataattggatcctaggcataccaataaatgttatttggggaaagaagctagcactatctcatgcagtgagaataacgggttctagtgaattatcctatctacactaccacctgaagaagttgaaagaaagattgataaatcaacgggagataagactttattagaaggtaacacctgcaaggtaccccacatagttggggccactcttttttctgtcccttatgagttacagaacagggagtctgctggagacacaaagccagcagtaaggtccctttagcctgtctcctgttctctgaagctccctgccgaggctccctcacgcccagaggacacatctccccttcttctctagatgttaatgtagggcctcagatgtggcatgtcaacactcccatggggaatttatgaccatagagatagtagaaacctaaatattttcagaaaaaaaattttttttgcaggatttccaatttatctttgaaaagacagtacaatcatgtttgaatgtctgatggaaagtgtctttattttttagggtttgcaataattgttactttcttattctcattcttatgtaagatgactattgagaaacagttgaaatttattctcctcaaatgagattttgaaagggatttatgggccataaaacttaggaatttcatagaaaattttgtctggtcatcttttataagatgatgatgagtcttatctgcacatagcagagtttgtttcttaggagtttatatgttttattgattctgtttacgatgtttacatgttcttgaaaaggttgtaaaagaaatacatatggcacatattaatgatgctgatcctaatgatttgtgaacctcttagaaattcttttgtctaaaagcctagagattcttctggttcctttagaaacatgtaacaaacttgggccaggggtgctgaggcatggggaggactgcttattggcaggaacacagagggggtgggcatcaggtagggtggaactggatgaccttccagaccccctcctactcagaagtcagcatgcaagcagcgcctgctgtctcccgatgcctgcagggaggaaaatgtctgtgaaggacactttaatgaaggacgaagctctctgctgctccctcaaagctgagttcactgtggcaggcaggaagcagagaagctcctgcccgccaaacccactgcacaggtggctgctgctggtatcagattctcctttttaagtgtcaatttctgttcacagacagtttgttttcaatatggctgatttaccctttcacctctccaccatctcatttaatttgtaaatttttagttctgtcttttctcattttaacttttaaaaaatctccttgctttttaaaaataaatattacccacatagttttcagatcttttttgtctggagagcattaaatatctgcactcatcaaagggaatatagcaaatgttgatcatctgtcagcagttttgcatgtgacacctttatatgaattattttcccaatttttgctctatgtaatgggtcaccataaaactgtaagacttggcaaatgctatagaaaaggttcaggtttcagtattctctctgaaggcatcattcctgggcttccggcagcatcacacgcttccagtgcctgcagggtgagggtgtgtggcacagaggcaagcagctcctctcttctgtaggagctttgggttttcagaggtgcagggaaggcagttttacaggttaccgtaaaacagaggttccgtccagtgttccttatgatgcctccccatttaaaaagaaaagagatctatggaaaactgggaatgtaatgtggattctgtcagagctcctacagagcacagttgcctttagtttcctttaaagatgtaaaaatattgtataatacagttttgtccctacacaattgtatttgccaagcttagtgcattatgatacctttatttatttgttttgggcagtattactatatatatataaacatacagttactgttttatatattcttaggtcattcaaagccatgtatgctgtaaatgtgctagtctttagaatgacacataataaataactgacaagatattaaatgtggtcttgcctgattcatcctattaggaggactagttctatgtgaccagcctgtgactggaccattgttcttgggcattgcattgagtgctcgggtgctgaatacatgtttgtaaacatgggaccatgggagacttccattttataagcttgtttctgcctaatttgaagcagaggggcaacagcgttgaggttaagagcacggactttgggagcacacagaccaggtcccaatcctggttctgcccctgactggctggtgactctgagcaagttgcttgacctctccaagcctccgtttcctcatgtgcaaagtgtggacaacaacagtaccttcctcataaggaacgtgcgacgcgcctcagaagtacgtgttcataaatggtagccattgttgttaccttcccgtctgtgaacatggatcacatcatctctgtgggtaacccagtcctcgttgtatgacttgtcaaaatgcagttccacttgtattaatattgaccctgttcatcgtcaccaggactgcatcttgcaccactgtgccgtcttctaggcacacacgacccgttatctcccttggaaaaattcctctcactggaaatgtacaattaaaggatgattgaaatgtttaactcttggagtttttagtattaccaaactcctagaaatttaagctaccaccaaaaataacatgtgccttttccctttattctcattgatggtagcagtgcacctcgtttcagtgtcctgattccttgattactgtgaacactgaacatcttttatacctttatgatatttctatgtttgtgacttcattggaatgttgatctatttcatatagattgtttttaatatacaatgtattagcccctgtcatatgttgcaca

SEQ ID NO: 451339 - DNA, 6506 bp, Homo sapiens
cccggcgtctagagcggcggcggctggctagggctgcggcgcgcgtggagggttcgctgctggtttgccgccgggtcgggctccgtgggccggggcaggaggaccagcacctgaggccgggccgcaggccgacttcacagccaggcgcgcgcgtcgctgctgctgctgcggggctctggcgcgccagccggcgggacagcgggggctggcgggggccggggagcgccagatgatggatttggacatgcttctatgaagaaatgccacatggtccgagagcaaacatgtccaggctactcactttagtgactagggctcggtgccagcacttcccgggtaatcagacgtggtctgaccgaggatcaagaagcacatcatcaccaatgacatcatgacagcaagagagcacagccctcgccatggtgccagggcccgtgcaatgcagcgggcttccaccatcgacgtggcggccgacatgctgggcctctctctggcaggaaatatacaagacccagatgagcccattttagaatttagcttagcttgcagtgagctgcatactccatcgctagatcgaaagccaaatagttttgttgcggtgagtgtcaccacccctcctcaggcattctggacgaagcatgcacagacggagatcattgagggaaccaacaatcctatatttctaagcagtattgccttctttcaagactctcttatcaatcagatgacacaagtcaaactctccgtgtatgatgtcaaagatagatctcagggaacaatgtatttactgggctctggaacgttcattgtcaaagatctgctccaggacaggcatcataggttgcatttaacactaaggtctgcagagagtgaccgtgtaggtaacatcaccgtgattggctggcagatggaggagaagtcagaccaacggccccctgtgacccggtctgtggacactgtcaatgggaggatggttcttcctgtcgatgagagcttgacggaggcgttaggaatccgatccaaatacgcttcattgcgaaaggacactttgctgaaatcggtgttcggtggtgccatctgccgcatgtaccggtttccaaccactgatggtaaccatttgcggatcctggagcagatggcagagagcgtgctctccctgcacgtgccccggcagttcgtgaagctcctactagaggaagatgcagccagagtgtgtgagctggaggagctgggagagctgtccccttgctgggagagcctccggcgccaaattgtcacccagtaccagaccatcatcctcacataccaggagaacctgaccgacctccatcagtacagagggccctcgtttaaagcaagcagtttgaaagcagataaaaagttagaatttgttcccacaaacttgcacatacaaaggatgagagttcaagacgatggaggatcagatcagaactacgacatcgtcaccattggggcgccagcagcacactgccaaggttttaagtcaggaggtctccgcaaaaagctgcacaaatttgaagagaccaagaaacattttgaggagtgttgtacatcatctggctgccagtccataatctacataccccaggatgttgtcagagccaaggagatcatcgcccagatcaacaccctgaaaacccaagtgagttactacgcagagcggctgtcaagggcagccaaggacaggtctgccactggccttgagaggacactcgccatcttggcagacaagacacggcagctggtcacggtctgcgactgcaagctcctggccaactccatccatgggctgaacgctgcacggcctgactacattgcctccaaggcctctcccacttcgactgaggaggagcaggtgatgcttagaaatgaccaggacaccctcatggcccggtggacagggagaaacagccgatcttccctgcaggtggactggcacgaggaggagtgggagaaagtgtggctgaacgtggacaagagcctagagtgcatcattcagcgtgtggacaagctgctgcagaaggagcggctgcatggcgagggctgtgaggatgtcttcccctgtgcaggcagctgcaccagcaagaaaggtaacccggacagccacgcctactggatcagaccagaagaccccttctgtgatgtcccctcctcaccatgcccctccaccatgccctccactgcatgccatcctcatctgaccacacattgcagtccccctcctgaagagtccagcccaggtgaatggagtgaggccctttacccgctgctgaccactctcaccgactgcgtggccatgatgagtgacaaggccaagaaggccatggtattcctgctcatgcaggacagcgcgcccaccatagccacctacctgagcctgcagtaccgccgtgacgtggtcttctgccagacgctgaccgccctcatctgcggcttcatcattaagctgaggaactgcctgcatgacgacggcttcctgcgccagctctacaccatcgggctgctggcccagttcgagagcctgctgagcacctacggggaggagctggcaatgctggaggacatgagccttgggatcatggacttgaggaacgtgaccttcaaagtcactcaggccacttccagcgcctccgcagacatgctgcccgtcatcacaggaaatcgcgacgggtttaacgtgcgggtccctctgccgggcccgctgtttgacgccttgccccgggagatccagagtggcatgctgctgcgagtgcagcccgtcctcttcaacgtgggcatcaatgagcagcagacactggccgagaggtttggcgatacgtctttacaagaagtcatcaacgtggagagtttggtgcggttaaattcctactttgagcagtttaaggaagttttgcctgaggattgcctgcctcggtctcgcagtcagacgtgcctgccagagctgctgcggtttctgggtcagaacgtgcatgcccggaagaataagaacgtcgacattctctggcaagctgctgagatctgccgccgccttaatggggtccggttcaccagctgcaagagcgctaaggaccgtacagccatgtcggtgacactggagcagtgcctgatcctgcaacacgagcatggcatggccccgcaggtcttcacccaggccctggagtgcatgcgcagtgagggttgtcgaagagaaaatacaatgaagaatgttggaagtcgcaaatatgcatttaattccctgcagctgaaggctttccccaagcattacaggcctcccgaagggacttacggaaaagttgaaacgtgaacacacggtttcctctaattagctgttacataataaatgtgggtaccctctagtgtcatatatgaattcttcaagaagacctgaaggattggtttttattttttgtggtttttttaaaaaaaacatttcactaaagagtctctggagcatgttttttgttttttgggtttttttccccattggaatcaataggaggtaatgtttggctcaatagtgtggatagtaacaactgcctatttaaattaaatagcctttggctgtaactacacagatctcatcaatagttacctacatgaatcaagctaggtttgtctgaaatgctagaagactttttcaaatgcctgcttgctcacttacttttctacagagtaactcaaaagtaaccattgaattacaatccactttgtaaaaatctgaatgtaaaacagtaaataataaattaaataattggatcctaggcataccaataaatgttatttggggaaagaagctagcactatctcatgcagtgagaataacgggttctagtgaattatcctatctacactaccacctgaagaagttgaaagaaagattgataaatcaacgggagataagactttattagaaggtaacacctgcaaggtaccccacatagttggggccactcttttttctgtcccttatgagttacagaacagggagtctgctggagacacaaagccagcagtaaggtccctttagcctgtctcctgttctctgaagctccctgccgaggctccctcacgcccagaggacacatctccccttcttctctagatgttaatgtagggcctcagatgtggcatgtcaacactcccatggggaatttatgaccatagagatagtagaaacctaaatattttcagaaaaaaaattttttttgcaggatttccaatttatctttgaaaagacagtacaatcatgtttgaatgtctgatggaaagtgtctttattttttagggtttgcaataattgttactttcttattctcattcttatgtaagatgactattgagaaacagttgaaatttattctcctcaaatgagattttgaaagggatttatgggccataaaacttaggaatttcatagaaaattttgtctggtcatcttttataagatgatgatgagtcttatctgcacatagcagagtttgtttcttaggagtttatatgttttattgattctgtttacgatgtttacatgttcttgaaaaggttgtaaaagaaatacatatggcacatattaatgatgctgatcctaatgatttgtgaacctcttagaaattcttttgtctaaaagcctagagattcttctggttcctttagaaacatgtaacaaacttgggccaggggtgctgaggcatggggaggactgcttattggcaggaacacagagggggtgggcatcaggtagggtggaactggatgaccttccagaccccctcctactcagaagtcagcatgcaagcagcgcctgctgtctcccgatgcctgcagggaggaaaatgtctgtgaaggacactttaatgaaggacgaagctctctgctgctccctcaaagctgagttcactgtggcaggcaggaagcagagaagctcctgcccgccaaacccactgcacaggtggctgctgctggtatcagattctcctttttaagtgtcaatttctgttcacagacagtttgttttcaatatggctgatttaccctttcacctctccaccatctcatttaatttgtaaatttttagttctgtcttttctcattttaacttttaaaaaatctccttgctttttaaaaataaatattacccacatagttttcagatcttttttgtctggagagcattaaatatctgcactcatcaaagggaatatagcaaatgttgatcatctgtcagcagttttgcatgtgacacctttatatgaattattttcccaatttttgctctatgtaatgggtcaccataaaactgtaagacttggcaaatgctatagaaaaggttcaggtttcagtattctctctgaaggcatcattcctgggcttccggcagcatcacacgcttccagtgcctgcagggtgagggtgtgtggcacagaggcaagcagctcctctcttctgtaggagctttgggttttcagaggtgcagggaaggcagttttacaggttaccgtaaaacagaggttccgtccagtgttccttatgatgcctccccatttaaaaagaaaagagatctatggaaaactgggaatgtaatgtggattctgtcagagctcctacagagcacagttgcctttagtttcctttaaagatgtaaaaatattgtataatacagttttgtccctacacaattgtatttgccaagcttagtgcattatgatacctttatttatttgttttgggcagtattactatatatatataaacatacagttactgttttatatattcttaggtcattcaaagccatgtatgctgtaaatgtgctagtctttagaatgacacataataaataactgacaagatattaaatgtggtcttgcctgattcatcctattaggaggactagttctatgtgaccagcctgtgactggaccattgttcttgggcattgcattgagtgctcgggtgctgaatacatgtttgtaaacatgggaccatgggagacttccattttataagcttgtttctgcctaatttgaagcagaggggcaacagcgttgaggttaagagcacggactttgggagcacacagaccaggtcccaatcctggttctgcccctgactggctggtgactctgagcaagttgcttgacctctccaagcctccgtttcctcatgtgcaaagtgtggacaacaacagtaccttcctcataaggaacgtgcgacgcgcctcagaagtacgtgttcataaatggtagccattgttgttaccttcccgtctgtgaacatggatcacatcatctctgtgggtaacccagtcctcgttgtatgacttgtcaaaatgcagttccacttgtattaatattgaccctgttcatcgtcaccaggactgcatcttgcaccactgtgccgtcttctaggcacacacgacccgttatctcccttggaaaaattcctctcactggaaatgtacaattaaaggatgattgaaatgttta

SEQ ID NO: 451340 - DNA, 5670 bp, Homo sapiens
atgacactaacgtcaaagggtacagtgttgagtagtcataagatagatctcacgcaacaatgtatttactgggctctggaacgttcattgtcaaagatctgctccaggacaggcatcataggttgcatttaacactaaggtctgcagagagtgaccgtgtaggtaacatcaccgtgattggctggcagatggaggagaagtcagaccaacggccccctgtgacccggtctgtggacactgtcaatgggaggatggttcttcctgtcgatgagagcttgacggaggcgttaggaatccgatccaaatacgcttcattgcgaaaggacactttgctgaaatcggtgttcggtggtgccatctgccgcatgtaccggtttccaaccactgatggtaaccatttgcggatcctggagcagatggcagagagcgtgctctccctgcacgtgccccggcagttcgtgaagctcctactagaggaagatgcagccagagtgtgtgagctggaggagctgggagagctgtccccttgctgggagagcctccggcgccaaattgtcacccagtaccagaccatcatcctcacataccaggagaacctgaccgacctccatcagtacagagggccctcgtttaaagcaagcagtttgaaagcagataaaaagttagaatttgttcccacaaacttgcacatacaaaggatgagagttcaagacgatggaggatcagatcagaactacgacatcgtcaccattggggcgccagcagcacactgccaaggttttaagtcaggaggtctccgcaaaaagctgcacaaatttgaagagaccaagaaacattttgaggagtgttgtacatcatctggctgccagtccataatctacataccccaggatgttgtcagagccaaggagatcatcgcccagatcaacaccctgaaaacccaagtgagttactacgcagagcggctgtcaagggcagccaaggacaggtctgccactggccttgagaggacactcgccatcttggcagacaagacacggcagctggtcacggtctgcgactgcaagctcctggccaactccatccatgggctgaacgctgcacggcctgactacattgcctccaaggcctctcccacttcgactgaggaggagcaggtgatgcttagaaatgaccaggacaccctcatggcccggtggacagggagaaacagccgatcttccctgcaggtggactggcacgaggaggagtgggagaaagtgtggctgaacgtggacaagagcctagagtgcatcattcagcgtgtggacaagctgctgcagaaggagcggctgcatggcgagggctgtgaggatgtcttcccctgtgcaggcagctgcaccagcaagaaagattgcagtccccctcctgaagagtccagcccaggtgaatggagtgaggccctttacccgctgctgaccactctcaccgactgcgtggccatgatgagtgacaaggccaagaaggccatggtattcctgctcatgcaggacagcgcgcccaccatagccacctacctgagcctgcagtaccgccgtgacgtggtcttctgccagacgctgaccgccctcatctgcggcttcatcattaagctgaggaactgcctgcatgacgacggcttcctgcgccagctctacaccatcgggctgctggcccagttcgagagcctgctgagcacctacggggaggagctggcaatgctggaggacatgagccttgggatcatggacttgaggaacgtgaccttcaaagtcactcaggccacttccagcgcctccgcagacatgctgcccgtcatcacaggaaatcgcgacgggtttaacgtgcgggtccctctgccgggcccgctgtttgacgccttgccccgggagatccagagtggcatgctgctgcgagtgcagcccgtcctcttcaacgtgggcatcaatgagcagcagacactggccgagaggtttggcgatacgtctttacaagaagtcatcaacgtggagagtttggtgcggttaaattcctactttgagcagtttaaggaagttttgcctgaggattgcctgcctcggtctcgcagtcagacgtgcctgccagagctgctgcggtttctgggtcagaacgtgcatgcccggaagaataagaacgtcgacattctctggcaagctgctgagatctgccgccgccttaatggggtccggttcaccagctgcaagagcgctaaggaccgtacagccatgtcggtgacactggagcagtgcctgatcctgcaacacgagcatggcatggccccgcaggtcttcacccaggccctggagtgcatgcgcagtgagggttgtcgaagagaaaatacaatgaagaatgttggaagtcgcaaatatgcatttaattccctgcagctgaaggctttccccaagcattacaggcctcccgaagggacttacggaaaagttgaaacgtgaacacacggtttcctctaattagctgttacataataaatgtgggtaccctctagtgtcatatatgaattcttcaagaagacctgaaggattggtttttattttttgtggtttttttaaaaaaaacatttcactaaagagtctctggagcatgttttttgttttttgggtttttttccccattggaatcaataggaggtaatgtttggctcaatagtgtggatagtaacaactgcctatttaaattaaatagcctttggctgtaactacacagatctcatcaatagttacctacatgaatcaagctaggtttgtctgaaatgctagaagactttttcaaatgcctgcttgctcacttacttttctacagagtaactcaaaagtaaccattgaattacaatccactttgtaaaaatctgaatgtaaaacagtaaataataaattaaataattggatcctaggcataccaataaatgttatttggggaaagaagctagcactatctcatgcagtgagaataacgggttctagtgaattatcctatctacactaccacctgaagaagttgaaagaaagattgataaatcaacgggagataagactttattagaaggtaacacctgcaaggtaccccacatagttggggccactcttttttctgtcccttatgagttacagaacagggagtctgctggagacacaaagccagcagtaaggtccctttagcctgtctcctgttctctgaagctccctgccgaggctccctcacgcccagaggacacatctccccttcttctctagatgttaatgtagggcctcagatgtggcatgtcaacactcccatggggaatttatgaccatagagatagtagaaacctaaatattttcagaaaaaaaattttttttgcaggatttccaatttatctttgaaaagacagtacaatcatgtttgaatgtctgatggaaagtgtctttattttttagggtttgcaataattgttactttcttattctcattcttatgtaagatgactattgagaaacagttgaaatttattctcctcaaatgagattttgaaagggatttatgggccataaaacttaggaatttcatagaaaattttgtctggtcatcttttataagatgatgatgagtcttatctgcacatagcagagtttgtttcttaggagtttatatgttttattgattctgtttacgatgtttacatgttcttgaaaaggttgtaaaagaaatacatatggcacatattaatgatgctgatcctaatgatttgtgaacctcttagaaattcttttgtctaaaagcctagagattcttctggttcctttagaaacatgtaacaaacttgggccaggggtgctgaggcatggggaggactgcttattggcaggaacacagagggggtgggcatcaggtagggtggaactggatgaccttccagaccccctcctactcagaagtcagcatgcaagcagcgcctgctgtctcccgatgcctgcagggaggaaaatgtctgtgaaggacactttaatgaaggacgaagctctctgctgctccctcaaagctgagttcactgtggcaggcaggaagcagagaagctcctgcccgccaaacccactgcacaggtggctgctgctggtatcagattctcctttttaagtgtcaatttctgttcacagacagtttgttttcaatatggctgatttaccctttcacctctccaccatctcatttaatttgtaaatttttagttctgtcttttctcattttaacttttaaaaaatctccttgctttttaaaaataaatattacccacatagttttcagatcttttttgtctggagagcattaaatatctgcactcatcaaagggaatatagcaaatgttgatcatctgtcagcagttttgcatgtgacacctttatatgaattattttcccaatttttgctctatgtaatgggtcaccataaaactgtaagacttggcaaatgctatagaaaaggttcaggtttcagtattctctctgaaggcatcattcctgggcttccggcagcatcacacgcttccagtgcctgcagggtgagggtgtgtggcacagaggcaagcagctcctctcttctgtaggagctttgggttttcagaggtgcagggaaggcagttttacaggttaccgtaaaacagaggttccgtccagtgttccttatgatgcctccccatttaaaaagaaaagagatctatggaaaactgggaatgtaatgtggattctgtcagagctcctacagagcacagttgcctttagtttcctttaaagatgtaaaaatattgtataatacagttttgtccctacacaattgtatttgccaagcttagtgcattatgatacctttatttatttgttttgggcagtattactatatatatataaacatacagttactgttttatatattcttaggtcattcaaagccatgtatgctgtaaatgtgctagtctttagaatgacacataataaataactgacaagatattaaatgtggtcttgcctgattcatcctattaggaggactagttctatgtgaccagcctgtgactggaccattgttcttgggcattgcattgagtgctcgggtgctgaatacatgtttgtaaacatgggaccatgggagacttccattttataagcttgtttctgcctaatttgaagcagaggggcaacagcgttgaggttaagagcacggactttgggagcacacagaccaggtcccaatcctggttctgcccctgactggctggtgactctgagcaagttgcttgacctctccaagcctccgtttcctcatgtgcaaagtgtggacaacaacagtaccttcctcataaggaacgtgcgacgcgcctcagaagtacgtgttcataaatggtagccattgttgttaccttcccgtctgtgaacatggatcacatcatctctgtgggtaacccagtcctcgttgtatgacttgtcaaaatgcagttccacttgtattaatattgaccctgttcatcgtcaccaggactgcatcttgcaccactgtgccgtcttctaggcacacacgacccgttatctcccttggaaaaattcctctcactggaaatgtacaattaaaggatgattgaaatgttta

SEQ ID NO: 451341 - DNA, 3358 bp, Homo sapiens
tccttttttactgccgtcatttcttgtgcttgttttttccccagtgagggttgtcgaagagaaaatacaatgaagaatgttggaagtcgcaaatatgcatttaattccctgcagctgaaggctttccccaagcattacaggcctcccgaagggacttacggaaaagttgaaacgtgaacacacggtttcctctaattagctgttacataataaatgtgggtaccctctagtgtcatatatgaattcttcaagaagacctgaaggattggtttttattttttgtggtttttttaaaaaaaacatttcactaaagagtctctggagcatgttttttgttttttgggtttttttccccattggaatcaataggaggtaatgtttggctcaatagtgtggatagtaacaactgcctatttaaattaaatagcctttggctgtaactacacagatctcatcaatagttacctacatgaatcaagctaggtttgtctgaaatgctagaagactttttcaaatgcctgcttgctcacttacttttctacagagtaactcaaaagtaaccattgaattacaatccactttgtaaaaatctgaatgtaaaacagtaaataataaattaaataattggatcctaggcataccaataaatgttatttggggaaagaagctagcactatctcatgcagtgagaataacgggttctagtgaattatcctatctacactaccacctgaagaagttgaaagaaagattgataaatcaacgggagataagactttattagaaggtaacacctgcaaggtaccccacatagttggggccactcttttttctgtcccttatgagttacagaacagggagtctgctggagacacaaagccagcagtaaggtccctttagcctgtctcctgttctctgaagctccctgccgaggctccctcacgcccagaggacacatctccccttcttctctagatgttaatgtagggcctcagatgtggcatgtcaacactcccatggggaatttatgaccatagagatagtagaaacctaaatattttcagaaaaaaaattttttttgcaggatttccaatttatctttgaaaagacagtacaatcatgtttgaatgtctgatggaaagtgtctttattttttagggtttgcaataattgttactttcttattctcattcttatgtaagatgactattgagaaacagttgaaatttattctcctcaaatgagattttgaaagggatttatgggccataaaacttaggaatttcatagaaaattttgtctggtcatcttttataagatgatgatgagtcttatctgcacatagcagagtttgtttcttaggagtttatatgttttattgattctgtttacgatgtttacatgttcttgaaaaggttgtaaaagaaatacatatggcacatattaatgatgctgatcctaatgatttgtgaacctcttagaaattcttttgtctaaaagcctagagattcttctggttcctttagaaacatgtaacaaacttgggccaggggtgctgaggcatggggaggactgcttattggcaggaacacagagggggtgggcatcaggtagggtggaactggatgaccttccagaccccctcctactcagaagtcagcatgcaagcagcgcctgctgtctcccgatgcctgcagggaggaaaatgtctgtgaaggacactttaatgaaggacgaagctctctgctgctccctcaaagctgagttcactgtggcaggcaggaagcagagaagctcctgcccgccaaacccactgcacaggtggctgctgctggtatcagattctcctttttaagtgtcaatttctgttcacagacagtttgttttcaatatggctgatttaccctttcacctctccaccatctcatttaatttgtaaatttttagttctgtcttttctcattttaacttttaaaaaatctccttgctttttaaaaataaatattacccacatagttttcagatcttttttgtctggagagcattaaatatctgcactcatcaaagggaatatagcaaatgttgatcatctgtcagcagttttgcatgtgacacctttatatgaattattttcccaatttttgctctatgtaatgggtcaccataaaactgtaagacttggcaaatgctatagaaaaggttcaggtttcagtattctctctgaaggcatcattcctgggcttccggcagcatcacacgcttccagtgcctgcagggtgagggtgtgtggcacagaggcaagcagctcctctcttctgtaggagctttgggttttcagaggtgcagggaaggcagttttacaggttaccgtaaaacagaggttccgtccagtgttccttatgatgcctccccatttaaaaagaaaagagatctatggaaaactgggaatgtaatgtggattctgtcagagctcctacagagcacagttgcctttagtttcctttaaagatgtaaaaatattgtataatacagttttgtccctacacaattgtatttgccaagcttagtgcattatgatacctttatttatttgttttgggcagtattactatatatatataaacatacagttactgttttatatattcttaggtcattcaaagccatgtatgctgtaaatgtgctagtctttagaatgacacataataaataactgacaagatattaaatgtggtcttgcctgattcatcctattaggaggactagttctatgtgaccagcctgtgactggaccattgttcttgggcattgcattgagtgctcgggtgctgaatacatgtttgtaaacatgggaccatgggagacttccattttataagcttgtttctgcctaatttgaagcagaggggcaacagcgttgaggttaagagcacggactttgggagcacacagaccaggtcccaatcctggttctgcccctgactggctggtgactctgagcaagttgcttgacctctccaagcctccgtttcctcatgtgcaaagtgtggacaacaacagtaccttcctcataaggaacgtgcgacgcgcctcagaagtacgtgttcataaatggtagccattgttgttaccttcccgtctgtgaacatggatcacatcatctctgtgggtaacccagtcctcgttgtatgacttgtcaaaatgcagttccacttgtattaatattgaccctgttcatcgtcaccaggactgcatcttgcaccactgtgccgtcttctaggcacacacgacccgttatctcccttggaaaaattcctctcactggaaatgtacaattaaaggatgattgaaatgttta

SEQ ID NO: 451342 - DNA, 2542 bp, Homo sapiens
cccggcgtctagagcggcggcggctggctagggctgcggcgcgcgtggagggttcgctgctggtttgccgccgggtcgggctccgtgggccggggcaggaggaccagcacctgaggccgggccgcaggccgacttcacagccaggcgcgcgcgtcgctgctgctgctgcggggctctggcgcgccagccggcgggacagcgggggctggcgggggccggggagcgccagatgatggatttggacatgcttctatgaagaaatgccacatggtccgagagcaaacatgtccaggctactcactttagtgactagggctcggtgccagcacttcccgggtaatcagacgtggtctgaccgaggatcaagaagcacatcatcaccaatgacatcatgacagcaagagagcacagccctcgccatggtgccagggcccgtgcaatgcagcgggcttccaccatcgacgtggcggccgacatgctgggcctctctctggcaggaaatatacaagacccagatgagcccattttagaatttagcttagcttgcagtgagctgcatactccatcgctagatcgaaagccaaatagttttgttgcggtgagtgtcaccacccctcctcaggcattctggacgaagcatgcacagacggagatcattgagggaaccaacaatcctatatttctaagcagtattgccttctttcaagactctcttatcaatcagatgacacaagtcaaactctccgtgtatgatgtcaaagatagatctcagggaacaatgtatttactgggctctggaacgttcattgtcaaagatctgctccaggacaggcatcataggttgcatttaacactaaggtctgcagagagtgaccgtgtaggtaacatcaccgtgattggctggcagatggaggagaagtcagaccaacggccccctgtgacccggtctgtggacactgtcaatgggaggatggttcttcctgtcgatgagagcttgacggaggcgttaggaatccgatccaaatacgcttcattgcgaaaggacactttgctgaaatcggtgttcggtggtgccatctgccgcatgtaccggtttccaaccactgatggtaaccatttgcggatcctggagcagatggcagagagcgtgctctccctgcacgtgccccggcagttcgtgaagctcctactagaggaagatgcagccagagtgtgtgagctggaggagctgggagagctgtccccttgctgggagagcctccggcgccaaattgtcacccagtaccagaccatcatcctcacataccaggagaacctgaccgacctccatcagtacagagggccctcgtttaaagcaagcagtttgaaagcagataaaaagttagaatttgttcccacaaacttgcacatacaaaggatgagagttcaagacgatggaggatcagatcagaactacgacatcgtcaccattggggcgccagcagcacactgccaaggttttaagtcaggaggtctccgcaaaaagctgcacaaatttgaagagaccaagaaacattttgaggagtgttgtacatcatctggctgccagtccataatctacataccccaggatgttgtcagagccaaggagatcatcgcccagatcaacaccctgaaaacccaagtgagttactacgcagagcggctgtcaagggcagccaaggacaggtctgccactggccttgagaggacactcgccatcttggcagacaagacacggcagctggtcacggtctgcgactgcaagctcctggccaactccatccatgggctgaacgctgcacggcctgactacattgcctccaaggcctctcccacttcgactgaggaggagcaggtgatgcttagaaatgaccaggacaccctcatggcccggtggacagggagaaacagccgatcttccctgcaggtggactggcacgaggaggagtgggagaaagtgtggctgaacgtggacaagagcctagagtgcatcattcagcgtgtggacaagctgctgcagaaggagcggctgcatggcgagggctgtgaggatgtcttcccctgtgcaggcagctgcaccagcaagaaaggtaacccggacagccacgcctactggatcagaccagaagaccccttctgtgatgtcccctcctcaccatgcccctccaccatgccctccactgcatgccatcctcatctgaccacacgtgcgtatgcatccatgcttcccatatgctgcctccatttcaccttgtgctgcttccatttgtctgtgtctctgactccatgccctcctcccccatgcagactgcagggagggctgccaggtggagcgggggcgtcccagtgcatggagcagcaggcagtgagagcggagtctccggttgcctttccatgtaactggagcccatgtgtgattctgcatctctgccagtcagaatctcagggtcctcttgagatacaccaccatggctataagggttgggctcctgggcttttcaggtttgtaaagcaatctgag

SEQ ID NO: 451343 - DNA, 346 bp, Homo sapiens
acaggatctgtaccacatcatgttctggtcatctctcaggcacgcctgtaacagtgatacatgattcctgccaatggaatgcatttaaactgatcagcaacactgtagaaatgcctttatgctcggaagagggagagtggcttagaatttagatatgcatagtaaatgtttgagagaatcagcatagttagcttccatgcagttgtgttcatgttagaagaaagtgacattagccaactaatggcatcccctataacctcccaaggtttggcgatacgtctttacaagaagtcatcaacgtggagagtttggtgcggttaaattcctactttgagcagtttaagga

SEQ ID NO: 451344 - DNA, 6389 bp, Homo sapiens
cccggcgtctagagcggcggcggctggctagggctgcggcgcgcgtggagggttcgctgctggtttgccgccgggtcgggctccgtgggccggggcaggaggaccagcacctgaggccgggccgcaggccgacttcacagccaggcgcgcgcgtcgctgctgctgctgcggggctctggcgcgccagccggcgggacagcgggggctggcgggggccggggagcgccagatgatggatttggacatgcttctatgaagaaatgccacatggtccgagagcaaacatgtccaggctactcactttagtgactagggctcggtgccagcacttcccgggtaatcagacgtggtctgaccgaggatcaagaagcacatcatcaccaatgacatcatgacagcaagagagcacagccctcgccatggtgccagggcccgtgcaatgcagcgggcttccaccatcgacgtggcggccgacatgctgggcctctctctggcaggaaatatacaagacccagatgagcccattttagaatttagcttagcttgcagtgagctgcatactccatcgctagatcgaaagccaaatagttttgttgcggtgagtgtcaccacccctcctcaggcattctggacgaagcatgcacagacggagatcattgagggaaccaacaatcctatatttctaagcagtattgccttctttcaagactctcttatcaatcagatgacacaagtcaaactctccgtgtatgatgtcaaagatagatctcagggaacaatgtatttactgggctctggaacgttcattgtcaaagatctgctccaggacaggcatcataggttgcatttaacactaaggtctgcagagagtgaccgtgtaggtaacatcaccgtgattggctggcagatggaggagaagtcagaccaacggccccctgtgacccggtctgtggacactgtcaatgggaggatggttcttcctgtcgatgagagcttgacggaggcgttaggaatccgatccaaatacgcttcattgcgaaaggacactttgctgaaatcggtgttcggtggtgccatctgccgcatgtaccggtttccaaccactgatggtaaccatttgcggatcctggagcagatggcagagagcgtgctctccctgcacgtgccccggcagttcgtgaagctcctactagaggaagatgcagccagagtgtgtgagctggaggagctgggagagctgtccccttgctgggagagcctccggcgccaaattgtcacccagtaccagaccatcatcctcacataccaggagaacctgaccgacctccatcagtacagagggccctcgtttaaagcaagcagtttgaaagcagataaaaagttagaatttgttcccacaaacttgcacatacaaaggatgagagttcaagacgatggaggatcagatcagaactacgacatcgtcaccattggggcgccagcagcacactgccaaggttttaagtcaggaggtctccgcaaaaagctgcacaaatttgaagagaccaagaaacattttgaggagtgttgtacatcatctggctgccagtccataatctacataccccaggatgttgtcagagccaaggagatcatcgcccagatcaacaccctgaaaacccaagtgagttactacgcagagcggctgtcaagggcagccaaggacaggtctgccactggccttgagaggacactcgccatcttggcagacaagacacggcagctggtcacggtctgcgactgcaagctcctggccaactccatccatgggctgaacgctgcacggcctgactacattgcctccaaggcctctcccacttcgactgaggaggagcaggtgatgcttagaaatgaccaggacaccctcatggcccggtggacagggagaaacagccgatcttccctgcaggtggactggcacgaggaggagtgggagaaagtgtggctgaacgtggacaagagcctagagtgcatcattcagcgtgtggacaagctgctgcagaaggagcggctgcatggcgagggctgtgaggatgtcttcccctgtgcaggcagctgcaccagcaagaaagattgcagtccccctcctgaagagtccagcccaggtgaatggagtgaggccctttacccgctgctgaccactctcaccgactgcgtggccatgatgagtgacaaggccaagaaggccatggtattcctgctcatgcaggacagcgcgcccaccatagccacctacctgagcctgcagtaccgccgtgacgtggtcttctgccagacgctgaccgccctcatctgcggcttcatcattaagctgaggaactgcctgcatgacgacggcttcctgcgccagctctacaccatcgggctgctggcccagttcgagagcctgctgagcacctacggggaggagctggcaatgctggaggacatgagccttgggatcatggacttgaggaacgtgaccttcaaagtcactcaggccacttccagcgcctccgcagacatgctgcccgtcatcacaggaaatcgcgacgggtttaacgtgcgggtccctctgccgggcccgctgtttgacgccttgccccgggagatccagagtggcatgctgctgcgagtgcagcccgtcctcttcaacgtgggcatcaatgagcagcagacactggccgagaggtttggcgatacgtctttacaagaagtcatcaacgtggagagtttggtgcggttaaattcctactttgagcagtttaaggaagttttgcctgaggattgcctgcctcggtctcgcagtcagacgtgcctgccagagctgctgcggtttctgggtcagaacgtgcatgcccggaagaataagaacgtcgacattctctggcaagctgctgagatctgccgccgccttaatggggtccggttcaccagctgcaagagcgctaaggaccgtacagccatgtcggtgacactggagcagtgcctgatcctgcaacacgagcatggcatggccccgcaggtcttcacccaggccctggagtgcatgcgcagtgagggttgtcgaagagaaaatacaatgaagaatgttggaagtcgcaaatatgcatttaattccctgcagctgaaggctttccccaagcattacaggcctcccgaagggacttacggaaaagttgaaacgtgaacacacggtttcctctaattagctgttacataataaatgtgggtaccctctagtgtcatatatgaattcttcaagaagacctgaaggattggtttttattttttgtggtttttttaaaaaaaacatttcactaaagagtctctggagcatgttttttgttttttgggtttttttccccattggaatcaataggaggtaatgtttggctcaatagtgtggatagtaacaactgcctatttaaattaaatagcctttggctgtaactacacagatctcatcaatagttacctacatgaatcaagctaggtttgtctgaaatgctagaagactttttcaaatgcctgcttgctcacttacttttctacagagtaactcaaaagtaaccattgaattacaatccactttgtaaaaatctgaatgtaaaacagtaaataataaattaaataattggatcctaggcataccaataaatgttatttggggaaagaagctagcactatctcatgcagtgagaataacgggttctagtgaattatcctatctacactaccacctgaagaagttgaaagaaagattgataaatcaacgggagataagactttattagaaggtaacacctgcaaggtaccccacatagttggggccactcttttttctgtcccttatgagttacagaacagggagtctgctggagacacaaagccagcagtaaggtccctttagcctgtctcctgttctctgaagctccctgccgaggctccctcacgcccagaggacacatctccccttcttctctagatgttaatgtagggcctcagatgtggcatgtcaacactcccatggggaatttatgaccatagagatagtagaaacctaaatattttcagaaaaaaaattttttttgcaggatttccaatttatctttgaaaagacagtacaatcatgtttgaatgtctgatggaaagtgtctttattttttagggtttgcaataattgttactttcttattctcattcttatgtaagatgactattgagaaacagttgaaatttattctcctcaaatgagattttgaaagggatttatgggccataaaacttaggaatttcatagaaaattttgtctggtcatcttttataagatgatgatgagtcttatctgcacatagcagagtttgtttcttaggagtttatatgttttattgattctgtttacgatgtttacatgttcttgaaaaggttgtaaaagaaatacatatggcacatattaatgatgctgatcctaatgatttgtgaacctcttagaaattcttttgtctaaaagcctagagattcttctggttcctttagaaacatgtaacaaacttgggccaggggtgctgaggcatggggaggactgcttattggcaggaacacagagggggtgggcatcaggtagggtggaactggatgaccttccagaccccctcctactcagaagtcagcatgcaagcagcgcctgctgtctcccgatgcctgcagggaggaaaatgtctgtgaaggacactttaatgaaggacgaagctctctgctgctccctcaaagctgagttcactgtggcaggcaggaagcagagaagctcctgcccgccaaacccactgcacaggtggctgctgctggtatcagattctcctttttaagtgtcaatttctgttcacagacagtttgttttcaatatggctgatttaccctttcacctctccaccatctcatttaatttgtaaatttttagttctgtcttttctcattttaacttttaaaaaatctccttgctttttaaaaataaatattacccacatagttttcagatcttttttgtctggagagcattaaatatctgcactcatcaaagggaatatagcaaatgttgatcatctgtcagcagttttgcatgtgacacctttatatgaattattttcccaatttttgctctatgtaatgggtcaccataaaactgtaagacttggcaaatgctatagaaaaggttcaggtttcagtattctctctgaaggcatcattcctgggcttccggcagcatcacacgcttccagtgcctgcagggtgagggtgtgtggcacagaggcaagcagctcctctcttctgtaggagctttgggttttcagaggtgcagggaaggcagttttacaggttaccgtaaaacagaggttccgtccagtgttccttatgatgcctccccatttaaaaagaaaagagatctatggaaaactgggaatgtaatgtggattctgtcagagctcctacagagcacagttgcctttagtttcctttaaagatgtaaaaatattgtataatacagttttgtccctacacaattgtatttgccaagcttagtgcattatgatacctttatttatttgttttgggcagtattactatatatatataaacatacagttactgttttatatattcttaggtcattcaaagccatgtatgctgtaaatgtgctagtctttagaatgacacataataaataactgacaagatattaaatgtggtcttgcctgattcatcctattaggaggactagttctatgtgaccagcctgtgactggaccattgttcttgggcattgcattgagtgctcgggtgctgaatacatgtttgtaaacatgggaccatgggagacttccattttataagcttgtttctgcctaatttgaagcagaggggcaacagcgttgaggttaagagcacggactttgggagcacacagaccaggtcccaatcctggttctgcccctgactggctggtgactctgagcaagttgcttgacctctccaagcctccgtttcctcatgtgcaaagtgtggacaacaacagtaccttcctcataaggaacgtgcgacgcgcctcagaagtacgtgttcataaatggtagccattgttgttaccttcccgtctgtgaacatggatcacatcatctctgtgggtaacccagtcctcgttgtatgacttgtcaaaatgcagttccacttgtattaatattgaccctgttcatcgtcaccaggactgcatcttgcaccactgtgccgtcttctaggcacacacgacccgttatctcccttggaaaaattcctctcactggaaatgtacaattaaaggatgattgaaatgttta

SEQ ID NO: 451345 - DNA, 5755 bp, Homo sapiens
cccggcgtctagagcggcggcggctggctagggctgcggcgcgcgtggagggttcgctgctggtttgccgccgggtcgggctccgtgggccggggcaggaggaccagcacctgaggccgggccgcaggccgacttcacagccaggcgcgcgcgtcgctgctgctgctgcggggctctggcgcgccagccggcgggacagcgggggctggcgggggccggggagcgccagatgatggatttggacatgcttctatgaagaaatgccacatggtccgagagcaaacatgtccaggctactcactttagtgactagggctcggtgccagcacttcccgggtaatcagacgtggtctgaccgaggatcaagaagcacatcatcaccaatgacatcatgacagcaagagagcacagccctcgccatggtgccagggcccgtgcaatgcagcgggcttccaccatcgacgtggcggccgacatgctgggcctctctctggcaggaaatatacaagacccagatgagcccattttagaatttagcttagcttgcagtgagctgcatactccatcgctagatcgaaagccaaatagttttgttgcggtgagtgtcaccacccctcctcaggcattctggacgaagcatgcacagacggagatcattgagggaaccaacaatcctatatttctaagcagtattgccttctttcaagactctcttatcaatcagatgacacaagtcaaactctccgtgtatgatgtcaaagatagatctcagggaacaatgtatttactgggctctggaacgttcattgtcaaagatctgctccaggacaggcatcataggttgcatttaacactaaggtctgcagagagtgaccgtgtaggtaacatcaccgtgattggctggcagatggaggagaagtcagaccaacggccccctgtgacccggtctgtggacactgtcaatgggaggatggttcttcctgtcgatgagagcttgacggaggcgttaggaatccgatccaaatacgcttcattgcgaaaggacactttgctgaaatcggtgttcggtggtgccatctgccgcatgtaccggtttccaaccactgatggtaaccatttgcggatcctggagcagatggcagagagcgtgctctccctgcacgtgccccggcagttcgtgaagctcctactagaggaagatgcagccagagtgtgtgagctggaggagctgggagagctgtccccttgctgggagagcctccggcgccaaattgtcacccagtaccagaccatcatcctcacataccaggagaacctgaccgacctccatcagtacagagggccctcgtttaaagcaagcagtttgaaagcagataaaaagttagaatttgttcccacaaacttgcacatacaaaggatgagagttcaagacgatggaggatcagatcagaactacgacatcgtcaccattggggcgccagcagcacactgccaaggttttaagtcaggaggtctccgcaaaaagctgcacaaatttgaagagaccaagaaacattttgaggagtgttgtacatcatctggctgccagtccataatctacataccccaggatgttgtcagagccaaggagatcatcgcccagatcaacaccctgaaaacccaagtgagttactacgcagagcggctgtcaagggcagccaaggacaggtctgccactggccttgagaggacactcgccatcttggcagacaagacacggcagctggtcacggtctgcgactgcaagctcctggccaactccatccatgggctgaacgctgcacggcctgactacattgcctccaaggcctctcccacttcgactgaggaggagcaggtgatgcttagaaatgaccaggacaccctcatggcccggtggacagggagaaacagccgatcttccctgcaggtggactggcacgaggaggagtgggagaaagtgtggctgaacgtggacaagagcctagagtgcatcattcagcgtgtggacaagctgctgcagaaggagcggctgcatggcgagggctgtgaggatgtcttcccctgtgcaggcagctgcaccagcaagaaagattgcagtccccctcctgaagagtccagcccaggtgaatggagtgaggccctttacccgctgctgaccactctcaccgactgcgtggccatgatgagtgacaaggccaagaaggccatggtattcctgctcatgcaggacagcgcgcccaccatagccacctacctgagcctgcagtaccgccgtgacgtggtcttctgccagacgctgaccgccctcatctgcggcttcatcattaagctgaggaactgcctgcatgacgacggcttcctgcgccagctctacaccatcgggctgctggcccagttcgagagcctgctgagcacctacggggaggagctggcaatgctggaggacatgagccttgggatcatggacttgaggaacgtgaccttcaaagtcactcaggccacttccagcgcctccgcagacatgctgcccgtcatcacaggaaatcgcgacgggtttaacgtgcgggtccctctgccgggcccgctgtttgacgccttgccccgggagatccagagtggcatgctgctgcgagtgcagcccgtcctcttcaacgtgggcatcaatgagcagcagacactggccgagaggtttggcgatacgtctttacaagaagtcatcaacgtggagagtttggtgcggttaaattcctactttgagcagtttaaggaagttttgcctgaggattgcctgcctcggtctcgcagtcagacgtgcctgccagagctgctgcggtttctgggtcagaacgtgcatgcccggaagaataagaacgtcgacattctctggcaagctgctgagatctgccgccgccttaatggggtccggttcaccagctgcaagagcgctaaggaccgtacagccatgtcggtgacactggagcagtgcctgatcctgcaacacgagcatggcatggccccgcaggtcttcacccaggccctggagtgcatgcgcagtgagggttgtcgaagagaaaatacaatgaagaatgttggaagtcgcaaatatgcatttaattccctgcagctgaaggctttccccaagcattacaggcctcccgaagggacttacggaaaagttgaaacgtgaacacacggtttcctctaattagctgttacataataaatgtgggtaccctctagtgtcatatatgaattcttcaagaagacctgaaggattggtttttattttttgtggtttttttaaaaaaaacatttcactaaagagtctctggagcatgttttttgttttttgggtttttttccccattggaatcaataggaggtaatgtttggctcaatagtgtggatagtaacaactgcctatttaaattaaatagcctttggctgtaactacacagatctcatcaatagttacctacatgaatcaagctaggtttgtctgaaatgctagaagactttttcaaatgcctgcttgctcacttacttttctacagagtaactcaaaagtaaccattgaattacaatccactttgtaaaaatctgaatgtaaaacagtaaataataaattaaataattggatcctaggcataccaataaatgttatttggggaaagaagctagcactatctcatgcagtgagaataacgggttctagtgaattatcctatctacactaccacctgaagaagttgaaagaaagattgataaatcaacgggagataagactttattagaaggtaacacctgcaaggtaccccacatagttggggccactcttttttctgtcccttatgagttacagaacagggagtctgctggagacacaaagccagcagtaaggtccctttagcctgtctcctgttctctgaagctccctgccgaggctccctcacgcccagaggacacatctccccttcttctctagatgttaatgtagggcctcagatgtggcatgtcaacactcccatggggaatttatgaccatagagatagtagaaacctaaatattttcagaaaaaaaattttttttgcaggatttccaatttatctttgaaaagacagtacaatcatgtttgaatgtctgatggaaagtgtctttattttttagggtttgcaataattgttactttcttattctcattcttatgtaagatgactattgagaaacagttgaaatttattctcctcaaatgagattttgaaagggatttatgggccataaaacttaggaatttcatagaaaattttgtctggtcatcttttataagatgatgatgagtcttatctgcacatagcagagtttgtttcttaggagtttatatgttttattgattctgtttacgatgtttacatgttcttgaaaaggttgtaaaagaaatacatatggcacatattaatgatgctgatcctaatgatttgtgaacctcttagaaattcttttgtctaaaagcctagagattcttctggttcctttagaaacatgtaacaaacttgggccaggggtgctgaggcatggggaggactgcttattggcaggaacacagagggggtgggcatcaggtagggtggaactggatgaccttccagaccccctcctactcagaagtcagcatgcaagcagcgcctgctgtctcccgatgcctgcagggaggaaaatgtctgtgaaggacactttaatgaaggacgaagctctctgctgctccctcaaagctgagttcactgtggcaggcaggaagcagagaagctcctgcccgccaaacccactgcacaggtggctgctgctggtatcagattctcctttttaagtgtcaatttctgttcacagacagtttgttttcaatatggctgatttaccctttcacctctccaccatctcatttaatttgtaaatttttagttctgtcttttctcattttaacttttaaaaaatctccttgctttttaaaaataaatattacccacatagttttcagatcttttttgtctggagagcattaaatatctgcactcatcaaagggaatatagcaaatgttgatcatctgtcagcagttttgcatgtgacacctttatatgaattattttcccaatttttgctctatgtaatgggtcaccataaaactgtaagacttggcaaatgctatagaaaaggttcaggtttcagtattctctctgaaggcatcattcctgggcttccggcagcatcacacgcttccagtgcctgcagggtgagggtgtgtggcacagaggcaagcagctcctctcttctgtaggagctttgggttttcagaggtgcagggaaggcagttttacaggttaccgtaaaacagaggttccgtccagtgttccttatgatgcctccccatttaaaaagaaaagagatctatggaaaactgggaatgtaatgtggattctgtcagagctcctacagagcacagttgcctttagtttcctttaaagatgtaaaaatattgtataatacagttttgtccctacacaattgtatttgccaagcttagtgcattatgatacctttatttatttgttttgggcagtattactatatatatataaacatacagttactgttttatatattcttaggtcattcaaagccatgtatgctgtaaatgtgctagtctttagaatgacacataataaataactgacaagata

SEQ ID NO: 451346 - DNA, 3388 bp, Homo sapiens
cccggcgtctagagcggcggcggctggctagggctgcggcgcgcgtggagggttcgctgctggtttgccgccgggtcgggctccgtgggccggggcaggaggaccagcacctgaggccgggccgcaggccgacttcacagccaggcgcgcgcgtcgctgctgctgctgcggggctctggcgcgccagccggcgggacagcgggggctggcgggggccggggagcgccagatgatggatttggacatgcttctatgaagaaatgccacatggtccgagagcaaacatgtccaggctactcactttagtgactagggctcggtgccagcacttcccgggtaatcagacgtggtctgaccgaggatcaagaagcacatcatcaccaatgacatcatgacagcaagagagcacagccctcgccatggtgccagggcccgtgcaatgcagcgggcttccaccatcgacgtggcggccgacatgctgggcctctctctggcaggaaatatacaagacccagatgagcccattttagaatttagcttagcttgcagtgagctgcatactccatcgctagatcgaaagccaaatagttttgttgcggtgagtgtcaccacccctcctcaggcattctggacgaagcatgcacagacggagatcattgagggaaccaacaatcctatatttctaagcagtattgccttctttcaagactctcttatcaatcagatgacacaagtcaaactctccgtgtatgatgtcaaagatagatctcagggaacaatgtatttactgggctctggaacgttcattgtcaaagatctgctccaggacaggcatcataggttgcatttaacactaaggtctgcagagagtgaccgtgtaggtaacatcaccgtgattggctggcagatggaggagaagtcagaccaacggccccctgtgacccggtctgtggacactgtcaatgggaggatggttcttcctgtcgatgagagcttgacggaggcgttaggaatccgatccaaatacgcttcattgcgaaaggacactttgctgaaatcggtgttcggtggtgccatctgccgcatgtaccggtttccaaccactgatggtaaccatttgcggatcctggagcagatggcagagagcgtgctctccctgcacgtgccccggcagttcgtgaagctcctactagaggaagatgcagccagagtgtgtgagctggaggagctgggagagctgtccccttgctgggagagcctccggcgccaaattgtcacccagtaccagaccatcatcctcacataccaggagaacctgaccgacctccatcagtacagagggccctcgtttaaagcaagcagtttgaaagcagataaaaagttagaatttgttcccacaaacttgcacatacaaaggatgagagttcaagacgatggaggatcagatcagaactacgacatcgtcaccattggggcgccagcagcacactgccaaggttttaagtcaggaggtctccgcaaaaagctgcacaaatttgaagagaccaagaaacattttgaggagtgttgtacatcatctggctgccagtccataatctacataccccaggatgttgtcagagccaaggagatcatcgcccagatcaacaccctgaaaacccaagtgagttactacgcagagcggctgtcaagggcagccaaggacaggtctgccactggccttgagaggacactcgccatcttggcagacaagacacggcagctggtcacggtctgcgactgcaagctcctggccaactccatccatgggctgaacgctgcacggcctgactacattgcctccaaggcctctcccacttcgactgaggaggagcaggtgatgcttagaaatgaccaggacaccctcatggcccggtggacagggagaaacagccgatcttccctgcaggtggactggcacgaggaggagtgggagaaagtgtggctgaacgtggacaagagcctagagtgcatcattcagcgtgtggacaagctgctgcagaaggagcggctgcatggcgagggctgtgaggatgtcttcccctgtgcaggcagctgcaccagcaagaaagattgcagtccccctcctgaagagtccagcccaggtgaatggagtgaggccctttacccgctgctgaccactctcaccgactgcgtggccatgatgagtgacaaggccaagaaggccatggtattcctgctcatgcaggacagcgcgcccaccatagccacctacctgagcctgcagtaccgccgtgacgtggtcttctgccagacgctgaccgccctcatctgcggcttcatcattaagctgaggaactgcctgcatgacgacggcttcctgcgccagctctacaccatcgggctgctggcccagttcgagagcctgctgagcacctacggggaggagctggcaatgctggaggacatgagccttgggatcatggacttgaggaacgtgaccttcaaagtcactcaggccacttccagcgcctccgcagacatgctgcccgtcatcacaggaaatcgcgacgggtttaacgtgcgggtccctctgccgggcccgctgtttgacgccttgccccgggagatccagagtggcatgctgctgcgagtgcagcccgtcctcttcaacgtgggcatcaatgagcagcagacactggccgagaggtttggcgatacgtctttacaagaagtcatcaacgtggagagtttggtgcggttaaattcctactttgagcagtttaaggaagttttgcctgaggattcctatgtgacatggctccttcccatgctgtcgtagtcactgacacaagatgtgtttggtggcatgcattgtgcacctcctggtaggacttgggggaatcacagaggcaggacccaccctcggccagtgaagatgctgcagctagggctctgcagccacagaactaagggaggaaccgagagctgcacagcactgtctacgagaattccctcttgagttcaacccagtgaatattccctgaggacctgctgtgtgtaaagtgctagaggatccgatggcgaatgaggggtggaccctaccttggagggaaagctggtcccagagtgccggcctctctgtgcaggcgctgccacagccactagggggcgccacgcgtcagaaggtcacggatgtgccagacactgggctgggctctacatacgtttccacgctgaatccacaacagccctatgggtcggtgataggatccatgtccagatgaagaaaggggtgcctggctctgaagcccatgtgcttggattgtggctgaagccgtcctgctaggagagagtgatgcagaacactccggggctgggccaagaa

SEQ ID NO: 451347 - DNA, 365 bp, Homo sapiens
gcccacggtagatttgcccacggtagatttgcccacggtagatttgcccacggtagatttgcccacggtagatttgcccacggtagatttgcccacggtagatttgcccaccccaatttttaccttttagtaagttggcatgaaattttggtaaaatctgaaaatcacatttcagaataaaacaattgggcaaaactacctaggctttactcttgagtgtctccttttgatagggattgtttctggaccagtttgtctaagtcctggctcttattggttcatatgaaataatgttaacttcacttctttgtatattatgtataaattagaaaatgaaaaatgtgtgaataacattgtatgaaata

SEQ ID NO: 451348 - DNA, 1543 bp, Homo sapiens
  misc_feature (821)..(821): n is a, c, g, or t
gtggctttttaaagttcataccatcagtggtatgatggtaagaattgatttatttttacatagaagtatatatgaccgaatgcaaaaactagagatttaacattcaatgttattgtgttaataatgctaatgaatttcagtctatttcagtggcttaaaatgtaagtttgctagcaatttaaacttgcttgttaatgtaactgaaaattttgttggtagtttcagtgttctgacatttatgagtgcatatgacactagatcatataattaagttttaaactaagctgctgaagaataaatacacacttatttttctcatgttttctagtctctttatcatatagccacatacatgaggtatatgggtgagattttcccctcccaattttaattttctgtcataacaagtaggaattagtggggggaaatatttctttattgactgaatttgtagctaaagtaaattttatttgaggaataactttgtcaaaaatacttgctgaccatagctgctttgttgtaggaggactgacaaatggtagtggtcgatatatctctgcagcacctggagcagaagcaaaatatcgaagtgcttcaagcacttccagtctatttagctccagcagccagctctttcctccttcccggcttcggtataataggtctgatattatgccttctggccgcagtagattattggaagatttcagaaacaaccgcttcccaaaccttcagcttagagacttgattggacatatagttgagttttctcaagaccagcatggttctaggctatcaagtactagctccaactgcctatncatgatcagactgggtgccttaggtgggttggcccctgggagcaaggactggccttgggagctccagttcggttaatggctccaacacctgttttaattagttcagcagcagcacaagctgcagcagcagcagcagctggaggaactgcaagtagccttacaggcagcacaaatggtctgtttcggccaattggcactcagccaccacagcagcagcaacagcagccaagcattaatctgcaatctaattcattttatggaagcagttctttgactaatagctcccagagtagttctttattttctcatggacctggtcaacctggaagtacatctcttggctttggaagtggtaactctttgggtgctgctataggctcagccctcagtggatttggttcatcaggtaagtttgtttttacgatgagtgtactctgctaagtggaagaggtatatgagtgtgtttaacattaaaataagcaataatagcatgtaggataggaaggacaggaataaagtattggactactggtttaatttgtaggaaaaaaaaatcctgcaaatcttttcaacactcaccaatgtttaactcactataggcagcctgttctttactcatatataatacatttcctttttcccctggctctaggaattgattactgtaatttttgttttagtagggtttatttgggtcaatatattattcactaattattagc

SEQ ID NO: 451349 - DNA, 633 bp, Homo sapiens
gcgttctagaggatccctgcaacgccgagcgccatacacttcttaagatcaggtcgtaatggaagatcacgatggagaagttgttgctgcacacgccgaaggccatagggcaaccattttacaatagtctgggattttcctcctctccaagtccaataggcatgcctctgccaagccaaactccaggacattcacttacgccaccgccatcactttcatcacatggatcctcatccagtttgcatttaggaggactgacaaatggtagtggtcgatatatctctgcagcacctggagcagaagcaaaatatcgaagtgcttcaagcacttccagtctatttagctccagcagccagctctttcctccttcccggcttcggtataataggtctgatattatgccttctggccgcagtagattattggaagatttcagaaacaaccgcttcccaaaccttcagcttagagacttgattggaccttcggcgtgtgcagcaacaacttcgtccatcgggatttgcggcggtctggaccctcggcgtgtgcagccaccacttcgtccataccgacatgcaacaacttcgtccacacggatctcaaaaattcgtccctccgactaatgtagtagaactt

SEQ ID NO: 451350 - DNA, 216 bp, Homo sapiens
acgaggatttcaagtgctactccacaaacagctctttcagaggactaatgcactaacagttcaacagttaactgcagctcaacagcagcaatatgcattagcagcagctcagcagccacatataggtgagtcttcatacgttctcattttgaccaaagtcttgttaaaatgtctaggatgtttcacttttcgtttactgtttgtggaggtagcact

SEQ ID NO: 451351 - DNA, 6773 bp, Homo sapiens
cttggagtctgtctcacatatgtgcagttcaggcgtcatctgaaaatcccagtgtaatttatacacgggacatggcgtgtcctctctgggattccctttcttactttccagcagctctggttgctctagactgtgtcctttggtttcttcaggccattaaggctggattcttaaaggaatttaaggaccctacttccacatctaggccttccctcgggcagaaatgccatttaaaaaaaacaaacaaccaaacaaaaaaccttactctgtgctactcctttctttaaagtatagactgttctccagtttctgggctttaattgtttttcattgccttcacatagttgttggcacacagaataattcaagaacccttgacctaatgtttttctacaggttttaaggtagattgctgtcataaactgggaaaacctgtcttccctacagaaatcagtgcttccctttctcagatcatgctaatattagtcatagcagcaatataatataaaaatagttgaagaagtctgtttaaacatttctttgtactaatttttgtttttgttattcaacaggtttgatctgtggatgaaatgaatcatgattttcaagctcttgcattagaatctcggggaatgggagagcttttgcctaccaaaaagttttgggaacctgatgattcaacaaaagatggacaaaaaggcatatttcttggggatgatgaatggagagagactgcatggggagcttctcaccattcaatgtcccagcctattatggtacagagaagatctggacagggttttcatggaaacagtgaagtaaatgcaatactgtctccgcgatcagaaagtggaggccttggtgtgagcatggtagaatatgtattaagttcttctcctgctgataaattggattctcgatttaggaagggaaattttggcactagagatgctgaaacagatggacctgagaaaggagatcaaaaaggcaaggcttctccatttgaggaggaccaaaacagagatcttaaacaaggagatgatgatgattctaaaataaatggcagaggtttgccaaatggaatggatgccgattgcaaagattttaatcgtactcctggaagtcgtcaagcctctccaactgaagtagttgagcgcttgggccccaatactaatccctcagaaggactggggcctcttcctaatcctacagctaataaaccacttgttgaagaattttcaaatcctgaaactcagaatctggatgccatggaacaagttggtctggaatccttacagtttgactatcctggtaatcaggtaccaatggactcttcaggagctactgtaggcctttttgactacaattcccagcagcagctctttcagaggactaatgcactaacagttcaacagttaactgcagctcaacagcagcaatatgcattagcagcagctcagcagccacatatagctggtgtattctcagcaggccttgctccagctgcatttgtgccaaatccatacattattagtgctgctcctccagggaccgatccgtatactgcagcaggattggctgcagcagctacattagcaggtccagcagtggttccacctcagtattacggcgttccatggggggtgtatccagccaacttatttcagcagcaagctgcagctgcggcaaataacacagccagtcagcaagcagcatcacaagctcagcctggacagcaacaggttctccgtgctggagcaggtcagcgtcctcttactcccaatcagggtcagcaagggcagcaagcagaatcacttgcggcagctgcagcagcaaatccaacattggcttttggtcagggtcttgctactggcatgccaggctatcaagtactagctccaactgcctattatgatcagactggtgccttagtggttggccctggagcaaggactggccttggagctccagttcggttaatggctccaacacctgttttaattagttcagcagcagcacaagctgcagcagcagcagcagctggaggaactgcaagtagccttacaggcagcacaaatggtctgtttcggccaattggcactcagccaccacagcagcagcaacagcagccaagcactaatctgcaatctaattcattttatggaagcagttctttgactaatagctcccagagtagttctttattttctcatggacctggtcaacctggaagtacatctcttggctttggaagtggtaactctttgggtgctgctataggctcagccctcagtggatttggttcatcagttggcagttctgcaagtagtagtgccacaaggagagagtctctatctactagctctgacttgtacaaaagatctagtagcagcctagcacccatagggcaaccattttacaatagtctgggattttcctcctctccaagtccaataggcatgcctctgccaagccaaactccaggacattcacttacgccaccgccatcactttcatcacatggatcctcatccagtttgcatttaggaggactgacaaatggtagtggtcgatatatctctgcagcacctggagcagaagcaaaatatcgaagtgcttcaagcacttccagtctatttagctccagcagccagctctttcctccttcccggcttcggtataataggtctgatattatgccttctggccgcagtagattattggaagatttcagaaacaaccgcttcccaaaccttcagcttagagacttgattggacatatagttgagttttctcaagaccagcatggttctagattcatacagcaaaaactagagagagctactccagctgagcgacagatggtatttaatgaaattctgcaagcagcctatcaattaatgactgatgtttttggcaactatgttatacagaagttttttgagtttgggagtctggatcaaaaattagccctggctactcgtattcgtggtcatgttctacccttagccttgcagatgtatggctgccgcgttattcagaaagcattagaatctatttcttctgaccagcagagtgaaatggtaaaggagctggatggtcatgtgctcaaatgtgtgaaagatcagaatggaaaccatgttgtacaaaaatgtatcgaatgtgttcagccacagtcactacagttcatcattgatgctttcaagggacaagtatttgtgctttcaactcatccttatggctgcagagtaattcagcgcatcctagagcattgcactgcagaacagaccttacctatcttagaagaactccaccaacatacagagcagttggtacaggatcagtatggcaattatgttattcagcatgtactggaacacggtcgacctgaagacaagagcaaaattgtttccgaaatcaggggaaaggttttagccctgagtcaacacaaatttgccagcaatgtagtagaaaagtgtgttactcatgcctcccgtgctgagagagctttactgattgacgaggtttgctgccagaatgatggtcctcacagtgccttatacaccatgatgaaggaccagtatgccaattacgtggttcaaaagatgattgatatggctgaacctgctcagagaaagataatcatgcacaagattcgacctcacattactactttgcgcaaatacacatacgggaagcatatactggccaagttggaaaagtattatttgaagaatagcccggacctaggacctattggaggaccaccaaatggaatgctgtaaattacaggagcaagagaaagaagataatttaaccatgtgaaaagaatttttttgtgtgtgaattatcaaaacacaactcaactatgaatcttcaatttttttttaaagcaaaactatttattgactttattcatccatttgtaaattttttaaggttcttgtgtatatttggggggtgggggatgaattataaattatattcagccctgagtggagacctatcagattggattgctggcaaagcacagaatgcctgtatatgatgtaactgtatcaaaaataaaaagctgtcacatattttgtaaatttttaccttgtaaagtcacaaaaatagtttttaaaggaaaaagtacagtattcttttaataaactggctcacagtctggtaggtctacaaccccatagcacaacaggtttatagagatgtatatagaattatagtccttatttttttcctttgcgtgaaaccttttataacagattaacaatcaactgcataaatattattaatattttaaaaagagttaagttgtattttgataattcacaaactatcatgcaaataacgagtaagtagacaagaataaagtggtttgagatgaaaagaacctaacattatttacagtagatgtggttttaatacaattactgccctaaaatgtctctggcaatgtacagaaatattgtatatacttacatatgtaattgttgtaagagttaaatacaaaatcatggtgacacttccaattaagtgcactaaatgaaaagttaagtcacttattaacttttcagtttggtttgcaatgagaaagagtggaaatttgtattttgttttgcttatagaattacagacatgttgaggaagtgttgagctttattttgctttttcatagaggcagaaagtaggaaccagatagagatgaaaaggggccactgaaaagtgaatttgatagctcagcatttaagcatgattacatattcagatagctctttttgctttctataaatatatgcattgtgtgtgtagtaatagatgtaagtttacactttgaaaggaaatcttgtttcaatgtttattataaaagccttgctaatttagtagtgatgctttccttggttgtacaggtgtacatttgtaaaccttcatgctgtaaatggaatttgttttatctctttgggatacatttgcattttagtgtacatttacgtccctgccctctttgacctggcaatatagtgttgtataatgtaaatttatttctccaaatcgagagtgattttttaaaaattttttatctttatatggtttcagaagtatgaaccagctttctttttattattgtgagatcattttgttttataacatagttgttgactgttaatatggacctgctagaatttggatcactttcaattgaagtcagggtattgtgcataatagaaagtattggactgagatatttggttaccatggaggccaatgcttttttcatcttattaaatgtgatgtgacttttttctttgtacagaagagtactgtatttttgaatagcctactcccaagtaagagcaaatctgtatgataacattttttcctctggacataagacataacagtaacacgatgtacatttacaagcggccttatgtacatttcccaacaatctttttaaggcaaaattgtgaccatatgtgtataattaaaatcgtttttaatcctttgcctatgaaaatattttggaaaaaaacttgctgtgtatattcagtttctgaaagataaagaaagtgctttgtattttgttgaagtcagtattttgtataaacatttatgttgacccacttatgttcagtgctgaaaactaaaatgaacatgctattctgtcagctgaatatggaagagatctttttttactagagatctgcagaagaaacgcaatcttctgagcacaatatggaatctaaaggttttatcacttagttgttcatattatgaacctaaaaataatggcataaagtttggggatgccaggcatactttttcatgtttggtgttgagttattttacttttctaacccaacattccttggtgagaccattaaatccaaacacttgtcaccgttccttctcatagtcactctgggtcatcagcatgtcccagtcactgcagcaacgccttgtgtttgtttcatttttttaaaacccacacaaagccgctgtctcactttttcctactttaccaacctcagagtatttcggcccgtatcgaacttttgttctcagtatcagcccatggtttcaggatcaaagctgtcatgttggagattggtaatggctttcctgtctttgtacagttgaattcctagtcttccttcatccttgccctctgttggcacaggcattatctctgcaattttagaaaatgacaagtagagaatactacattgagaaactaaaccctcttcttggggtcctgatactcattcccatttgtcccagtgctgacaacccaatcttcccaatactttcaggcctgctctacaaaagtacctgttcttgtagaaattttacagtctgccattttgggtgcccaccccaatttttaccttttagtaagttggcatgaaattttggtaaaatctgaaaatcacatttcagaataaaacaattgggcaaaactacctaggctttactcttgagtgtctccttttgatagggattgtttctggaccagtttgtctaagtcctggctcttattggttcatatgaaataatgttaacttcacttctttgtatattatgtataaattagaaaatgaaaaatgtgtgaataacattgtatgaaataaacctggtcttgtgtttttctctagataaaataaaaatctgtacctcagttataacttaagattgattgcccattcaggtttactccgacgtaaagaaaacaaacatttttaacacatgggtgctgttctggagccactgat

SEQ ID NO: 451352 - DNA, 6413 bp, Homo sapiens
gggcgggggggaggggagggcaggcggcggtggcagccatgttgttgtgagtctctgtgtctcaccctcggtacttcggtggttcggaggaggagggggaggagaaggaggaggtggggtggggggggagggtggtaggtggagaaagaagacattgccgccaccgaaggcggaggagggggaggaccgccaagagcgacgccgccgtgtgcccaacggtcggtgtccccggctgaggcaagcttgcggccgcagcagccctgtttgatctgtggatgaaatgaatcatgattttcaagctcttgcattagaatctcggggaatgggagagcttttgcctaccaaaaagttttgggaacctgatgattcaacaaaagatggacaaaaaggcatatttcttggggatgatgaatggagagagactgcatggggagcttctcaccattcaatgtcccagcctattatggtacagagaagatctggacagggttttcatggaaacagtgaagtaaatgcaatactgtctccgcgatcagaaagtggaggccttggtgtgagcatggtagaatatgtattaagttcttctcctgctgataaattggattctcgatttaggaagggaaattttggcactagagatgctgaaacagatggacctgagaaaggagatcaaaaaggcaaggcttctccatttgaggaggaccaaaacagagatcttaaacaaggagatgatgatgattctaaaataaatggcagaggtttgccaaatggaatggatgccgattgcaaagattttaatcgtactcctggaagtcgtcaagcctctccaactgaagtagttgagcgcttgggccccaatactaatccctcagaaggactggggcctcttcctaatcctacagctaataaaccacttgttgaagaattttcaaatcctgaaactcagaatctggatgccatggaacaagttggtctggaatccttacagtttgactatcctggtaatcaggtaccaatggactcttcaggagctactgtaggcctttttgactacaattcccagcagcagctctttcagaggactaatgcactaacagttcaacagttaactgcagctcaacagcagcaatatgcattagcagcagctcagcagccacatatagctggtgtattctcagcaggccttgctccagctgcatttgtgccaaatccatacattattagtgctgctcctccagggaccgatccgtatactgcagcaggattggctgcagcagctacattagcaggtccagcagtggttccacctcagtattacggcgttccatggggggtgtatccagccaacttatttcagcagcaagctgcagctgcggcaaataacacagccagtcagcaagcagcatcacaagctcagcctggacagcaacaggttctccgtgctggagcaggtcagcgtcctcttactcccaatcagggtcagcaagggcagcaagcagaatcacttgcggcagctgcagcagcaaatccaacattggcttttggtcagggtcttgctactggcatgccaggctatcaagtactagctccaactgcctattatgatcagactggtgccttagtggttggccctggagcaaggactggccttggagctccagttcggttaatggctccaacacctgttttaattagttcagcagcagcacaagctgcagcagcagcagcagctggaggaactgcaagtagccttacaggcagcacaaatggtctgtttcggccaattggcactcagccaccacagcagcagcaacagcagccaagcactaatctgcaatctaattcattttatggaagcagttctttgactaatagctcccagagtagttctttattttctcatggacctggtcaacctggaagtacatctcttggctttggaagtggtaactctttgggtgctgctataggctcagccctcagtggatttggttcatcagttggcagttctgcaagtagtagtgccacaaggagagagtctctatctactagctctgacttgtacaaaagatctagtagcagcctagcacccatagggcaaccattttacaatagtctgggattttcctcctctccaagtccaataggcatgcctctgccaagccaaactccaggacattcacttacgccaccgccatcactttcatcacatggatcctcatccagtttgcatttaggaggactgacaaatggtagtggtcgatatatctctgcagcacctggagcagaagcaaaatatcgaagtgcttcaagcacttccagtctatttagctccagcagccagctctttcctccttcccggcttcggtataataggtctgatattatgccttctggccgcagtagattattggaagatttcagaaacaaccgcttcccaaaccttcagcttagagacttgattggacatatagttgagttttctcaagaccagcatggttctagattcatacagcaaaaactagagagagctactccagctgagcgacagatggtatttaatgaaattctgcaagcagcctatcaattaatgactgatgtttttggcaactatgttatacagaagttttttgagtttgggagtctggatcaaaaattagccctggctactcgtattcgtggtcatgttctacccttagccttgcagatgtatggctgccgcgttattcagaaagcattagaatctatttcttctgaccagcagagtgaaatggtaaaggagctggatggtcatgtgctcaaatgtgtgaaagatcagaatggaaaccatgttgtacaaaaatgtatcgaatgtgttcagccacagtcactacagttcatcattgatgctttcaagggacaagtatttgtgctttcaactcatccttatggctgcagagtaattcagcgcatcctagagcattgcactgcagaacagaccttacctatcttagaagaactccaccaacatacagagcagttggtacaggatcagtatggcaattatgttattcagcatgtactggaacacggtcgacctgaagacaagagcaaaattgtttccgaaatcaggggaaaggttttagccctgagtcaacacaaatttgccagcaatgtagtagaaaagtgtgttactcatgcctcccgtgctgagagagctttactgattgacgaggtttgctgccagaatgatggtcctcacagtgccttatacaccatgatgaaggaccagtatgccaattacgtggttcaaaagatgattgatatggctgaacctgctcagagaaagataatcatgcacaagattcgacctcacattactactttgcgcaaatacacatacgggaagcatatactggccaagttggaaaagtattatttgaagaatagcccggacctaggacctattggaggaccaccaaatggaatgctgtaaattacaggagcaagagaaagaagataatttaaccatgtgaaaagaatttttttgtgtgtgaattatcaaaacacaactcaactatgaatcttcaatttttttttaaagcaaaactatttattgactttattcatccatttgtaaattttttaaggttcttgtgtatatttggggggtgggggatgaattataaattatattcagccctgagtggagacctatcagattggattgctggcaaagcacagaatgcctgtatatgatgtaactgtatcaaaaataaaaagctgtcacatattttgtaaatttttaccttgtaaagtcacaaaaatagtttttaaaggaaaaagtacagtattcttttaataaactggctcacagtctggtaggtctacaaccccatagcacaacaggtttatagagatgtatatagaattatagtccttatttttttcctttgcgtgaaaccttttataacagattaacaatcaactgcataaatattattaatattttaaaaagagttaagttgtattttgataattcacaaactatcatgcaaataacgagtaagtagacaagaataaagtggtttgagatgaaaagaacctaacattatttacagtagatgtggttttaatacaattactgccctaaaatgtctctggcaatgtacagaaatattgtatatacttacatatgtaattgttgtaagagttaaatacaaaatcatggtgacacttccaattaagtgcactaaatgaaaagttaagtcacttattaacttttcagtttggtttgcaatgagaaagagtggaaatttgtattttgttttgcttatagaattacagacatgttgaggaagtgttgagctttattttgctttttcatagaggcagaaagtaggaaccagatagagatgaaaaggggccactgaaaagtgaatttgatagctcagcatttaagcatgattacatattcagatagctctttttgctttctataaatatatgcattgtgtgtgtagtaatagatgtaagtttacactttgaaaggaaatcttgtttcaatgtttattataaaagccttgctaatttagtagtgatgctttccttggttgtacaggtgtacatttgtaaaccttcatgctgtaaatggaatttgttttatctctttgggatacatttgcattttagtgtacatttacgtccctgccctctttgacctggcaatatagtgttgtataatgtaaatttatttctccaaatcgagagtgattttttaaaaattttttatctttatatggtttcagaagtatgaaccagctttctttttattattgtgagatcattttgttttataacatagttgttgactgttaatatggacctgctagaatttggatcactttcaattgaagtcagggtattgtgcataatagaaagtattggactgagatatttggttaccatggaggccaatgcttttttcatcttattaaatgtgatgtgacttttttctttgtacagaagagtactgtatttttgaatagcctactcccaagtaagagcaaatctgtatgataacattttttcctctggacataagacataacagtaacacgatgtacatttacaagcggccttatgtacatttcccaacaatctttttaaggcaaaattgtgaccatatgtgtataattaaaatcgtttttaatcctttgcctatgaaaatattttggaaaaaaacttgctgtgtatattcagtttctgaaagataaagaaagtgctttgtattttgttgaagtcagtattttgtataaacatttatgttgacccacttatgttcagtgctgaaaactaaaatgaacatgctattctgtcagctgaatatggaagagatctttttttactagagatctgcagaagaaacgcaatcttctgagcacaatatggaatctaaaggttttatcacttagttgttcatattatgaacctaaaaataatggcataaagtttggggatgccaggcatactttttcatgtttggtgttgagttattttacttttctaacccaacattccttggtgagaccattaaatccaaacacttgtcaccgttccttctcatagtcactctgggtcatcagcatgtcccagtcactgcagcaacgccttgtgtttgtttcatttttttaaaaatttcggcccgtatcgaacttttgttctcagtatcagcccatggtttcaggatcaaagctgtcatgttggagattggtaatggctttcctgtctttgtacagttgaattcctagtcttccttcatccttgccctctgttggcacaggcattatctctgcaattttagaaaatgacaagtagagaatactacattgagaaactaaaccctcttcttggggtcctgatactcattcccatttgtcccagtgctgacaacccaatcttcccaatactttcaggcctgctctacaaaagtacctgttcttgtagaaattttacagtctgccattttgggtgcccaccccaatttttaccttttagtaagttggcatgaaattttggtaaaatctgaaaatcacatttcagaataaaacaattgggcaaaactacctaggctttactcttgagtgtctccttttgatagggattgtttctggaccagtttgtctaagtcctggctcttattggttcatatgaaataatgttaacttcacttctttgtatattatgtataaattagaaaatgaaaaatgtgtgaataacattgtatgaaataaacctggtcttgtgtttttctctagataaaataaaaatctgtacctcagttataacttaagattgattgcccattcaggtttactccgacgtaaagaaaacaaacatttttaacacatgggtgctgttctggagccactgat

SEQ ID NO: 451353 - DNA, 5369 bp, Homo sapiens
agtcttctctgttgttgagaataataaaagctcattattattattattattttttaaactactttgttaaagagcacaaatattagaaatagtttttaaccaaagattttctgtaacctccatgttgctttatagattgttctagctgttaagagctagtgattgtgtttttgatgttaatgtattttgtgatttttcatgctaaatctacatttccttgcatgtaaatgtttaaaaaatatccaaaggctgtttgtaataaatacacagttgtccaagataaatttacttatctattattttatattgattttaagaaaatcattttacctttgtaggttctccgtgctggagcaggtcagcgtcctcttactcccaatcagggtcagcaagggcagcaagcagaatcacttgcggcagctgcagcagcaaatccaacattggcttttggtcagggtcttgctactggcatgccaggctatcaagtactagctccaactgcctattatgatcagactggtgccttagtggttggccctggagcaaggactggccttggagctccagttcggttaatggctccaacacctgttttaattagttcagcagcagcacaagctgcagcagcagcagcagctggaggaactgcaagtagccttacaggcagcacaaatggtctgtttcggccaattggcactcagccaccacagcagcagcaacagcagccaagcactaatctgcaatctaattcattttatggaagcagttctttgactaatagctcccagagtagttctttattttctcatggacctggtcaacctggaagtacatctcttggctttggaagtggtaactctttgggtgctgctataggctcagccctcagtggatttggttcatcagttggcagttctgcaagtagtagtgccacaaggagagagtctctatctactagctctgacttgtacaaaagatctagtagcagcctagcacccatagggcaaccattttacaatagtctgggattttcctcctctccaagtccaataggcatgcctctgccaagccaaactccaggacattcacttacgccaccgccatcactttcatcacatggatcctcatccagtttgcatttaggaggactgacaaatggtagtggtcgatatatctctgcagcacctggagcagaagcaaaatatcgaagtgcttcaagcacttccagtctatttagctccagcagccagctctttcctccttcccggcttcggtataataggtctgatattatgccttctggccgcagtagattattggaagatttcagaaacaaccgcttcccaaaccttcagcttagagacttgattggacatatagttgagttttctcaagaccagcatggttctagattcatacagcaaaaactagagagagctactccagctgagcgacagatggtatttaatgaaattctgcaagcagcctatcaattaatgactgatgtttttggcaactatgttatacagaagttttttgagtttgggagtctggatcaaaaattagccctggctactcgtattcgtggtcatgttctacccttagccttgcagatgtatggctgccgcgttattcagaaagcattagaatctatttcttctgaccagcagagtgaaatggtaaaggagctggatggtcatgtgctcaaatgtgtgaaagatcagaatggaaaccatgttgtacaaaaatgtatcgaatgtgttcagccacagtcactacagttcatcattgatgctttcaagggacaagtatttgtgctttcaactcatccttatggctgcagagtaattcagcgcatcctagagcattgcactgcagaacagaccttacctatcttagaagaactccaccaacatacagagcagttggtacaggatcagtatggcaattatgttattcagcatgtactggaacacggtcgacctgaagacaagagcaaaattgtttccgaaatcaggggaaaggttttagccctgagtcaacacaaatttgccagcaatgtagtagaaaagtgtgttactcatgcctcccgtgctgagagagctttactgattgacgaggtttgctgccagaatgatggtcctcacagtgccttatacaccatgatgaaggaccagtatgccaattacgtggttcaaaagatgattgatatggctgaacctgctcagagaaagataatcatgcacaagattcgacctcacattactactttgcgcaaatacacatacgggaagcatatactggccaagttggaaaagtattatttgaagaatagcccggacctaggacctattggaggaccaccaaatggaatgctgtaaattacaggagcaagagaaagaagataatttaaccatgtgaaaagaatttttttgtgtgtgaattatcaaaacacaactcaactatgaatcttcaatttttttttaaagcaaaactatttattgactttattcatccatttgtaaattttttaaggttcttgtgtatatttggggggtgggggatgaattataaattatattcagccctgagtggagacctatcagattggattgctggcaaagcacagaatgcctgtatatgatgtaactgtatcaaaaataaaaagctgtcacatattttgtaaatttttaccttgtaaagtcacaaaaatagtttttaaaggaaaaagtacagtattcttttaataaactggctcacagtctggtaggtctacaaccccatagcacaacaggtttatagagatgtatatagaattatagtccttatttttttcctttgcgtgaaaccttttataacagattaacaatcaactgcataaatattattaatattttaaaaagagttaagttgtattttgataattcacaaactatcatgcaaataacgagtaagtagacaagaataaagtggtttgagatgaaaagaacctaacattatttacagtagatgtggttttaatacaattactgccctaaaatgtctctggcaatgtacagaaatattgtatatacttacatatgtaattgttgtaagagttaaatacaaaatcatggtgacacttccaattaagtgcactaaatgaaaagttaagtcacttattaacttttcagtttggtttgcaatgagaaagagtggaaatttgtattttgttttgcttatagaattacagacatgttgaggaagtgttgagctttattttgctttttcatagaggcagaaagtaggaaccagatagagatgaaaaggggccactgaaaagtgaatttgatagctcagcatttaagcatgattacatattcagatagctctttttgctttctataaatatatgcattgtgtgtgtagtaatagatgtaagtttacactttgaaaggaaatcttgtttcaatgtttattataaaagccttgctaatttagtagtgatgctttccttggttgtacaggtgtacatttgtaaaccttcatgctgtaaatggaatttgttttatctctttgggatacatttgcattttagtgtacatttacgtccctgccctctttgacctggcaatatagtgttgtataatgtaaatttatttctccaaatcgagagtgattttttaaaaattttttatctttatatggtttcagaagtatgaaccagctttctttttattattgtgagatcattttgttttataacatagttgttgactgttaatatggacctgctagaatttggatcactttcaattgaagtcagggtattgtgcataatagaaagtattggactgagatatttggttaccatggaggccaatgcttttttcatcttattaaatgtgatgtgacttttttctttgtacagaagagtactgtatttttgaatagcctactcccaagtaagagcaaatctgtatgataacattttttcctctggacataagacataacagtaacacgatgtacatttacaagcggccttatgtacatttcccaacaatctttttaaggcaaaattgtgaccatatgtgtataattaaaatcgtttttaatcctttgcctatgaaaatattttggaaaaaaacttgctgtgtatattcagtttctgaaagataaagaaagtgctttgtattttgttgaagtcagtattttgtataaacatttatgttgacccacttatgttcagtgctgaaaactaaaatgaacatgctattctgtcagctgaatatggaagagatctttttttactagagatctgcagaagaaacgcaatcttctgagcacaatatggaatctaaaggttttatcacttagttgttcatattatgaacctaaaaataatggcataaagtttggggatgccaggcatactttttcatgtttggtgttgagttattttacttttctaacccaacattccttggtgagaccattaaatccaaacacttgtcaccgttccttctcatagtcactctgggtcatcagcatgtcccagtcactgcagcaacgccttgtgtttgtttcatttttttaaaacccacacaaagccgctgtctcactttttcctactttaccaacctcagagtatttcggcccgtatcgaacttttgttctcagtatcagcccatggtttcaggatcaaagctgtcatgttggagattggtaatggctttcctgtctttgtacagttgaattcctagtcttccttcatccttgccctctgttggcacaggcattatctctgcaattttagaaaatgacaagtagagaatactacattgagaaactaaaccctcttcttggggtcctgatactcattcccatttgtcccagtgctgacaacccaatcttcccaatactttcaggcctgctctacaaaagtacctgttcttgtagaaattttacagtctgccattttgggtgcccaccccaatttttaccttttagtaagttggcatgaaattttggtaaaatctgaaaatcacatttcagaataaaacaattgggcaaaactacctaggctttactcttgagtgtctccttttgatagggattgtttctggaccagtttgtctaagtcctggctcttattggttcatatgaaataatgttaacttcacttctttgtatattatgtataaattagaaaatgaaaaatgtgtgaataacattgtatgaaataaacctggtcttgtgtttttctctagataaaataaaaatctgtacctcagttataacttaagattgattgcccattcaggtttactccgacgtaaagaaaacaaacatttttaacacatgggtgctgttctggagccactgat

SEQ ID NO: 451354 - DNA, 6409 bp, Homo sapiens
gggcgggggggaggggagggcaggcggcggtggcagccatgttgttgtgagtctctgtgtctcaccctcggtacttcggtggttcggaggaggagggggaggagaaggaggaggtggggtggggggggagggtggtaggtggagaaagaagacattgccgccaccgaaggcggaggagggggaggaccgccaagagcgacgccgccgtgtgcccaacggtcggtgtccccggctgaggcaagcttgcggccgcagcagccctgtttgatctgtggatgaaatgaatcatgattttcaagctcttgcattagaatctcggggaatgggagagcttttgcctaccaaaaagttttgggaacctgatgattcaacaaaagatggacaaaaaggcatatttcttggggatgatgaatggagagagactgcatggggagcttctcaccattcaatgtcccagcctattatggtacagagaagatctggacagggttttcatggaaacagtgaagtaaatgcaatactgtctccgcgatcagaaagtggaggccttggtgtgagcatggtagaatatgtattaagttcttctcctgctgataaattggattctcgatttaggaagggaaattttggcactagagatgctgaaacagatggacctgagaaaggagatcaaaaaggcaaggcttctccatttgaggaggaccaaaacagagatcttaaacaaggagatgatgatgattctaaaataaatggcagaggtttgccaaatggaatggatgccgattgcaaagattttaatcgtactcctggaagtcgtcaagcctctccaactgaagtagttgagcgcttgggccccaatactaatccctcagaaggactggggcctcttcctaatcctacagctaataaaccacttgttgaagaattttcaaatcctgaaactcagaatctggatgccatggaacaagttggtctggaatccttacagtttgactatcctggtaatcaggtaccaatggactcttcaggagctactgtaggcctttttgactacaattcccagcagcagctctttcagaggactaatgcactaacagttcaacagttaactgcagctcaacagcagcaatatgcattagcagcagctcagcagccacatatagctggtgtattctcagcaggccttgctccagctgcatttgtgccaaatccatacattattagtgctgctcctccagggaccgatccgtatactgcagcaggattggctgcagcagctacattagcaggtccagcagtggttccacctcagtattacggcgttccatggggggtgtatccagccaacttatttcagcagcaagctgcagctgcggcaaataacacagccagtcagcaagcagcatcacaagctcagcctggacagcaacaggttctccgtgctggagcaggtcagcgtcctcttactcccaatcagggtcagcaagggcagcaagcagaatcacttgcggcagctgcagcagcaaatccaacattggcttttggtcagggtcttgctactggcatgccaggctatcaagtactagctccaactgcctattatgatcagactggtgccttagtggttggccctggagcaaggactggccttggagctccagttcggttaatggctccaacacctgttttaattagttcagcagcagcacaagctgcagcagcagcagcagctggaggaactgcaagtagccttacaggcagcacaaatggtctgtttcggccaattggcactcagccaccacagcagcagcaacagcagccaagcactaatctgcaatctaattcattttatggaagcagttctttgactaatagctcccagagtagttctttattttctcatggacctggtcaacctggaagtacatctcttggctttggaagtggtaactctttgggtgctgctataggctcagccctcagtggatttggttcatcagttggcagttctgcaagtagtagtgccacaaggagagagtctctatctactagctctgacttgtacaaaagatctagtagcagcctagcacccatagggcaaccattttacaatagtctgggattttcctcctctccaagtccaataggcatgcctctgccaagccaaactccaggacattcacttacgccaccgccatcactttcatcacatggatcctcatccagtttgcatttaggaggactgacaaatggtagtggtcgatatatctctgcagcacctggagcagaagcaaaatatcgaagtgcttcaagcacttccagtctatttagctccagcagccagctctttcctccttcccggcttcggtataataggtctgatattatgccttctggccgcagtagattattggaagatttcagaaacaaccgcttcccaaaccttcagcttagagacttgattggacatatagttgagttttctcaagaccagcatggttctagattcatacagcaaaaactagagagagctactccagctgagcgacagatggtatttaatgaaattctgcaagcagcctatcaattaatgactgatgtttttggcaactatgttatacagaagttttttgagtttgggagtctggatcaaaaattagccctggctactcgtattcgtggtcatgttctacccttagccttgcagatgtatggctgccgcgttattcagaaagcattagaatctatttcttctgaccagcagagtgaaatggtaaaggagctggatggtcatgtgctcaaatgtgtgaaagatcagaatggaaaccatgttgtacaaaaatgtatcgaatgtgttcagccacagtcactacagttcatcattgatgctttcaagggacaagtatttgtgctttcaactcatccttatggctgcagagtaattcagcgcatcctagagcattgcactgcagaacagaccttacctatcttagaagaactccaccaacatacagagcagttggtacaggatcagtatggcaattatgttattcagcatgtactggaacacggtcgacctgaagacaagagcaaaattgtttccgaaatcaggggaaaggttttagccctgagtcaacacaaatttgccagcaatgtagtagaaaagtgtgttactcatgcctcccgtgctgagagagctttactgattgacgaggtttgctgccagaatgatggtcctcacagtgccttatacaccatgatgaaggaccagtatgccaattacgtggttcaaaagatgattgatatggctgaacctgctcagagaaagataatcatgcacaagattcgacctcacattactactttgcgcaaatacacatacgggaagcatatactggccaagttggaaaagtattatttgaagaatagcccggacctaggacctattggaggaccaccaaatggaatgctgtaaattacaggagcaagagaaagaagataatttaaccatgtgaaaagaatttttttgtgtgtgaattatcaaaacacaactcaactatgaatcttcaatttttttttaaagcaaaactatttattgactttattcatccatttgtaaattttttaaggttcttgtgtatatttggggggtgggggatgaattataaattatattcagccctgagtggagacctatcagattggattgctggcaaagcacagaatgcctgtatatgatgtaactgtatcaaaaataaaaagctgtcacatattttgtaaatttttaccttgtaaagtcacaaaaatagtttttaaaggaaaaagtacagtattcttttaataaactggctcacagtctggtaggtctacaaccccatagcacaacaggtttatagagatgtatatagaattatagtccttatttttttcctttgcgtgaaaccttttataacagattaacaatcaactgcataaatattattaatattttaaaaagagttaagttgtattttgataattcacaaactatcatgcaaataacgagtaagtagacaagaataaagtggtttgagatgaaaagaacctaacattatttacagtagatgtggttttaatacaattactgccctaaaatgtctctggcaatgtacagaaatattgtatatacttacatatgtaattgttgtaagagttaaatacaaaatcatggtgacacttccaattaagtgcactaaatgaaaagttaagtcacttattaacttttcagtttggtttgcaatgagaaagagtggaaatttgtattttgttttgcttatagaattacagacatgttgaggaagtgttgagctttattttgctttttcatagaggcagaaagtaggaaccagatagagatgaaaaggggccactgaaaagtgaatttgatagctcagcatttaagcatgattacatattcagatagctctttttgctttctataaatatatgcattgtgtgtgtagtaatagatgtaagtttacactttgaaaggaaatcttgtttcaatgtttattataaaagccttgctaatttagtagtgatgctttccttggttgtacaggtgtacatttgtaaaccttcatgctgtaaatggaatttgttttatctctttgggatacatttgcattttagtgtacatttacgtccctgccctctttgacctggcaatatagtgttgtataatgtaaatttatttctccaaatcgagagtgattttttaaaaattttttatctttatatggtttcagaagtatgaaccagctttctttttattattgtgagatcattttgttttataacatagttgttgactgttaatatggacctgctagaatttggatcactttcaattgaagtcagggtattgtgcataatagaaagtattggactgagatatttggttaccatggaggccaatgcttttttcatcttattaaatgtgatgtgacttttttctttgtacagaagagtactgtatttttgaatagcctactcccaagtaagagcaaatctgtatgataacattttttcctctggacataagacataacagtaacacgatgtacatttacaagcggccttatgtacatttcccaacaatctttttaaggcaaaattgtgaccatatgtgtataattaaaatcgtttttaatcctttgcctatgaaaatattttggaaaaaaacttgctgtgtatattcagtttctgaaagataaagaaagtgctttgtattttgttgaagtcagtattttgtataaacatttatgttgacccacttatgttcagtgctgaaaactaaaatgaacatgctattctgtcagctgaatatggaagagatctttttttactagagatctgcagaagaaacgcaatcttctgagcacaatatggaatctaaaggttttatcacttagttgttcatattatgaacctatgagttattttacttttctaacccaacattccttggtgagaccattaaatccaaacacttgtcaccgttccttctcatagtcactctgggtcatcagcatgtcccagtcactgcagcaacgccttgtgtttgtttcatttttttaaaacccacacaaagccgctgtctcactttttcctactttaccaacctcagagtatttcggcccgtatcgaacttttgttctcagtatcagcccatggtttcaggatcaaagctgtcatgttggagattggtaatggctttcctgtctttgtacagttgaattcctagtcttccttcatccttgccctctgttggcacaggcattatctctgcaattttagaaaatgacaagtagagaatactacattgagaaactaaaccctcttcttggggtcctgatactcattcccatttgtcccagtgctgacaacccaatcttcccaatactttcaggcctgctctacaaaagtacctgttcttgtagaaattttacagtctgccattttgggtgcccaccccaatttttaccttttagtaagttggcatgaaattttggtaaaatctgaaaatcacatttcagaataaaacaattgggcaaaactacctaggctttactcttgagtgtctccttttgatagggattgtttctggaccagtttgtctaagtcctggctcttattggttcatatgaaataatgttaacttcacttctttgtatattatgtataaattagaaaatgaaaaatgtgtgaataacattgtatgaaataaacctggtcttgtgtttttctctagataaaataaaaatctgtacctcagttataacttaagattgattgcccattcaggtttactccgacgtaaagaaaacaaacatttttaacacatgggtgctgttctggagccactgat

SEQ ID NO: 451355 - DNA, 4749 bp, Homo sapiens
gtggctttttaaagttcataccatcagtggtatgatggtaagaattgatttatttttacatagaagtatatatgaccgaatgcaaaaactagagatttaacattcaatgttattgtgttaataatgctaatgaatttcagtctatttcagtggcttaaaatgtaagtttgctagcaatttaaacttgcttgttaatgtaactgaaaattttgttggtagtttcagtgttctgacatttatgagtgcatatgacactagatcatataattaagttttaaactaagctgctgaagaataaatacacacttatttttctcatgttttctagtctctttatcatatagccacatacatgaggtatatgggtgagattttcccctcccaattttaattttctgtcataacaagtaggaattagtggggggaaatatttctttattgactgaatttgtagctaaagtaaattttatttgaggaataactttgtcaaaaatacttgctgaccatagctgctttgttgtaggaggactgacaaatggtagtggtcgatatatctctgcagcacctggagcagaagcaaaatatcgaagtgcttcaagcacttccagtctatttagctccagcagccagctctttcctccttcccggcttcggtataataggtctgatattatgccttctggccgcagtagattattggaagatttcagaaacaaccgcttcccaaaccttcagcttagagacttgattggacatatagttgagttttctcaagaccagcatggttctagattcatacagcaaaaactagagagagctactccagctgagcgacagatggtatttaatgaaattctgcaagcagcctatcaattaatgactgatgtttttggcaactatgttatacagaagttttttgagtttgggagtctggatcaaaaattagccctggctactcgtattcgtggtcatgttctacccttagccttgcagatgtatggctgccgcgttattcagaaagcattagaatctatttcttctgaccagcagagtgaaatggtaaaggagctggatggtcatgtgctcaaatgtgtgaaagatcagaatggaaaccatgttgtacaaaaatgtatcgaatgtgttcagccacagtcactacagttcatcattgatgctttcaagggacaagtatttgtgctttcaactcatccttatggctgcagagtaattcagcgcatcctagagcattgcactgcagaacagaccttacctatcttagaagaactccaccaacatacagagcagttggtacaggatcagtatggcaattatgttattcagcatgtactggaacacggtcgacctgaagacaagagcaaaattgtttccgaaatcaggggaaaggttttagccctgagtcaacacaaatttgccagcaatgtagtagaaaagtgtgttactcatgcctcccgtgctgagagagctttactgattgacgaggtttgctgccagaatgatggtcctcacagtgccttatacaccatgatgaaggaccagtatgccaattacgtggttcaaaagatgattgatatggctgaacctgctcagagaaagataatcatgcacaagattcgacctcacattactactttgcgcaaatacacatacgggaagcatatactggccaagttggaaaagtattatttgaagaatagcccggacctaggacctattggaggaccaccaaatggaatgctgtaaattacaggagcaagagaaagaagataatttaaccatgtgaaaagaatttttttgtgtgtgaattatcaaaacacaactcaactatgaatcttcaatttttttttaaagcaaaactatttattgactttattcatccatttgtaaattttttaaggttcttgtgtatatttggggggtgggggatgaattataaattatattcagccctgagtggagacctatcagattggattgctggcaaagcacagaatgcctgtatatgatgtaactgtatcaaaaataaaaagctgtcacatattttgtaaatttttaccttgtaaagtcacaaaaatagtttttaaaggaaaaagtacagtattcttttaataaactggctcacagtctggtaggtctacaaccccatagcacaacaggtttatagagatgtatatagaattatagtccttatttttttcctttgcgtgaaaccttttataacagattaacaatcaactgcataaatattattaatattttaaaaagagttaagttgtattttgataattcacaaactatcatgcaaataacgagtaagtagacaagaataaagtggtttgagatgaaaagaacctaacattatttacagtagatgtggttttaatacaattactgccctaaaatgtctctggcaatgtacagaaatattgtatatacttacatatgtaattgttgtaagagttaaatacaaaatcatggtgacacttccaattaagtgcactaaatgaaaagttaagtcacttattaacttttcagtttggtttgcaatgagaaagagtggaaatttgtattttgttttgcttatagaattacagacatgttgaggaagtgttgagctttattttgctttttcatagaggcagaaagtaggaaccagatagagatgaaaaggggccactgaaaagtgaatttgatagctcagcatttaagcatgattacatattcagatagctctttttgctttctataaatatatgcattgtgtgtgtagtaatagatgtaagtttacactttgaaaggaaatcttgtttcaatgtttattataaaagccttgctaatttagtagtgatgctttccttggttgtacaggtgtacatttgtaaaccttcatgctgtaaatggaatttgttttatctctttgggatacatttgcattttagtgtacatttacgtccctgccctctttgacctggcaatatagtgttgtataatgtaaatttatttctccaaatcgagagtgattttttaaaaattttttatctttatatggtttcagaagtatgaaccagctttctttttattattgtgagatcattttgttttataacatagttgttgactgttaatatggacctgctagaatttggatcactttcaattgaagtcagggtattgtgcataatagaaagtattggactgagatatttggttaccatggaggccaatgcttttttcatcttattaaatgtgatgtgacttttttctttgtacagaagagtactgtatttttgaatagcctactcccaagtaagagcaaatctgtatgataacattttttcctctggacataagacataacagtaacacgatgtacatttacaagcggccttatgtacatttcccaacaatctttttaaggcaaaattgtgaccatatgtgtataattaaaatcgtttttaatcctttgcctatgaaaatattttggaaaaaaacttgctgtgtatattcagtttctgaaagataaagaaagtgctttgtattttgttgaagtcagtattttgtataaacatttatgttgacccacttatgttcagtgctgaaaactaaaatgaacatgctattctgtcagctgaatatggaagagatctttttttactagagatctgcagaagaaacgcaatcttctgagcacaatatggaatctaaaggttttatcacttagttgttcatattatgaacctaaaaataatggcataaagtttggggatgccaggcatactttttcatgtttggtgttgagttattttacttttctaacccaacattccttggtgagaccattaaatccaaacacttgtcaccgttccttctcatagtcactctgggtcatcagcatgtcccagtcactgcagcaacgccttgtgtttgtttcatttttttaaaacccacacaaagccgctgtctcactttttcctactttaccaacctcagagtatttcggcccgtatcgaacttttgttctcagtatcagcccatggtttcaggatcaaagctgtcatgttggagattggtaatggctttcctgtctttgtacagttgaattcctagtcttccttcatccttgccctctgttggcacaggcattatctctgcaattttagaaaatgacaagtagagaatactacattgagaaactaaaccctcttcttggggtcctgatactcattcccatttgtcccagtgctgacaacccaatcttcccaatactttcaggcctgctctacaaaagtacctgttcttgtagaaattttacagtctgccattttgggtgcccaccccaatttttaccttttagtaagttggcatgaaattttggtaaaatctgaaaatcacatttcagaataaaacaattgggcaaaactacctaggctttactcttgagtgtctccttttgatagggattgtttctggaccagtttgtctaagtcctggctcttattggttcatatgaaataatgttaacttcacttctttgtatattatgtataaattagaaaatgaaaaatgtgtgaataacattgtatgaaataaacctggtcttgtgtttttctctagataaaataaaaatctgtacctcagttataacttaagattgattgcccattcaggtttactccgacgtaaagaaaacaaacatttttaacacatgggtgctgttctggagccactgat

SEQ ID NO: 451356 - DNA, 3642 bp, Homo sapiens
gggcgggggggaggggagggcaggcggcggtggcagccatgttgttgtgagtctctgtgtctcaccctcggtacttcggtggttcggaggaggagggggaggagaaggaggaggtggggtggggggggagggtggtaggtggagaaagaagacattgccgccaccgaaggcggaggagggggaggaccgccaagagcgacgccgccgtgtgcccaacggtcggtgtccccggctgaggcaagcttgcggccgcagcagccctgtttgatctgtggatgaaatgaatcatgattttcaagctcttgcattagaatctcggggaatgggagagcttttgcctaccaaaaagttttgggaacctgatgattcaacaaaagatggacaaaaaggcatatttcttggggatgatgaatggagagagactgcatggggagcttctcaccattcaatgtcccagcctattatggtacagagaagatctggacagggttttcatggaaacagtgaagtaaatgcaatactgtctccgcgatcagaaagtggaggccttggtgtgagcatggtagaatatgtattaagttcttctcctgctgataaattggattctcgatttaggaagggaaattttggcactagagatgctgaaacagatggacctgagaaaggagatcaaaaaggcaaggcttctccatttgaggaggaccaaaacagagatcttaaacaaggagatgatgatgattctaaaataaatggcagaggtttgccaaatggaatggatgccgattgcaaagattttaatcgtactcctggaagtcgtcaagcctctccaactgaagtagttgagcgcttgggccccaatactaatccctcagaaggactggggcctcttcctaatcctacagctaataaaccacttgttgaagaattttcaaatcctgaaactcagaatctggatgccatggaacaagttggtctggaatccttacagtttgactatcctggtaatcaggtaccaatggactcttcaggagctactgtaggcctttttgactacaattcccagcagcagctctttcagaggactaatgcactaacagttcaacagttaactgcagctcaacagcagcaatatgcattagcagcagctcagcagccacatatagctggtgtattctcagcaggccttgctccagctgcatttgtgccaaatccatacattattagtgctgctcctccagggaccgatccgtatactgcagcaggattggctgcagcagctacattagcaggtccagcagtggttccacctcagtattacggcgttccatggggggtgtatccagccaacttatttcagcagcaagctgcagctgcggcaaataacacagccagtcagcaagcagcatcacaagctcagcctggacagcaacaggttctccgtgctggagcaggtcagcgtcctcttactcccaatcagggtcagcaagggcagcaagcagaatcacttgcggcagctgcagcagcaaatccaacattggcttttggtcagggtcttgctactggcatgccaggctatcaagtactagctccaactgcctattatgatcagactggtgccttagtggttggccctggagcaaggactggccttggagctccagttcggttaatggctccaacacctgttttaattagttcagcagcagcacaagctgcagcagcagcagcagctggaggaactgcaagtagccttacaggcagcacaaatggtctgtttcggccaattggcactcagccaccacagcagcagcaacagcagccaagcactaatctgcaatctaattcattttatggaagcagttctttgactaatagctcccagagtagttctttattttctcatggacctggtcaacctggaagtacatctcttggctttggaagtggtaactctttgggtgctgctataggctcagccctcagtggatttggttcatcagttggcagttctgcaagtagtagtgccacaaggagagagtctctatctactagctctgacttgtacaaaagatctagtagcagcctagcacccatagggcaaccattttacaatagtctgggattttcctcctctccaagtccaataggcatgcctctgccaagccaaactccaggacattcacttacgccaccgccatcactttcatcacatggatcctcatccagtttgcatttaggaggactgacaaatggtagtggtcgatatatctctgcagcacctggagcagaagcaaaatatcgaagtgcttcaagcacttccagtctatttagctccagcagccagctctttcctccttcccggcttcggtataataggtctgatattatgccttctggccgcagtagattattggaagatttcagaaacaaccgcttcccaaaccttcagcttagagacttgattggacatatagttgagttttctcaagaccagcatggttctagattcatacagcaaaaactagagagagctactccagctgagcgacagatggtatttaatgaaattctgcaagcagcctatcaattaatgactgatgtttttggcaactatgttatacagaagttttttgagtttgggagtctggatcaaaaattagccctggctactcgtattcgtggtcatgttctacccttagccttgcagatgtatggctgccgcgttattcagaaagcattagaatctatttcttctgaccagcagagtgaaatggtaaaggagctggatggtcatgtgctcaaatgtgtgaaagatcagaatggaaaccatgttgtacaaaaatgtatcgaatgtgttcagccacagtcactacagttcatcattgatgctttcaagggacaagtatttgtgctttcaactcatccttatggctgcagagtaattcagcgcatcctagagcattgcactgcagaacagaccttacctatcttagaagaactccaccaacatacagagcagttggtacaggatcagtatggcaattatgttattcagcatgtactggaacacggtcgacctgaagacaagagcaaaattgtttccgaaatcaggggaaaggttttagccctgagtcaacacaaatttgccagcaatgtagtagaaaagtgtgttactcatgcctcccgtgctgagagagctttactgattgacgaggtttgctgccagaatgatggtcctcacagtgccttatacaccatgatgaaggaccagtatgccaattacgtggttcaaaagatgattgatatggctgaacctgctcagagaaagataatcatgcacaaggtaatacagcatgtaacactcagataactgtttgtctttgtgtttaggctacacatttaacctccttgggctttcatttcctcccgtatgttataactggaggaaaaattaaaatcgatggatatcctttggcagatatattggtatggtttccatttttatgcttaaggttatcatggccaggcatgggggcttttgcccataattccagcagattgggaggctgaggtgacaagatcacttgagcccaggagtttgagaccagcctgagcaatgtggcaagaccctccctctacaaa

SEQ ID NO: 451357 - DNA, 820 bp, Homo sapiens
gacctagaggatcccgactagtccaaccataccccacacaaagccgctgtctcactttttcctactttaccaacctcagagtatttcggcccgtatcgaacttttgttctcagtatcagcccatggtttcaggatcaaagctgtcatgttggagattggtaatggctttcctgtctttgtacagttgaattcctagtcttccttcatccttgccctctgttggcacaggcattatctctgcaattttagaaaatgacaagtagagaatactacattgagaaactaaaccctcttcttggggtcctgatactcattcccatttgtcccagtgctgacaacccaatcttcccaatactttcaggcctgctctacaaaagtacctgttcttgtagaaattttacagtctgccattttgggtgcccaccccaatttttaccttttagtaagttggcatgaaattttggtaaaatctgaaaatcacatttcagaataaaacaattgggcaaaactacctaggctttactcttgagtgtctccttttgatagggattgtttctggaccagtttgtctaagtcctggctcttattggttcatatgaaataatgttaacttcacttctttgtatattatgtataaattagaaaatgaaaaatgtgtgaataacattgtatgaaataaacctggtcttgtgtttttctctagataaaataaaaatctgtacctcagttataacttaagattgattgcccattcaggtttactccgacgtaaagaaaacaaacatttttaacacatgggtgctgttctggagccactgat

SEQ ID NO: 451358 - DNA, 3257 bp, Homo sapiens
  misc_feature (2535)..(2535): n is a, c, g, or t
gggcgggggggaggggagggcaggcggcggtggcagccatgttgttgtgagtctctgtgtctcaccctcggtacttcggtggttcggaggaggagggggaggagaaggaggaggtggggtggggggggagggtggtaggtggagaaagaagacattgccgccaccgaaggcggaggagggggaggaccgccaagagcgacgccgccgtgtgcccaacggtcggtgtccccggctgaggcaagcttgcggccgcagcagccctgtttgatctgtggatgaaatgaatcatgattttcaagctcttgcattagaatctcggggaatgggagagcttttgcctaccaaaaagttttgggaacctgatgattcaacaaaagatggacaaaaaggcatatttcttggggatgatgaatggagagagactgcatggggagcttctcaccattcaatgtcccagcctattatggtacagagaagatctggacagggttttcatggaaacagtgaagtaaatgcaatactgtctccgcgatcagaaagtggaggccttggtgtgagcatggtagaatatgtattaagttcttctcctgctgataaattggattctcgatttaggaagggaaattttggcactagagatgctgaaacagatggacctgagaaaggagatcaaaaaggcaaggcttctccatttgaggaggaccaaaacagagatcttaaacaaggagatgatgatgattctaaaataaatggcagaggtttgccaaatggaatggatgccgattgcaaagattttaatcgtactcctggaagtcgtcaagcctctccaactgaagtagttgagcgcttgggccccaatactaatccctcagaaggactggggcctcttcctaatcctacagctaataaaccacttgttgaagaattttcaaatcctgaaactcagaatctggatgccatggaacaagttggtctggaatccttacagtttgactatcctggtaatcaggtaccaatggactcttcaggagctactgtaggcctttttgactacaattcccagcagcagctctttcagaggactaatgcactaacagttcaacagttaactgcagctcaacagcagcaatatgcattagcagcagctcagcagccacatatagctggtgtattctcagcaggccttgctccagctgcatttgtgccaaatccatacattattagtgctgctcctccagggaccgatccgtatactgcagcaggattggctgcagcagctacattagcaggtccagcagtggttccacctcagtattacggcgttccatggggggtgtatccagccaacttatttcagcagcaagctgcagctgcggcaaataacacagccagtcagcaagcagcatcacaagctcagcctggacagcaacaggttctccgtgctggagcaggtcagcgtcctcttactcccaatcagggtcagcaagggcagcaagcagaatcacttgcggcagctgcagcagcaaatccaacattggcttttggtcagggtcttgctactggcatgccaggctatcaagtactagctccaactgcctattatgatcagactggtgccttagtggttggccctggagcaaggactggccttggagctccagttcggttaatggctccaacacctgttttaattagttcagcagcagcacaagctgcagcagcagcagcagctggaggaactgcaagtagccttacaggcagcacaaatggtctgtttcggccaattggcactcagccaccacagcagcagcaacagcagccaagcactaatctgcaatctaattcattttatggaagcagttctttgactaatagctcccagagtagttctttattttctcatggacctggtcaacctggaagtacatctcttggctttggaagtggtaactctttgggtgctgctataggctcagccctcagtggatttggttcatcagttggcagttctgcaagtagtagtgccacaaggagagagtctctatctactagctctgacttgtacaaaagatctagtagcagcctagcacccatagggcaaccattttacaatagtctgggattttcctcctctccaagtccaataggcatgcctctgccaagccaaactccaggacattcacttacgccaccgccatcactttcatcacatggatcctcatccagtttgcatttaggaggactgacaaatggtagtggtcgatatatctctgcagcacctggagcagaagcaaaatatcgaagtgcttcaagcacttccagtctatttagctccagcagccagctctttcctccttcccggcttcggtataataggtctgatattatgccttctggccgcagtagattattggaagatttcagaaacaaccgcttcccaaaccttcagcttagagacttgattggacatatagttgagttttctcaagaccagcatggttctaggctatcaagtactagctccaactgcctatncatgatcagactgggtgccttaggtgggttggcccctgggagcaaggactggccttgggagctccagttcggttaatggctccaacacctgttttaattagttcagcagcagcacaagctgcagcagcagcagcagctggaggaactgcaagtagccttacaggcagcacaaatggtctgtttcggccaattggcactcagccaccacagcagcagcaacagcagccaagcattaatctgcaatctaattcattttatggaagcagttctttgactaatagctcccagagtagttctttattttctcatggacctggtcaacctggaagtacatctcttggctttggaagtggtaactctttgggtgctgctataggctcagccctcagtggatttggttcatcaggtaagtttgtttttacgatgagtgtactctgctaagtggaagaggtatatgagtgtgtttaacattaaaataagcaataatagcatgtaggataggaaggacaggaataaagtattggactactggtttaatttgtaggaaaaaaaaatcctgcaaatcttttcaacactcaccaatgtttaactcactataggcagcctgttctttactcatatataatacatttcctttttcccctggctctaggaattgattactgtaatttttgttttagtagggtttatttgggtcaatatattattcactaattattagc

SEQ ID NO: 451359 - DNA, 1328 bp, Homo sapiens
gggcgggggggaggggagggcaggcggcggtggcagccatgttgttgtgagtctctgtgtctcaccctcggtacttcggtggttcggaggaggagggggaggagaaggaggaggtggggtggggggggagggtggtaggtggagaaagaagacattgccgccaccgaaggcggaggagggggaggaccgccaagagcgacgccgccgtgtgcccaacggtcggtgtccccggctgaggcaagcttgcggccgcagcagccctgtaagtcagtccgcgttcgctctttctccggtcctttggcgccgtcgaggatggctccccaggctttgtgcggcggcctcggcgggagccgatcgccagcgggagggcggatagggcctgctgagtgcccgggccggtgcggcctggggcccgctcgcacaatgcagggggaggggtgccggaagggggtgtgcgcgtgcgggggagggggcgccgcgccggccgctttcccgcttccttccctctgcggggccgccgcctcgggggcgtggggcgccgacccggttctccctccgattcggcgcgctggaggttagagaccgagctgtcggccctagggttcggaaagaggggagaggccgggtggccccagagaagcatgcggattgcaagtgggtgaagaggaaggagtgggtttatgaaaacaagtgtgggcattttcaaaggcccgagtgtgtccgggaaaagcttgccgtggacagatgtgggtatgaagcagtgacttggattcgccttgtttaggttataggaacggatttcgatattcagaaaaatatgtaaattaaaaccaaagacaagattagcggcttctactatttgagcagtagttttgtatctgaattgggtcaggttttggggaaaatgtttaaagtttcatgctcaaacacgtgtaaaagttagtgttgtttctgaaaacacagccagagaaaacctacttaacttagctttttattctaacatacgtaaacttttgaagagaggaatgtattgccagcatattaggtgcaataagacatcatgttaggacttagtactttgagatttttacttgttgagaaaacggggcagatgttttggtgaaggaaaacatgagaaaaatgcttgtaaacggtgaagagaaatgtaatacctgtaaaggtactgtatgtcaagaaaacaattttaataaagggagttaccgaaggattttaaaagcttgtttaatggttagatttcgtgtttaacaggtgactcttcaccatgtgacctggagtattggaagatgacttaaggaatcctgtaaata

SEQ ID NO: 451360 - DNA, 6463 bp, Homo sapiens
gggcgggggggaggggagggcaggcggcggtggcagccatgttgttgtgagtctctgtgtctcaccctcggtacttcggtggttcggaggaggagggggaggagaaggaggaggtggggtggggggggagggtggtaggtggagaaagaagacattgccgccaccgaaggcggaggagggggaggaccgccaagagcgacgccgccgtgtgcccaacggtcggtgtccccggctgaggcaagcttgcggccgcagcagccctgtttgatctgtggatgaaatgaatcatgattttcaagctcttgcattagaatctcggggaatgggagagcttttgcctaccaaaaagttttgggaacctgatgattcaacaaaagatggacaaaaaggcatatttcttggggatgatgaatggagagagactgcatggggagcttctcaccattcaatgtcccagcctattatggtacagagaagatctggacagggttttcatggaaacagtgaagtaaatgcaatactgtctccgcgatcagaaagtggaggccttggtgtgagcatggtagaatatgtattaagttcttctcctgctgataaattggattctcgatttaggaagggaaattttggcactagagatgctgaaacagatggacctgagaaaggagatcaaaaaggcaaggcttctccatttgaggaggaccaaaacagagatcttaaacaaggagatgatgatgattctaaaataaatggcagaggtttgccaaatggaatggatgccgattgcaaagattttaatcgtactcctggaagtcgtcaagcctctccaactgaagtagttgagcgcttgggccccaatactaatccctcagaaggactggggcctcttcctaatcctacagctaataaaccacttgttgaagaattttcaaatcctgaaactcagaatctggatgccatggaacaagttggtctggaatccttacagtttgactatcctggtaatcaggtaccaatggactcttcaggagctactgtaggcctttttgactacaattcccagcagcagctctttcagaggactaatgcactaacagttcaacagttaactgcagctcaacagcagcaatatgcattagcagcagctcagcagccacatatagctggtgtattctcagcaggccttgctccagctgcatttgtgccaaatccatacattattagtgctgctcctccagggaccgatccgtatactgcagcaggattggctgcagcagctacattagcaggtccagcagtggttccacctcagtattacggcgttccatggggggtgtatccagccaacttatttcagcagcaagctgcagctgcggcaaataacacagccagtcagcaagcagcatcacaagctcagcctggacagcaacaggttctccgtgctggagcaggtcagcgtcctcttactcccaatcagggtcagcaagggcagcaagcagaatcacttgcggcagctgcagcagcaaatccaacattggcttttggtcagggtcttgctactggcatgccaggctatcaagtactagctccaactgcctattatgatcagactggtgccttagtggttggccctggagcaaggactggccttggagctccagttcggttaatggctccaacacctgttttaattagttcagcagcagcacaagctgcagcagcagcagcagctggaggaactgcaagtagccttacaggcagcacaaatggtctgtttcggccaattggcactcagccaccacagcagcagcaacagcagccaagcactaatctgcaatctaattcattttatggaagcagttctttgactaatagctcccagagtagttctttattttctcatggacctggtcaacctggaagtacatctcttggctttggaagtggtaactctttgggtgctgctataggctcagccctcagtggatttggttcatcagttggcagttctgcaagtagtagtgccacaaggagagagtctctatctactagctctgacttgtacaaaagatctagtagcagcctagcacccatagggcaaccattttacaatagtctgggattttcctcctctccaagtccaataggcatgcctctgccaagccaaactccaggacattcacttacgccaccgccatcactttcatcacatggatcctcatccagtttgcatttaggaggactgacaaatggtagtggtcgatatatctctgcagcacctggagcagaagcaaaatatcgaagtgcttcaagcacttccagtctatttagctccagcagccagctctttcctccttcccggcttcggtataataggtctgatattatgccttctggccgcagtagattattggaagatttcagaaacaaccgcttcccaaaccttcagcttagagacttgattggacatatagttgagttttctcaagaccagcatggttctagattcatacagcaaaaactagagagagctactccagctgagcgacagatggtatttaatgaaattctgcaagcagcctatcaattaatgactgatgtttttggcaactatgttatacagaagttttttgagtttgggagtctggatcaaaaattagccctggctactcgtattcgtggtcatgttctacccttagccttgcagatgtatggctgccgcgttattcagaaagcattagaatctatttcttctgaccagcagagtgaaatggtaaaggagctggatggtcatgtgctcaaatgtgtgaaagatcagaatggaaaccatgttgtacaaaaatgtatcgaatgtgttcagccacagtcactacagttcatcattgatgctttcaagggacaagtatttgtgctttcaactcatccttatggctgcagagtaattcagcgcatcctagagcattgcactgcagaacagaccttacctatcttagaagaactccaccaacatacagagcagttggtacaggatcagtatggcaattatgttattcagcatgtactggaacacggtcgacctgaagacaagagcaaaattgtttccgaaatcaggggaaaggttttagccctgagtcaacacaaatttgccagcaatgtagtagaaaagtgtgttactcatgcctcccgtgctgagagagctttactgattgacgaggtttgctgccagaatgatggtcctcacagtgccttatacaccatgatgaaggaccagtatgccaattacgtggttcaaaagatgattgatatggctgaacctgctcagagaaagataatcatgcacaagattcgacctcacattactactttgcgcaaatacacatacgggaagcatatactggccaagttggaaaagtattatttgaagaatagcccggacctaggacctattggaggaccaccaaatggaatgctgtaaattacaggagcaagagaaagaagataatttaaccatgtgaaaagaatttttttgtgtgtgaattatcaaaacacaactcaactatgaatcttcaatttttttttaaagcaaaactatttattgactttattcatccatttgtaaattttttaaggttcttgtgtatatttggggggtgggggatgaattataaattatattcagccctgagtggagacctatcagattggattgctggcaaagcacagaatgcctgtatatgatgtaactgtatcaaaaataaaaagctgtcacatattttgtaaatttttaccttgtaaagtcacaaaaatagtttttaaaggaaaaagtacagtattcttttaataaactggctcacagtctggtaggtctacaaccccatagcacaacaggtttatagagatgtatatagaattatagtccttatttttttcctttgcgtgaaaccttttataacagattaacaatcaactgcataaatattattaatattttaaaaagagttaagttgtattttgataattcacaaactatcatgcaaataacgagtaagtagacaagaataaagtggtttgagatgaaaagaacctaacattatttacagtagatgtggttttaatacaattactgccctaaaatgtctctggcaatgtacagaaatattgtatatacttacatatgtaattgttgtaagagttaaatacaaaatcatggtgacacttccaattaagtgcactaaatgaaaagttaagtcacttattaacttttcagtttggtttgcaatgagaaagagtggaaatttgtattttgttttgcttatagaattacagacatgttgaggaagtgttgagctttattttgctttttcatagaggcagaaagtaggaaccagatagagatgaaaaggggccactgaaaagtgaatttgatagctcagcatttaagcatgattacatattcagatagctctttttgctttctataaatatatgcattgtgtgtgtagtaatagatgtaagtttacactttgaaaggaaatcttgtttcaatgtttattataaaagccttgctaatttagtagtgatgctttccttggttgtacaggtgtacatttgtaaaccttcatgctgtaaatggaatttgttttatctctttgggatacatttgcattttagtgtacatttacgtccctgccctctttgacctggcaatatagtgttgtataatgtaaatttatttctccaaatcgagagtgattttttaaaaattttttatctttatatggtttcagaagtatgaaccagctttctttttattattgtgagatcattttgttttataacatagttgttgactgttaatatggacctgctagaatttggatcactttcaattgaagtcagggtattgtgcataatagaaagtattggactgagatatttggttaccatggaggccaatgcttttttcatcttattaaatgtgatgtgacttttttctttgtacagaagagtactgtatttttgaatagcctactcccaagtaagagcaaatctgtatgataacattttttcctctggacataagacataacagtaacacgatgtacatttacaagcggccttatgtacatttcccaacaatctttttaaggcaaaattgtgaccatatgtgtataattaaaatcgtttttaatcctttgcctatgaaaatattttggaaaaaaacttgctgtgtatattcagtttctgaaagataaagaaagtgctttgtattttgttgaagtcagtattttgtataaacatttatgttgacccacttatgttcagtgctgaaaactaaaatgaacatgctattctgtcagctgaatatggaagagatctttttttactagagatctgcagaagaaacgcaatcttctgagcacaatatggaatctaaaggttttatcacttagttgttcatattatgaacctaaaaataatggcataaagtttggggatgccaggcatactttttcatgtttggtgttgagttattttacttttctaacccaacattccttggtgagaccattaaatccaaacacttgtcaccgttccttctcatagtcactctgggtcatcagcatgtcccagtcactgcagcaacgccttgtgtttgtttcatttttttaaaacccacacaaagccgctgtctcactttttcctactttaccaacctcagagtatttcggcccgtatcgaacttttgttctcagtatcagcccatggtttcaggatcaaagctgtcatgttggagattggtaatggctttcctgtctttgtacagttgaattcctagtcttccttcatccttgccctctgttggcacaggcattatctctgcaattttagaaaatgacaagtagagaatactacattgagaaactaaaccctcttcttggggtcctgatactcattcccatttgtcccagtgctgacaacccaatcttcccaatactttcaggcctgctctacaaaagtacctgttcttgtagaaattttacagtctgccattttgggtgcccaccccaatttttaccttttagtaagttggcatgaaattttggtaaaatctgaaaatcacatttcagaataaaacaattgggcaaaactacctaggctttactcttgagtgtctccttttgatagggattgtttctggaccagtttgtctaagtcctggctcttattggttcatatgaaataatgttaacttcacttctttgtatattatgtataaattagaaaatgaaaaatgtgtgaataacattgtatgaaataaacctggtcttgtgtttttctctagataaaataaaaatctgtacctcagttataacttaagattgattgcccattcaggtttactccgacgtaaagaaaacaaacatttttaacacatgggtgctgttctggagccactgat

SEQ ID NO: 451361 - DNA, 6084 bp, Homo sapiens
gggcgggggggaggggagggcaggcggcggtggcagccatgttgttgtgagtctctgtgtctcaccctcggtacttcggtggttcggaggaggagggggaggagaaggaggaggtggggtggggggggagggtggtaggtggagaaagaagacattgccgccaccgaaggcggaggagggggaggaccgccaagagcgacgccgccgtgtgcccaacggtcggtgtccccggctgaggcaagcttgcggccgcagcagccctgtttgatctgtggatgaaatgaatcatgattttcaagctcttgcattagaatctcggggaatgggagagcttttgcctaccaaaaagttttgggaacctgatgattcaacaaaagatggacaaaaaggcatatttcttggggatgatgaatggagagagactgcatggggagcttctcaccattcaatgtcccagcctattatggtacagagaagatctggacagggttttcatggaaacagtgaagtaaatgcaatactgtctccgcgatcagaaagtggaggccttggtgtgagcatggtagaatatgtattaagttcttctcctgctgataaattggattctcgatttaggaagggaaattttggcactagagatgctgaaacagatggacctgagaaaggagatcaaaaaggcaaggcttctccatttgaggaggaccaaaacagagatcttaaacaaggagatgatgatgattctaaaataaatggcagaggtttgccaaatggaatggatgccgattgcaaagattttaatcgtactcctggaagtcgtcaagcctctccaactgaagtagttgagcgcttgggccccaatactaatccctcagaaggactggggcctcttcctaatcctacagctaataaaccacttgttgaagaattttcaaatcctgaaactcagaatctggatgccatggaacaagttggtctggaatccttacagtttgactatcctggtaatcaggtaccaatggactcttcaggagctactgtaggcctttttgactacaattcccagcagcagctctttcagaggactaatgcactaacagttcaacagttaactgcagctcaacagcagcaatatgcattagcagcagctcagcagccacatatagctggtgtattctcagcaggccttgctccagctgcatttgtgccaaatccatacattattagtgctgctcctccagggaccgatccgtatactgcagcaggattggctgcagcagctacattagcaggtccagcagtggttccacctcagtattacggcgttccatggggggtgtatccagccaacttatttcagcagcaagctgcagctgcggcaaataacacagccagtcagcaagcagcatcacaagctcagcctggacagcaacaggttctccgtgctggagcaggtcagcgtcctcttactcccaatcagggtcagcaagggcagcaagcagaatcacttgcggcagctgcagcagcaaatccaacattggcttttggtcagggtcttgctactggcatgccaggctatcaagtactagctccaactgcctattatgatcagactggtgccttagtggttggccctggagcaaggactggccttggagctccagttcggttaatggctccaacacctgttttaattagttcagcagcagcacaagctgcagcagcagcagcagctggaggaactgcaagtagccttacaggcagcacaaatggtctgtttcggccaattggcactcagccaccacagcagcagcaacagcagccaagcactaatctgcaatctaattcattttatggaagcagttctttgactaatagctcccagagtagttctttattttctcatggacctggtcaacctggaagtacatctcttggctttggaagtggtaactctttgggtgctgctataggctcagccctcagtggatttggttcatcaggaggactgacaaatggtagtggtcgatatatctctgcagcacctggagcagaagcaaaatatcgaagtgcttcaagcacttccagtctatttagctccagcagccagctctttcctccttcccggcttcggtataataggtctgatattatgccttctggccgcagtagattattggaagatttcagaaacaaccgcttcccaaaccttcagcttagagacttgattggacatatagttgagttttctcaagaccagcatggttctagattcatacagcaaaaactagagagagctactccagctgagcgacagatggtatttaatgaaattctgcaagcagcctatcaattaatgactgatgtttttggcaactatgttatacagaagttttttgagtttgggagtctggatcaaaaattagccctggctactcgtattcgtggtcatgttctacccttagccttgcagatgtatggctgccgcgttattcagaaagcattagaatctatttcttctgaccagcagagtgaaatggtaaaggagctggatggtcatgtgctcaaatgtgtgaaagatcagaatggaaaccatgttgtacaaaaatgtatcgaatgtgttcagccacagtcactacagttcatcattgatgctttcaagggacaagtatttgtgctttcaactcatccttatggctgcagagtaattcagcgcatcctagagcattgcactgcagaacagaccttacctatcttagaagaactccaccaacatacagagcagttggtacaggatcagtatggcaattatgttattcagcatgtactggaacacggtcgacctgaagacaagagcaaaattgtttccgaaatcaggggaaaggttttagccctgagtcaacacaaatttgccagcaatgtagtagaaaagtgtgttactcatgcctcccgtgctgagagagctttactgattgacgaggtttgctgccagaatgatggtcctcacagtgccttatacaccatgatgaaggaccagtatgccaattacgtggttcaaaagatgattgatatggctgaacctgctcagagaaagataatcatgcacaagattcgacctcacattactactttgcgcaaatacacatacgggaagcatatactggccaagttggaaaagtattatttgaagaatagcccggacctaggacctattggaggaccaccaaatggaatgctgtaaattacaggagcaagagaaagaagataatttaaccatgtgaaaagaatttttttgtgtgtgaattatcaaaacacaactcaactatgaatcttcaatttttttttaaagcaaaactatttattgactttattcatccatttgtaaattttttaaggttcttgtgtatatttggggggtgggggatgaattataaattatattcagccctgagtggagacctatcagattggattgctggcaaagcacagaatgcctgtatatgatgtaactgtatcaaaaataaaaagctgtcacatattttgtaaatttttaccttgtaaagtcacaaaaatagtttttaaaggaaaaagtacagtattcttttaataaactggctcacagtctggtaggtctacaaccccatagcacaacaggtttatagagatgtatatagaattatagtccttatttttttcctttgcgtgaaaccttttataacagattaacaatcaactgcataaatattattaatattttaaaaagagttaagttgtattttgataattcacaaactatcatgcaaataacgagtaagtagacaagaataaagtggtttgagatgaaaagaacctaacattatttacagtagatgtggttttaatacaattactgccctaaaatgtctctggcaatgtacagaaatattgtatatacttacatatgtaattgttgtaagagttaaatacaaaatcatggtgacacttccaattaagtgcactaaatgaaaagttaagtcacttattaacttttcagtttggtttgcaatgagaaagagtggaaatttgtattttgttttgcttatagaattacagacatgttgaggaagtgttgagctttattttgctttttcatagaggcagaaagtaggaaccagatagagatgaaaaggggccactgaaaagtgaatttgatagctcagcatttaagcatgattacatattcagatagctctttttgctttctataaatatatgcattgtgtgtgtagtaatagatgtaagtttacactttgaaaggaaatcttgtttcaatgtttattataaaagccttgctaatttagtagtgatgctttccttggttgtacaggtgtacatttgtaaaccttcatgctgtaaatggaatttgttttatctctttgggatacatttgcattttagtgtacatttacgtccctgccctctttgacctggcaatatagtgttgtataatgtaaatttatttctccaaatcgagagtgattttttaaaaattttttatctttatatggtttcagaagtatgaaccagctttctttttattattgtgagatcattttgttttataacatagttgttgactgttaatatggacctgctagaatttggatcactttcaattgaagtcagggtattgtgcataatagaaagtattggactgagatatttggttaccatggaggccaatgcttttttcatcttattaaatgtgatgtgacttttttctttgtacagaagagtactgtatttttgaatagcctactcccaagtaagagcaaatctgtatgataacattttttcctctggacataagacataacagtaacacgatgtacatttacaagcggccttatgtacatttcccaacaatctttttaaggcaaaattgtgaccatatgtgtataattaaaatcgtttttaatcctttgcctatgaaaatattttggaaaaaaacttgctgtgtatattcagtttctgaaagataaagaaagtgctttgtattttgttgaagtcagtattttgtataaacatttatgttgacccacttatgttcagtgctgaaaactaaaatgaacatgctattctgtcagctgaatatggaagagatctttttttactagagatctgcagaagaaacgcaatcttctgagcacaatatggaatctaaaggttttatcacttagttgttcatattatgaacctaaaaataatggcataaagtttggggatgccaggcatactttttcatgtttggtgttgagttattttacttttctaacccaacattccttggtgagaccattaaatccaaacacttgtcaccgttccttctcatagtcactctgggtcatcagcatgtcccagtcactgcagcaacgccttgtgtttgtttcatttttttaaaacccacacaaagccgctgtctcactttttcctactttaccaacctcagagtatttcggcccgtatcgaacttttgttctcagtatcagcccatggtttcaggatcaaagctgtcatgttggagattggtaatggctttcctgtctttgtacagttgaattcctagtcttccttcatccttgccctctgttggcacaggcattatctctgcaattttagaaaatgacaagtagagaatactacattgagaaactaaaccctcttcttggggtcctgatactcattcccatttgtcccagtgctgacaacccaatcttcccaatactttcaggcctgctctacaaaagtacctgttcttgtagaaattttacagtctgccattttgggtgcccaccccaatttttaccttttagtaagttggcatgaaattttggtaaaatctgaaaatcacatttcagaataaaacaattgggcaaaactacctaggctttactcttgagtgtctccttttgatagggattgtttctggaccagtttgtctaagtcctggctcttattggttcatatgaaataatgttaacttcacttctttgtatattatgtataaattagaaaatgaaaaatgtgtgaataacattgtatgaaata

SEQ ID NO: 451362 - DNA, 5146 bp, Homo sapiens
atgaacgaattctattcaaataccatagtacacacaccacgcagtccaaataatcacagacatctacaaagtcagtgagcagagacaatgagcagaaaagccggggcagcaacaggttctccgtgctggagcaggtcagcgtcctcttactcccaatcagggtcagcaagggcagcaagcagaatcacttgcggcagctgcagcagcaaatccaacattggcttttggtcagggtcttgctactggcatgccaggctatcaagtactagctccaactgcctattatgatcagactggtgccttagtggttggccctggagcaaggactggccttggagctccagttcggttaatggctccaacacctgttttaattagttcagcagcagcacaagctgcagcagcagcagcagctggaggaactgcaagtagccttacaggcagcacaaatggtctgtttcggccaattggcactcagccaccacagcagcagcaacagcagccaagcactaatctgcaatctaattcattttatggaagcagttctttgactaatagctcccagagtagttctttattttctcatggacctggtcaacctggaagtacatctcttggctttggaagtggtaactctttgggtgctgctataggctcagccctcagtggatttggttcatcagttggcagttctgcaagtagtagtgccacaaggagagagtctctatctactagctctgacttgtacaaaagatctagtagcagcctagcacccatagggcaaccattttacaatagtctgggattttcctcctctccaagtccaataggcatgcctctgccaagccaaactccaggacattcacttacgccaccgccatcactttcatcacatggatcctcatccagtttgcatttaggaggactgacaaatggtagtggtcgatatatctctgcagcacctggagcagaagcaaaatatcgaagtgcttcaagcacttccagtctatttagctccagcagccagctctttcctccttcccggcttcggtataataggtctgatattatgccttctggccgcagtagattattggaagatttcagaaacaaccgcttcccaaaccttcagcttagagacttgattggacatatagttgagttttctcaagaccagcatggttctagattcatacagcaaaaactagagagagctactccagctgagcgacagatggtatttaatgaaattctgcaagcagcctatcaattaatgactgatgtttttggcaactatgttatacagaagttttttgagtttgggagtctggatcaaaaattagccctggctactcgtattcgtggtcatgttctacccttagccttgcagatgtatggctgccgcgttattcagaaagcattagaatctatttcttctgaccagcagagtgaaatggtaaaggagctggatggtcatgtgctcaaatgtgtgaaagatcagaatggaaaccatgttgtacaaaaatgtatcgaatgtgttcagccacagtcactacagttcatcattgatgctttcaagggacaagtatttgtgctttcaactcatccttatggctgcagagtaattcagcgcatcctagagcattgcactgcagaacagaccttacctatcttagaagaactccaccaacatacagagcagttggtacaggatcagtatggcaattatgttattcagcatgtactggaacacggtcgacctgaagacaagagcaaaattgtttccgaaatcaggggaaaggttttagccctgagtcaacacaaatttgccagcaatgtagtagaaaagtgtgttactcatgcctcccgtgctgagagagctttactgattgacgaggtttgctgccagaatgatggtcctcacagtgccttatacaccatgatgaaggaccagtatgccaattacgtggttcaaaagatgattgatatggctgaacctgctcagagaaagataatcatgcacaagattcgacctcacattactactttgcgcaaatacacatacgggaagcatatactggccaagttggaaaagtattatttgaagaatagcccggacctaggacctattggaggaccaccaaatggaatgctgtaaattacaggagcaagagaaagaagataatttaaccatgtgaaaagaatttttttgtgtgtgaattatcaaaacacaactcaactatgaatcttcaatttttttttaaagcaaaactatttattgactttattcatccatttgtaaattttttaaggttcttgtgtatatttggggggtgggggatgaattataaattatattcagccctgagtggagacctatcagattggattgctggcaaagcacagaatgcctgtatatgatgtaactgtatcaaaaataaaaagctgtcacatattttgtaaatttttaccttgtaaagtcacaaaaatagtttttaaaggaaaaagtacagtattcttttaataaactggctcacagtctggtaggtctacaaccccatagcacaacaggtttatagagatgtatatagaattatagtccttatttttttcctttgcgtgaaaccttttataacagattaacaatcaactgcataaatattattaatattttaaaaagagttaagttgtattttgataattcacaaactatcatgcaaataacgagtaagtagacaagaataaagtggtttgagatgaaaagaacctaacattatttacagtagatgtggttttaatacaattactgccctaaaatgtctctggcaatgtacagaaatattgtatatacttacatatgtaattgttgtaagagttaaatacaaaatcatggtgacacttccaattaagtgcactaaatgaaaagttaagtcacttattaacttttcagtttggtttgcaatgagaaagagtggaaatttgtattttgttttgcttatagaattacagacatgttgaggaagtgttgagctttattttgctttttcatagaggcagaaagtaggaaccagatagagatgaaaaggggccactgaaaagtgaatttgatagctcagcatttaagcatgattacatattcagatagctctttttgctttctataaatatatgcattgtgtgtgtagtaatagatgtaagtttacactttgaaaggaaatcttgtttcaatgtttattataaaagccttgctaatttagtagtgatgctttccttggttgtacaggtgtacatttgtaaaccttcatgctgtaaatggaatttgttttatctctttgggatacatttgcattttagtgtacatttacgtccctgccctctttgacctggcaatatagtgttgtataatgtaaatttatttctccaaatcgagagtgattttttaaaaattttttatctttatatggtttcagaagtatgaaccagctttctttttattattgtgagatcattttgttttataacatagttgttgactgttaatatggacctgctagaatttggatcactttcaattgaagtcagggtattgtgcataatagaaagtattggactgagatatttggttaccatggaggccaatgcttttttcatcttattaaatgtgatgtgacttttttctttgtacagaagagtactgtatttttgaatagcctactcccaagtaagagcaaatctgtatgataacattttttcctctggacataagacataacagtaacacgatgtacatttacaagcggccttatgtacatttcccaacaatctttttaaggcaaaattgtgaccatatgtgtataattaaaatcgtttttaatcctttgcctatgaaaatattttggaaaaaaacttgctgtgtatattcagtttctgaaagataaagaaagtgctttgtattttgttgaagtcagtattttgtataaacatttatgttgacccacttatgttcagtgctgaaaactaaaatgaacatgctattctgtcagctgaatatggaagagatctttttttactagagatctgcagaagaaacgcaatcttctgagcacaatatggaatctaaaggttttatcacttagttgttcatattatgaacctaaaaataatggcataaagtttggggatgccaggcatactttttcatgtttggtgttgagttattttacttttctaacccaacattccttggtgagaccattaaatccaaacacttgtcaccgttccttctcatagtcactctgggtcatcagcatgtcccagtcactgcagcaacgccttgtgtttgtttcatttttttaaaacccacacaaagccgctgtctcactttttcctactttaccaacctcagagtatttcggcccgtatcgaacttttgttctcagtatcagcccatggtttcaggatcaaagctgtcatgttggagattggtaatggctttcctgtctttgtacagttgaattcctagtcttccttcatccttgccctctgttggcacaggcattatctctgcaattttagaaaatgacaagtagagaatactacattgagaaactaaaccctcttcttggggtcctgatactcattcccatttgtcccagtgctgacaacccaatcttcccaatactttcaggcctgctctacaaaagtacctgttcttgtagaaattttacagtctgccattttgggtgcccaccccaatttttaccttttagtaagttggcatgaaattttggtaaaatctgaaaatcacatttcagaataaaacaattgggcaaaactacctaggctttactcttgagtgtctccttttgatagggattgtttctggaccagtttgtctaagtcctggctcttattggttcatatgaaataatgttaacttcacttctttgtatattatgtataaattagaaaatgaaaaatgtgtgaataacattgtatgaaataaacctggtcttgtgtttttctctagataaaataaaaatctgtacctcagttataacttaagattgattgcccattcaggtttactccgacgtaaagaaaacaaacatttttaacacatgggtgctgttctggagccactgat

SEQ ID NO: 451363 - DNA, 6410 bp, Homo sapiens
gggcgggggggaggggagggcaggcggcggtggcagccatgttgttgtgagtctctgtgtctcaccctcggtacttcggtggttcggaggaggagggggaggagaaggaggaggtggggtggggggggagggtggtaggtggagaaagaagacattgccgccaccgaaggcggaggagggggaggaccgccaagagcgacgccgccgtgtgcccaacggtcggtgtccccggctgaggcaagcttgcggccgcagcagccctgtttgatctgtggatgaaatgaatcatgattttcaagctcttgcattagaatctcggggaatgggagagcttttgcctaccaaaaagttttgggaacctgatgattcaacaaaagatggacaaaaaggcatatttcttggggatgatgaatggagagagactgcatggggagcttctcaccattcaatgtcccagcctattatggtacagagaagatctggacagggttttcatggaaacagtgaagtaaatgcaatactgtctccgcgatcagaaagtggaggccttggtgtgagcatggtagaatatgtattaagttcttctcctgctgataaattggattctcgatttaggaagggaaattttggcactagagatgctgaaacagatggacctgagaaaggagatcaaaaaggcaaggcttctccatttgaggaggaccaaaacagagatcttaaacaaggagatgatgatgattctaaaataaatggcagaggtttgccaaatggaatggatgccgattgcaaagattttaatcgtactcctggaagtcgtcaagcctctccaactgaagtagttgagcgcttgggccccaatactaatccctcagaaggactggggcctcttcctaatcctacagctaataaaccacttgttgaagaattttcaaatcctgaaactcagaatctggatgccatggaacaagttggtctggaatccttacagtttgactatcctggtaatcaggtaccaatggactcttcaggagctactgtaggcctttttgactacaattcccagcagcagctctttcagaggactaatgcactaacagttcaacagttaactgcagctcaacagcagcaatatgcattagcagcagctcagcagccacatatagctggtgtattctcagcaggccttgctccagctgcatttgtgccaaatccatacattattagtgctgctcctccagggaccgatccgtatactgcagcaggattggctgcagcagctacattagcaggtccagcagtggttccacctcagtattacggcgttccatggggggtgtatccagccaacttatttcagcagcaagctgcagctgcggcaaataacacagccagtcagcaagcagcatcacaagctcagcctggacagcaacaggttctccgtgctggagcaggtcagcgtcctcttactcccaatcagggtcagcaagggcagcaagcagaatcacttgcggcagctgcagcagcaaatccaacattggcttttggtcagggtcttgctactggcatgccaggctatcaagtactagctccaactgcctattatgatcagactggtgccttagtggttggccctggagcaaggactggccttggagctccagttcggttaatggctccaacacctgttttaattagttcagcagcagcacaagctgcagcagcagcagcagctggaggaactgcaagtagccttacaggcagcacaaatggtctgtttcggccaattggcactcagccaccacagcagcagcaacagcagccaagcactaatctgcaatctaattcattttatggaagcagttctttgactaatagctcccagagtagttctttattttctcatggacctggtcaacctggaagtacatctcttggctttggaagtggtaactctttgggtgctgctataggctcagccctcagtggatttggttcatcagttggcagttctgcaagtagtagtgccacaaggagagagtctctatctactagctctgacttgtacaaaagatctagtagcagcctagcacccatagggcaaccattttacaatagtctgggattttcctcctctccaagtccaataggcatgcctctgccaagccaaactccaggacattcacttacgccaccgccatcactttcatcacatggatcctcatccagtttgcatttaggaggactgacaaatggtagtggtcgatatatctctgcagcacctggagcagaagcaaaatatcgaagtgcttcaagcacttccagtctatttagctccagcagccagctctttcctccttcccggcttcggtataataggtctgatattatgccttctggccgcagtagattattggaagatttcagaaacaaccgcttcccaaaccttcagcttagagacttgattggacatatagttgagttttctcaagaccagcatggttctagattcatacagcaaaaactagagagagctactccagctgagcgacagatggtatttaatgaaattctgcaagcagcctatcaattaatgactgatgtttttggcaactatgttatacagaagttttttgagtttgggagtctggatcaaaaattagccctggctactcgtattcgtggtcatgttctacccttagccttgcagatgtatggctgccgcgttattcagaaagcattagaatctatttcttctgaccagcagagtgaaatggtaaaggagctggatggtcatgtgctcaaatgtgtgaaagatcagaatggaaaccatgttgtacaaaaatgtatcgaatgtgttcagccacagtcactacagttcatcattgatgctttcaagggacaagtatttgtgctttcaactcatccttatggctgcagagtaattcagcgcatcctagagcattgcactgcagaacagaccttacctatcttagaagaactccaccaacatacagagcagttggtacaggatcagtatggcaattatgttattcagcatgtactggaacacggtcgacctgaagacaagagcaaaattgtttccgaaatcaggggaaaggttttagccctgagtcaacacaaatttgccagcaatgtagtagaaaagtgtgttactcatgcctcccgtgctgagagagctttactgattgacgaggtttgctgccagaatgatggtcctcacagtgccttatacaccatgatgaaggaccagtatgccaattacgtggttcaaaagatgattgatatggctgaacctgctcagagaaagataatcatgcacaagattcgacctcacattactactttgcgcaaatacacatacgggaagcatatactggccaagttggaaaagtattatttgaagaatagcccggacctaggacctattggaggaccaccaaatggaatgctgtaaattacaggagcaagagaaagaagataatttaaccatgtgaaaagaatttttttgtgtgtgaattatcaaaacacaactcaactatgaatcttcaatttttttttaaagcaaaactatttattgactttattcatccatttgtaaattttttaaggttcttgtgtatatttggggggtgggggatgaattataaattatattcagccctgagtggagacctatcagattggattgctggcaaagcacagaatgcctgtatatgatgtaactgtatcaaaaataaaaagctgtcacatattttgtaaatttttaccttgtaaagtcacaaaaatagtttttaaaggaaaaagtacagtattcttttaataaactggctcacagtctggtaggtctacaaccccatagcacaacaggtttatagagatgtatatagaattatagtccttatttttttcctttgcgtgaaaccttttataacagattaacaatcaactgcataaatattattaatattttaaaaagagttaagttgtattttgataattcacaaactatcatgcaaataacgagtaagtagacaagaataaagtggtttgagatgaaaagaacctaacattatttacagtagatgtggttttaatacaattactgccctaaaatgtctctggcaatgtacagaaatattgtatatacttacatatgtaattgttgtaagagttaaatacaaaatcatggtgacacttccaattaagtgcactaaatgaaaagttaagtcacttattaacttttcagtttggtttgcaatgagaaagagtggaaatttgtattttgttttgcttatagaattacagacatgttgaggaagtgttgagctttattttgctttttcatagaggcagaaagtaggaaccagatagagatgaaaaggggccactgaaaagtgaatttgatagctcagcatttaagcatgattacatattcagatagctctttttgctttctataaatatatgcattgtgtgtgtagtaatagatgtaagtttacactttgaaaggaaatcttgtttcaatgtttattataaaagccttgctaatttagtagtgatgctttccttggttgtacaggtgtacatttgtaaaccttcatgctgtaaatggaatttgttttatctctttgggatacatttgcattttagtgtacatttacgtccctgccctctttgacctggcaatatagtgttgtataatgtaaatttatttctccaaatcgagagtgattttttaaaaattttttatctttatatggtttcagaagtatgaaccagctttctttttattattgtgagatcattttgttttataacatagttgttgactgttaatatggacctgctagaatttggatcactttcaattgaagtcagggtattgtgcataatagaaagtattggactgagatatttggttaccatggaggccaatgcttttttcatcttattaaatgtgatgtgacttttttctttgtacagaagagtactgtatttttgaatagcctactcccaagtaagagcaaatctgtatgataacattttttcctctggacataagacataacagtaacacgatgtacatttacaagcggccttatgtacatttcccaacaatctttttaaggcaaaattgtgaccatatgtgtataattaaaatcgtttttaatcctttgcctatgaaaatattttggaaaaaaacttgctgtgtatattcagtttctgaaagataaagaaagtgctttgtattttgttgaagtcagtattttgtataaacatttatgttgacccacttatgttcagtgctgaaaatagagatctgcagaagaaacgcaatcttctgagcacaatatggaatctaaaggttttatcacttagttgttcatattatgaacctaaaaataatggcataaagtttggggatgccaggcatactttttcatgtttggtgttgagttattttacttttctaacccaacattccttggtgagaccattaaatccaaacacttgtcaccgttccttctcatagtcactctgggtcatcagcatgtcccagtcactgcagcaacgccttgtgtttgtttcatttttttaaaacccacacaaagccgctgtctcactttttcctactttaccaacctcagagtatttcggcccgtatcgaacttttgttctcagtatcagcccatggtttcaggatcaaagctgtcatgttggagattggtaatggctttcctgtctttgtacagttgaattcctagtcttccttcatccttgccctctgttggcacaggcattatctctgcaattttagaaaatgacaagtagagaatactacattgagaaactaaaccctcttcttggggtcctgatactcattcccatttgtcccagtgctgacaacccaatcttcccaatactttcaggcctgctctacaaaagtacctgttcttgtagaaattttacagtctgccattttgggtgcccaccccaatttttaccttttagtaagttggcatgaaattttggtaaaatctgaaaatcacatttcagaataaaacaattgggcaaaactacctaggctttactcttgagtgtctccttttgatagggattgtttctggaccagtttgtctaagtcctggctcttattggttcatatgaaataatgttaacttcacttctttgtatattatgtataaattagaaaatgaaaaatgtgtgaataacattgtatgaaataaacctggtcttgtgtttttctctagataaaataaaaatctgtacctcagttataacttaagattgattgcccattcaggtttactccgacgtaaagaaaacaaacatttttaacacatgggtgctgttctggagccactgat

SEQ ID NO: 451364 - DNA, 5196 bp, Homo sapiens
gggcgggggggaggggagggcaggcggcggtggcagccatgttgttgtgagtctctgtgtctcaccctcggtacttcggtggttcggaggaggagggggaggagaaggaggaggtggggtggggggggagggtggtaggtggagaaagaagacattgccgccaccgaaggcggaggagggggaggaccgccaagagcgacgccgccgtgtgcccaacggtcggtgtccccggctgaggcaagcttgcggccgcagcagccctgtttgatctgtggatgaaatgaatcatgattttcaagctcttgcattagaatctcggggaatgggagagcttttgcctaccaaaaagttttgggaacctgatgattcaacaaaagatggacaaaaaggcatatttcttggggatgatgaatggagagagactgcatggggagcttctcaccattcaatgtcccagcctattatggtacagagaagatctggacagggttttcatggaaacagtgaagtaaatgcaatactgtctccgcgatcagaaagtggaggccttggtgtgagcatggtagaatatgtattaagttcttctcctgctgataaattggattctcgatttaggaagggaaattttggcactagagatgctgaaacagatggacctgagaaaggagatcaaaaaggcaaggcttctccatttgaggaggaccaaaacagagatcttaaacaaggagatgatgatgattctaaaataaatggcagaggtttgccaaatggaatggatgccgattgcaaagattttaatcgtactcctggaagtcgtcaagcctctccaactgaagtagttgagcgcttgggccccaatactaatccctcagaaggactggggcctcttcctaatcctacagctaataaaccacttgttgaagaattttcaaatcctgaaactcagaatctggatgccatggaacaagttggtctggaatccttacagtttgactatcctggtaatcaggtaccaatggactcttcaggagctactgtaggcctttttgactacaattcccagcagcagctctttcagaggactaatgcactaacagttcaacagttaactgcagctcaacagcagcaatatgcattagcagcagctcagcagccacatatagctggtgtattctcagcaggccttgctccagctgcatttgtgccaaatccatacattattagtgctgctcctccagggaccgatccgtatactgcagcaggattggctgcagcagctacattagcaggtccagcagtggttccacctcagtattacggcgttccatggggggtgtatccagccaacttatttcagcagcaagctgcagctgcggcaaataacacagccagtcagcaagcagcatcacaagctcagcctggacagcaacaggttctccgtgctggagcaggtcagcgtcctcttactcccaatcagggtcagcaagggcagcaagcagaatcacttgcggcagctgcagcagcaaatccaacattggcttttggtcagggtcttgctactggcatgccaggctatcaagtactagctccaactgcctattatgatcagactggtgccttagtggttggccctggagcaaggactggccttggagctccagttcggttaatggctccaacacctgttttaattagttcagcagcagcacaagctgcagcagcagcagcagctggaggaactgcaagtagccttacaggcagcacaaatggtctgtttcggccaattggcactcagccaccacagcagcagcaacagcagccaagcactaatctgcaatctaattcattttatggaagcagttctttgactaatagctcccagagtagttctttattttctcatggacctggtcaacctggaagtacatctcttggctttggaagtggtaactctttgggtgctgctataggctcagccctcagtggatttggttcatcagttggcagttctgcaagtagtagtgccacaaggagagagtctctatctactagctctgacttgtacaaaagatctagtagcagcctagcacccatagggcaaccattttacaatagtctgggattttcctcctctccaagtccaataggcatgcctctgccaagccaaactccaggacattcacttacgccaccgccatcactttcatcacatggatcctcatccagtttgcatttaggaggactgacaaatggtagtggtcgatatatctctgcagcacctggagcagaagcaaaatatcgaagtgcttcaagcacttccagtctatttagctccagcagccagctctttcctccttcccggcttcggtataataggtctgatattatgccttctggccgcagtagattattggaagatttcagaaacaaccgcttcccaaaccttcagcttagagacttgattggacatatagttgagttttctcaagaccagcatggttctagattcatacagcaaaaactagagagagctactccagctgagcgacagatggtatttaatgaaattctgcaagcagcctatcaattaatgactgatgtttttggcaactatgttatacagaagttttttgagtttgggagtctggatcaaaaattagccctggctactcgtattcgtggtcatgttctacccttagccttgcagatgtatggctgccgcgttattcagaaagcattagaatctatttcttctgaccagcagagtgaaatggtaaaggagctggatggtcatgtgctcaaatgtgtgaaagatcagaatggaaaccatgttgtacaaaaatgtatcgaatgtgttcagccacagtcactacagttcatcattgatgctttcaagggacaagtatttgtgctttcaactcatccttatggctgcagagtaattcagcgcatcctagagcattgcactgcagaacagaccttacctatcttagaagaactccaccaacatacagagcagttggtacaggatcagtatggcaattatgttattcagcatgtactggaacacggtcgacctgaagacaagagcaaaattgtttccgaaatcaggggaaaggttttagccctgagtcaacacaaatttgccagcaatgtagtagaaaagtgtgttactcatgcctcccgtgctgagagagctttactgattgacgaggtttgctgccagaatgatggtcctcacagtgccttatacaccatgatgaaggaccagtatgccaattacgtggttcaaaagatgattgatatggctgaacctgctcagagaaagataatcatgcacaagattcgacctcacattactactttgcgcaaatacacatacgggaagcatatactggccaagttggaaaagtattatttgaagaatagcccggacctaggacctattggaggaccaccaaatggaatgctgtaaattacaggagcaagagaaagaagataatttaaccatgtgaaaagaatttttttgtgtgtgaattatcaaaacacaactcaactatgaatcttcaatttttttttaaagcaaaactatttattgactttattcatccatttgtaaattttttaaggttcttgtgtatatttggggggtgggggatgaattataaattatattcagccctgagtggagacctatcagattggattgctggcaaagcacagaatgcctgtatatgatgtaactgtatcaaaaataaaaagctgtcacatattttgtaaatttttaccttgtaaagtcacaaaaatagtttttaaaggaaaaagtacagtattcttttaataaactggctcacagtctggtaggtctacaaccccatagcacaacaggtttatagagatgtatatagaattatagtccttatttttttcctttgcgtgaaaccttttataacagattaacaatcaactgcataaatattattaatattttaaaaagagttaagttgtattttgataattcacaaactatcatgcaaataacgagtaagtagacaagaataaagtggtttgagatgaaaagaacctaacattatttacagtagatgtggttttaatacaattactgccctaaaatgtctctggcaatgtacagaaatattgtatatacttacatatgtaattgttgtaagagttaaatacaaaatcatggtgacacttccaattaagtgcactaaatgaaaagttaagtcacttattaacttttcagtttggtttgcaatgagaaagagtggaaatttgtattttgttttgcttatagaattacagacatgttgaggaagtgttgagctttattttgctttttcatagaggcagaaagtaggaaccagatagagatgaaaaggggccactgaaaagtgaatttgatagctcagcatttaagcatgattacatattcagatagctctttttgctttctataaatatatgcattgtgtgtgtagtaatagatgtaagtttacactttgaaaggaaatcttgtttcaatgtttattataaaagccttgctaatttagtagtgatgctttccttggttgtacaggtgtacatttgtaaaccttcatgctgtaaatggaatttgttttatctctttgggatacatttgcattttagtgtacatttacgtccctgccctctttgacctggcaatatagtgttgtataatgtaaatttatttctccaaatcgagagtgattttttaaaaattttttatctttatatggtttcagaagtatgaaccagctttctttttattattgtgagatcattttgttttataacatagttgttgactgttaatatggacctgctagaatttggatcactttcaattgaagtcagggtattgtgcataatagaaagtattggactgagatatttggttaccatggaggccaatgcttttttcatcttattaaatgtgatgtgacttttttctttgtacagaagagtactgtatttttgaatagcctactcccaagtaagagcaaatctgtatgataacattttttcctctggacataagacataacagtaacacgatgtacatttacaagcggccttatgtacatttcccaacaatctttttaaggcaaaattgtgaccatatgtgtataattaaaatcgtttttaatcctt

SEQ ID NO: 451365 - DNA, 1577 bp, Homo sapiens
acgtccggggaggggccaggtgagcggcagacccggcacgcaggtgggggccggcggggtccgtggccagagctgcagagagacaaggcggcggcggctgctgtgctgggtgcagtgaggaagaggccctcggtggtgcccatggctggccaggatcctgcgctgagcacgagtcacccgttctacgacgtggccagacatggcattctgcaggtggcaggtatttgaagtacacactggaccaatacgttgagaacgattataccatcgtctatttccactacgggctgaacagccggaacaagccttccctgggctggctccagagcgcatacaaggagttcgataggaagtacaagaagaacttgaaggccctctacgtggtgcaccccaccagcttcatcaaggtcctgtggaacatcttgaagcccctcatcagtcacaagtttgggaagaaagtcatctatttcaactacctgagtgagctccacgaacaccttaaatacgaccagctggtcatccctcccgaagttttgcggtacgatgagaagctccagagcctgcacgagggccggacgccgcctcccaccaagacaccaccgccgcggcccccgctgcccacacagcagtttggcgtcagtctgcaatacctcaaagacaaaaatcaaggcgaactcatcccccctgtgctgaggttcacagtgacgtacctgagagagaaaggcctgcgcaccgagggcctgttccggagatccgccagcgtgcagaccgtccgcgagatccagaggctctacaaccaagggaagcccgtgaactttgacgactacggggacattcacatccctgccgtgatcctgaagaccttcctgcgagagctgccccagccgcttctgaccttccaggcctacgagcagattctcgggatcacctgtgtggagagcagcctgcgtgtcactggctgccgccagatcttacggagcctcccagagcacaactacgtcgtcctccgctacctcatgggcttcctgcatgcggtgtcccgggagagcatcttcaacaaaatgaacagctctaacctggcctgtgtcttcgggctgaatttgatctggccatcccagggggtctcctccctgagtgcccttgtgcccctgaacatgttcactgaactgctgatcgagtactatgaaaagatcttcagcaccccggaggcacctggggagcacggcctggcaccatgggaacaggggagcagggcagcccctttgcaggaggctgtgccacggacacaagccacgggcctcaccaagcctaccctacctccgagtcccctgatggcagccagaagacgtctctagtgttgcgaacactctgtatatttcgagctacctcccacacctgtctgtgcacttgtatgttttgtaaacttggcatctgtaaaaataaccagccattagatgaattcagaaccttctaatgaaaactccatgcctctggtccttggactcttgtccatggttcctgagctgtggaccgggatagaataatgcatttgttaggatggatgttttgaatcccaa

SEQ ID NO: 451366 - DNA, 2709 bp, Homo sapiens
gaggcgcccacaccaagatctctctcgccagttgttcgtctggcttccaggggacagcagaggccttggggacacgtccttggactgtgcatccctggacccagcagccctcatcccagctccgctcagtccaggcagaaaggccaagggttcttcacgttgcctctcccactggaacccagagccagcttgggcagctgtccccgtcccacaagggtcactcacctggtgcatggcaccgttcctctcaaggccagcagaaatcctacagagctggtcccgatgtctgctacctacgtatctgtttcagagactcacctgtcaagatgtgtccccataccactacgtctggcaagcccagctcctatagccagcttggatgctcttcctccaggaagccctccctgcctgaccctctgcaccctcttcttccttcgacgtggtgctgctattggaaggggtctccgtggatccccagacctgaccacaggcagagctggcctggccctgggtcctctgggccactgactgtggtgcaccctttcctcggaggctcagcctctgtctgcttggtggggggtcgatcacccctggccactgcccttatgatcctgctcagtgtcccacttccctgtcatgtgatggatgggcagctgtttggggctcagctgggtccccagtgcccagcatcagcgccagcacacagtaggtgttctgtgtttgttggaggggcagatagtgtgggggaaggagggaggaggtcggtgggtagaagaaatcaactgcttagccgggttgttaggaggatctgatgagactaggatgtgagttgaaactgctgtgccaggcacacctgtgtgggtctcacttgtgccaggcatacctgcgtgggtctcacctgtgtaggtctcacctgtgccaggtgtacctgtgtgggtcttacctgtgcaggtctcctgatgcaggtctcacctgtgccgagtgtacctacctgtgcgggtctcacctgtgtcaggcgtacgtgtaggggtctcacctgtgaacgtctcacctgtgccaggtgtatacctgtgtggctctcacttgtgtgggtctggtatgtgacaaaggcctgggaattggcagctgtcatctgccaggagcagaccctgagccaagttccctgtgccttaggctcatttcatgccctcagctctgggaggccaatccctttactgccacattttataaatggaagactgaggttaagcagtgggcccagggccatagaacagctgagctgtggagctggacatcgaccttgggcaggtgctgccaggggcctgagcccaggccctccactcccgcatcctctgatgacccatcctgggtgagtggaggcatctgcccgcgccagtcaggcccagtggtgatggcccccatgcccacaggacagaagctgctggactcactggcagagacctgggacttcttcttcagtgacgtgctgcccatgctgcaggccatcttctacccggtgcagggcaaggagccatcggtgcgccagctggccctgctgcacttccggaatgccatcaccctcagtgtgaagctagaggatgcgctggcccgggcccatgcccgtgtgccccctgccatcgtgcagatgctgctggtgctgcagggggtacatgagtccaggggcgtgactgaggactacctgcgcctggagacgctggtccagaaggtggtgtcgccatacctgggcacctacggcctccactccagcgaggggcccttcacccattcctgcatcctggaaaagcgcctcctccgccgctcccgctcgggggacgtgctggccaagaaccctgtggtgcgctccaagagctacaacacgcctctgctgaaccccgtgcaggagcacgaggcggagggcgcggcggccggcggtaccagcatccgcaggcactctgtgtcggagatgacgtcctgccccgagcctcagggcttctccgacccgcccggccagggccccaccgggaccttcaggtcctccccggcgccccactcagggccctgccccagcagactgtaccccacgacccagccccctgagcagggcttggatcccacccgcagctccctgccccgctccagcccggagaacctggtggaccagatcctggagtccgtggactcggattctgaagggattttcattgactttggccggggccggggctctggcatgtccgacttggagggctctgggggccggcagagtgtcgtgtgaggcctcacagctggccttgagtttttactgacacgtccctgtgtgcgggggtgtccatgtggcgtgtgtgtgagtgagacttttttactgcgtcccgtcccgccagccctatcggcctcgtcactggccttggtcactttgtatttctgtcttggttggaaataccatcagccttccttgctcggcccaggtctgtttcaggcatctgagtcggcgtttacccaggggccgggccagagacgggggtcggccgctcgctcccacgctcctcctgccccagccctctggtgtccacacctgcccacagagaatgtaaacccagtgggctctgcccacgccgggccccaaagtgaccagactccagcacacctgtctcctcctgcctggggtggccatggggatggaagggggtggaataaaacctgtcaacctgg

SEQ ID NO: 451367 - DNA, 3020 bp, Homo sapiens
caggaaggggtgctctgtgggcttggaggatgcaggcgccttcctggggactgctctgtgagcagtgataaaatatttatcagccagcagctgggcttccctgcatagggtgcagtcgggggcagctcccacccgagcctgcagcctgagttctgctgagtcatgggggagcccagtgagccgcctgccctcaagctcctgggccccctctgccctttggccatgtgaacgcctcctaatgtgtaagccattcggctgcccccaaggccaggcatccagtgtgcttagtgctgagcagggtttcagagctcacccccaggagggtgcagacctcagccaaggtcgcagagcagaggagacccgtgggctgggattccacctgtgcccaccctggcagcatcccacctcctgagtcctctcggcacccagcaagcatccacaacggggtgatcgccgtcttccagcgcaaggggctgcccgaccaggagctcttcagcctcaacgagggcgtccggcagctgttgaagacagagctggggtccttcttcacggagtacctgcagaaccagctgctgacaaaaggcatggtgatccttcgggacaagattcgcttctatgaggagactcacctgtcaagatgtgtccccataccactacgtctggcaagcccagctcctatagccagcttggatgctcttcctccaggaagccctccctgcctgaccctctgcaccctcttcttccttcgacgtggtgctgctattggaaggggtctccgtggatccccagacctgaccacaggcagagctggcctggccctgggtcctctgggccactgactgtggtgcaccctttcctcggaggctcagcctctgtctgcttggtggggggtcgatcacccctggccactgcccttatgatcctgctcagtgtcccacttccctgtcatgtgatggatgggcagctgtttggggctcagctgggtccccagtgcccagcatcagcgccagcacacagtaggtgttctgtgtttgttggaggggcagatagtgtgggggaaggagggaggaggtcggtgggtagaagaaatcaactgcttagccgggttgttaggaggatctgatgagactaggatgtgagttgaaactgctgtgccaggcacacctgtgtgggtctcacttgtgccaggcatacctgcgtgggtctcacctgtgtaggtctcacctgtgccaggtgtacctgtgtgggtcttacctgtgcaggtctcctgatgcaggtctcacctgtgccgagtgtacctacctgtgcgggtctcacctgtgtcaggcgtacgtgtaggggtctcacctgtgaacgtctcacctgtgccaggtgtatacctgtgtggctctcacttgtgtgggtctggtatgtgacaaaggcctgggaattggcagctgtcatctgccaggagcagaccctgagccaagttccctgtgccttaggctcatttcatgccctcagctctgggaggccaatccctttactgccacattttataaatggaagactgaggttaagcagtgggcccagggccatagaacagctgagctgtggagctggacatcgaccttgggcaggtgctgccaggggcctgagcccaggccctccactcccgcatcctctgatgacccatcctgggtgagtggaggcatctgcccgcgccagtcaggcccagtggtgatggcccccatgcccacaggacagaagctgctggactcactggcagagacctgggacttcttcttcagtgacgtgctgcccatgctgcaggccatcttctacccggtgcagggcaaggagccatcggtgcgccagctggccctgctgcacttccggaatgccatcaccctcagtgtgaagctagaggatgcgctggcccgggcccatgcccgtgtgccccctgccatcgtgcagatgctgctggtgctgcagggggtacatgagtccaggggcgtgactgaggactacctgcgcctggagacgctggtccagaaggtggtgtcgccatacctgggcacctacggcctccactccagcgaggggcccttcacccattcctgcatcctggaaaagcgcctcctccgccgctcccgctcgggggacgtgctggccaagaaccctgtggtgcgctccaagagctacaacacgcctctgctgaaccccgtgcaggagcacgaggcggagggcgcggcggccggcggtaccagcatccgcaggcactctgtgtcggagatgacgtcctgccccgagcctcagggcttctccgacccgcccggccagggccccaccgggaccttcaggtcctccccggcgccccactcagggccctgccccagcagactgtaccccacgacccagccccctgagcagggcttggatcccacccgcagctccctgccccgctccagcccggagaacctggtggaccagatcctggagtccgtggactcggattctgaagggattttcattgactttggccggggccggggctctggcatgtccgacttggagggctctgggggccggcagagtgtcgtgtgaggcctcacagctggccttgagtttttactgacacgtccctgtgtgcgggggtgtccatgtggcgtgtgtgtgagtgagacttttttactgcgtcccgtcccgccagccctatcggcctcgtcactggccttggtcactttgtatttctgtcttggttggaaataccatcagccttccttgctcggcccaggtctgtttcaggcatctgagtcggcgtttacccaggggccgggccagagacgggggtcggccgctcgctcccacgctcctcctgccccagccctctggtgtccacacctgcccacagagaatgtaaacccagtgggctctgcccacgccgggccccaaagtgaccagactccagcacacctgtctcctcctgcctggggtggccatggggatggaagggggtggaataaaacctgtcaacctgg

SEQ ID NO: 451368 - DNA, 1758 bp, Homo sapiens
acgtccggggaggggccaggtgagcggcagacccggcacgcaggtgggggccggcggggtccgtggccagagctgcagagagacaaggcggcggcggctgctgtgctgggtgcagtgaggaagaggccctcggtggtgcccatggctggccaggatcctgcgctgagcacgagtcacccgttctacgacgtggccagacatggcattctgcaggtggcaggggatgaccgctttggaagacgtgttgtcacgttcagctgctgccggatgccaccctcccacgagctggaccaccagcggctgctggagtatttgaagtacacactggaccaatacgttgagaacgattataccatcgtctatttccactacgggctgaacagccggaacaagccttccctgggctggctccagagcgcatacaaggagttcgataggaaagacggggatctcactatgtggcccaggctggtctcgaactccaagctcaagcgatcctcccacctcagcctcccaaagtactgggattacaggtacaagaagaacttgaaggccctctacgtggtgcaccccaccagcttcatcaaggtcctgtggaacatcttgaagcccctcatcagtcacaagtttgggaagaaagtcatctatttcaactacctgagtgagctccacgaacaccttaaatacgaccagctggtcatccctcccgaagttttgcggtacgatgagaagctccagagcctgcacgagggccggacgccgcctcccaccaagacaccaccgccgcggcccccgctgcccacacagcagtttggcgtcagtctgcaatacctcaaagacaaaaatcaaggcgaactcatcccccctgtgctgaggttcacagtgacgtacctgagagagaaaggcctgcgcaccgagggcctgttccggagatccgccagcgtgcagaccgtccgcgagatccagaggctctacaaccaagggaagcccgtgaactttgacgactacggggacattcacatccctgccgtgatcctgaagaccttcctgcgagagctgccccagccgcttctgaccttccaggcctacgagcagattctcgggatcacctgtgtggagagcagcctgcgtgtcactggctgccgccagatcttacggagcctcccagagcacaactacgtcgtcctccgctacctcatgggcttcctgcatgcggtgtcccgggagagcatcttcaacaaaatgaacagctctaacctggcctgtgtcttcgggctgaatttgatctggccatcccagggggtctcctccctgagtgcccttgtgcccctgaacatgttcactgaactgctgatcgagtactatgaaaagatcttcagcaccccggaggcacctggggagcacggcctggcaccatgggaacaggggagcagggcagcccctttgcaggaggctgtgccacggacacaagccacgggcctcaccaagcctaccctacctccgagtcccctgatggcagccagaagacgtctctagtgttgcgaacactctgtatatttcgagctacctcccacacctgtctgtgcacttgtatgttttgtaaacttggcatctgtaaaaataaccagccattagatgaattcagaaccttctaatgaaaactccatgcctctggtccttggactcttgtccatggttcctgagctgtggaccgggatagaataatgcatttgttaggatggatgttttgaatcccaa

SEQ ID NO: 451369 - DNA, 2431 bp, Homo sapiens
gcccccggcctccgtttgcgccgggtctgtgctggccgcgcgcctggcgctccacgctgagcctctccgtgcaatgattaacccggcggggcggccggcgcgggacccgagacggaggcgcggggccggggcgggaccccgcaggaccgctcggcttcctgctctcgccggagtttccgcgtagagggcgcatcgccggcccggggcccttggtgcggcgtggcgcagggcgcggcgtggggcgcgcgtgggcgcggcgcaggcggcccgggtcaccatgaggactctccgcaggttgaagttcatgagttcgcccagcctcagtgacctgggcaagagagagccggccgccgccgcggacgagcggggcacgcagcagcgccgggcctgcgccaacgccacctggaacagcatccacaacggggtgatcgccgtcttccagcgcaaggggctgcccgaccaggagctcttcagcctcaacgagggcgtccggcagctgttgaagacagagctggggtccttcttcacggagtacctgcagaaccagctgctgacaaaaggcatggtgatccttcgggacaagattcgcttctatgagggacagaagctgctggactcactggcagagacctgggacttcttcttcagtgacgtgctgcccatgctgcaggccatcttctacccggtgcagggcaaggagccatcggtgcgccagctggccctgctgcacttccggaatgccatcaccctcagtgtgaagctagaggatgcgctggcccgggcccatgcccgtgtgccccctgccatcgtgcagatgctgctggtgctgcagggggtacatgagtccaggggcgtgactgaggactacctgcgcctggagacgctggtccagaaggtggtgtcgccatacctgggcacctacggcctccactccagcgaggggcccttcacccattcctgcatcctggagctgcagagagacaaggcggcggcggctgctgtgctgggtgcagtgaggaagaggccctcggtggtgcccatggctggccaggatcctgcgctgagcacgagtcacccgttctacgacgtggccagacatggcattctgcaggtggcaggggatgaccgctttggaagacgtgttgtcacgttcagctgctgccggatgccaccctcccacgagctggaccaccagcggctgctggagtacaagaagaacttgaaggccctctacgtggtgcaccccaccagcttcatcaaggtcctgtggaacatcttgaagcccctcatcagtcacaagtttgggaagaaagtcatctatttcaactacctgagtgagctccacgaacaccttaaatacgaccagctggtcatccctcccgaagttttgcggtacgatgagaagctccagagcctgcacgagggccggacgccgcctcccaccaagacaccaccgccgcggcccccgctgcccacacagcagtttggcgtcagtctgcaatacctcaaagacaaaaatcaaggcgaactcatcccccctgtgctgaggttcacagtgacgtacctgagagagaaaggcctgcgcaccgagggcctgttccggagatccgccagcgtgcagaccgtccgcgagatccagaggctctacaaccaagggaagcccgtgaactttgacgactacggggacattcacatccctgccgtgatcctgaagaccttcctgcgagagctgccccagccgcttctgaccttccaggcctacgagcagattctcgggatcacctgtgtggagagcagcctgcgtgtcactggctgccgccagatcttacggagcctcccagagcacaactacgtcgtcctccgctacctcatgggcttcctgcatgcggtgtcccgggagagcatcttcaacaaaatgaacagctctaacctggcctgtgtcttcgggctgaatttgatctggccatcccagggggtctcctccctgagtgcccttgtgcccctgaacatgttcactgaactgctgatcgagtactatgaaaagatcttcagcaccccggaggcacctggggagcacggcctggcaccatgggaacaggggagcagggcagcccctttgcaggaggctgtgccacggacacaagccacgggcctcaccaagcctaccctacctccgagtcccctgatggcagccagaagacgtctctagtgttgcgaacactctgtatatttcgagctacctcccacacctgtctgtgcacttgtatgttttgtaaacttggcatctgtaaaaataaccagccattagatgaattcagaaccttctaatgaaaactccatgcctctggtccttggactcttgtccatggttcctgagctgtggaccgggatagaataatgcatttgttaggatggatgttttgaatcccaa

SEQ ID NO: 451370 - DNA, 2216 bp, Homo sapiens
caggaaggggtgctctgtgggcttggaggatgcaggcgccttcctggggactgctctgtgagcagtgataaaatatttatcagccagcagctgggcttccctgcatagggtgcagtcgggggcagctcccacccgagcctgcagcctgagttctgctgagtcatgggggagcccagtgagccgcctgccctcaagctcctgggccccctctgccctttggccatgtgaacgcctcctaatgtgtaagccattcggctgcccccaaggccaggcatccagtgtgcttagtgctgagcagggtttcagagctcacccccaggagggtgcagacctcagccaaggtcgcagagcagaggagacccgtgggctgggattccacctgtgcccaccctggcagcatcccacctcctgagtcctctcggcacccagcaagcatccacaacggggtgatcgccgtcttccagcgcaaggggctgcccgaccaggagctcttcagcctcaacgagggcgtccggcagctgttgaagacagagctggggtccttcttcacggagtacctgcagaaccagctgctgacaaaaggcatggtgatccttcgggacaagattcgcttctatgaggagctgcagagagacaaggcggcggcggctgctgtgctgggtgcagtgaggaagaggccctcggtggtgcccatggctggccaggatcctgcgctgagcacgagtcacccgttctacgacgtggccagacatggcattctgcaggtggcaggggatgaccgctttggaagacgtgttgtcacgttcagctgctgccggatgccaccctcccacgagctggaccaccagcggctgctggagtatttgaagtacacactggaccaatacgttgagaacgattataccatcgtctatttccactacgggctgaacagccggaacaagccttccctgggctggctccagagcgcatacaaggagttcgataggaagtacaagaagaacttgaaggccctctacgtggtgcaccccaccagcttcatcaaggtcctgtggaacatcttgaagcccctcatcagtcacaagtttgggaagaaagtcatctatttcaactacctgagtgagctccacgaacaccttaaatacgaccagctggtcatccctcccgaagttttgcggtacgatgagaagctccagagcctgcacgagggccggacgccgcctcccaccaagacaccaccgccgcggcccccgctgcccacacagcagtttggcgtcagtctgcaatacctcaaagacaaaaatcaaggcgaactcatcccccctgtgctgaggttcacagtgacgtacctgagagagaaaggcctgcgcaccgagggcctgttccggagatccgccagcgtgcagaccgtccgcgagatccagaggctctacaaccaagggaagcccgtgaactttgacgactacggggacattcacatccctgccgtgatcctgaagaccttcctgcgagagctgccccagccgcttctgaccttccaggcctacgagcagattctcgggatcacctgtgtggagagcagcctgcgtgtcactggctgccgccagatcttacggagcctcccagagcacaactacgtcgtcctccgctacctcatgggcttcctgcatgcggtgtcccgggagagcatcttcaacaaaatgaacagctctaacctggcctgtgtcttcgggctgaatttgatctggccatcccagggggtctcctccctgagtgcccttgtgcccctgaacatgttcactgaactgctgatcgagtactatgaaaagatcttcagcaccccggaggcacctggggagcacggcctggcaccatgggaacaggggagcagggcagcccctttgcaggaggctgtgccacggacacaagccacgggcctcaccaagcctaccctacctccgagtcccctgatggcagccagaagacgtctctagtgttgcgaacactctgtatatttcgagctacctcccacacctgtctgtgcacttgtatgttttgtaaacttggcatctgtaaaaataaccagccattagatgaattcagaaccttctaatgaaaactccatgcctctggtccttggactcttgtccatggttcctgagctgtggaccgggatagaataatgcatttgttaggatggatgttttgaatcccaa

SEQ ID NO: 451371 - DNA, 3819 bp, Homo sapiens
  misc_feature (3221)..(3221): n is a, c, g, or t
gcccccggcctccgtttgcgccgggtctgtgctggccgcgcgcctggcgctccacgctgagcctctccgtgcaatgattaacccggcggggcggccggcgcgggacccgagacggaggcgcggggccggggcgggaccccgcaggaccgctcggcttcctgctctcgccggagtttccgcgtagagggcgcatcgccggcccggggcccttggtgcggcgtggcgcagggcgcggcgtggggcgcgcgtgggcgcggcgcaggcggcccgggtcaccatgaggactctccgcaggttgaagttcatgagttcgcccagcctcagtgacctgggcaagagagagccggccgccgccgcggacgagcggggcacgcagcagcgccgggcctgcgccaacgccacctggaacagcatccacaacggggtgatcgccgtcttccagcgcaaggggctgcccgaccaggagctcttcagcctcaacgagggcgtccggcagctgttgaagacagagctggggtccttcttcacggagtacctgcagaaccagctgctgacaaaaggcatggtgatccttcgggacaagattcgcttctatgagggacagaagctgctggactcactggcagagacctgggacttcttcttcagtgacgtgctgcccatgctgcaggccatcttctacccggtgcagggcaaggagccatcggtgcgccagctggccctgctgcacttccggaatgccatcaccctcagtgtgaagctagaggatgcgctggcccgggcccatgcccgtgtgccccctgccatcgtgcagatgctgctggtgctgcagggggtacatgagtccaggggcgtgactgaggactacctgcgcctggagacgctggtccagaaggtggtgtcgccatacctgggcacctacggcctccactccagcgaggggcccttcacccattcctgcatcctggagctgcagagagacaaggcggcggcggctgctgtgctgggtgcagtgaggaagaggccctcggtggtgcccatggctggccaggatcctgcgctgagcacgagtcacccgttctacgacgtggccagacatggcattctgcaggtggcaggggatgaccgctttggaagacgtgttgtcacgttcagctgctgccggatgccaccctcccacgagctggaccaccagcggctgctggagtatttgaagtacacactggaccaatacgttgagaacgattataccatcgtctatttccactacgggctgaacagccggaacaagccttccctgggctggctccagagcgcatacaaggagttcgataggaagtacaagaagaacttgaaggccctctacgtggtgcaccccaccagcttcatcaaggtcctgtggaacatcttgaagcccctcatcagtcacaagtttgggaagaaagtcatctatttcaactacctgagtgagctccacgaacaccttaaatacgaccagctggtcatccctcccgaagttttgcggtacgatgagaagctccagagcctgcacgagggccggacgccgcctcccaccaagacaccaccgccgcggcccccgctgcccacacagcagtttggcgtcagtctgcaatacctcaaagacaaaaatcaaggcgaactcatcccccctgtgctgaggttcacagtgacgtacctgagagagaaaggcctgcgcaccgagggcctgttccggagatccgccagcgtgcagaccgtccgcgagatccagaggctctacaaccaagggaagcccgtgaactttgacgactacggggacattcacatccctgccgtgatcctgaagaccttcctgcgagagctgccccagccgcttctgaccttccaggcctacgagcagattctcgggatcacctgtgcgtagctgccctggcgcaggggtggggggcttggtcctcagatgctgtcccccagctactggcccagggtcaggctctggggtggccgaggtgacgtgtacccaccctcctcctgttgccatctggcactgcagggcaagagagggggttgttggggctgcccccaccatgcacagccagtccacactgtccaaaggcagaggaggtggggtcggtcagggttgtccaggccggtctctcaggcacagctgggccaggaggcagggtgatggggggctctctagatttggggctcatcatcctggtcaaagtcctgcctgtaaccgctcccaggccccagaccctcagctctctcatctagaaagggctctcggcatttctccccagatcattgtaggatgccaagcatatatcacaggaactgagcagctatagtgtctgatcctacaggcgctttgtgatgggtcaaatgctcagtgtggctgagcacagatgactcgtaaaaaactccgtaacagcatctcaaaacactggtgaatgctaaggaaagtgatgcctcgaaagaaccataaaacccctcaggccttcatctaagtcatcgaacaccgtcttttcaaatgggactacctccagcgccctcctttcttcttggagcactaacagtcgaaggggggagctgattttggtgtgaattctgaagcagctcggttaagatatcgtaaagacaaatcttgaatcttaaaatcaatgtttctaccccactgtgtattcaagaatcacatttgcccaaagggcagcctggcctttgtcctggcccctggggggtgacttctgaaccttgcactttcccaaggggcaggagttacctttgtcactcatcaggggccctgatggtttatggtaactcatggttatggtgtgactcaagataggggtgtaggggtggccattccagaaagaccaattacatggttagagggtgcgggctttgagtgatgtgagaccagcctgacctctggggagggcatggggctggagactgatttcagtctcaaggcgtcctgtcaaggtcgctggaccccaaactcccctcaaaggcaaatttacacccatttactcagcagtgctcctaagcgcctgccaaatgcaacgccctttctgagatggggaaggtctctcctacaccctggaagaccatgaaagatgttgagggctgactgactttggctagtggatgggaagcctgggagagttcagagccaggctgagcctcatggagacaaatttgatcatgcgcatagnggtacctatctggtggagacagaaggaggcactacattcagcagcatcctaccagccggggccagagcaggcaagatggacaatgctccatcacctgaatgcgccaggctgtgtcctagagagaagcttccagaagcctcccaacttcattagcccctgcagagggatgatgactccagcctctgtaggttcctgcttgagaaaactcaatgctgccaggcgaacttactgtttgttccagccaaaacctggtgacagggagataggccctggaacccctctttgagcagcagttcctttagaaagcttgcaattgtgggccaggcatggtggctcgcgcctgtaatcccagcactttgggaggctgagttgggtggatcacttgtcataggagttcaggaccagcctggtcaacatggcaaaaccctgtctctactaaaatacaaaaattagccaagcgtggtggtgcacgcctgtggtcccagctactcgggaggctgaggcgggagaatgacttgaacccaggaggcagaggttgtagtgagccgggatcgtgccattgcactgcagcctgggtgacagaacaagactccatctc

SEQ ID NO: 451372 - DNA, 2096 bp, Homo sapiens
caggaaggggtgctctgtgggcttggaggatgcaggcgccttcctggggactgctctgtgagcagtgataaaatatttatcagccagcagctgggcttccctgcatagggtgcagtcgggggcagctcccacccgagcctgcagcctgagttctgctgagtcatgggggagcccagtgagccgcctgccctcaagctcctgggccccctctgccctttggccatgtgaacgcctcctaatgtgtaagccattcggctgcccccaaggccaggcatccagtgtgcttagtgctgagcagggtttcagagctcacccccaggagggtgcagacctcagccaaggtcgcagagcagaggagacccgtgggctgggattccacctgtgcccaccctggcagcatcccacctcctgagtcctctcggcacccagcaaggttgaagttcatgagttcgcccagcctcagtgacctgggcaagagagagccggccgccgccgcggacgagcggggcacgcagcagcgccgggcctgcgccaacgccacctggaacagcatccacaacggggtgatcgccgtcttccagcgcaaggggctgcccgaccaggagctcttcagcctcaacgagggcgtccggcagctgttgaagacagagctggggtccttcttcacggagtacctgcagaaccagctgctgacaaaaggcatggtgatccttcgggacaagattcgcttctatgagggacagaagctgctggactcactggcagagacctgggacttcttcttcagtgacgtgctgcccatgctgcaggccatcttctacccggtgcagggcaaggagccatcggtgcgccagctggccctgctgcacttccggaatgccatcaccctcagtgtgaagctagaggatgcgctggcccgggcccatgcccgtgtgccccctgccatcgtgcagatgctgctggtgctgcagggggtacatgagtccaggggcgtgactgaggactacctgcgcctggagacgctggtccagaaggtggtgtcgccatacctgggcacctacggcctccactccagcgaggggcccttcacccattcctgcatcctggaaaagcgcctcctccgccgctcccgctcgggggacgtgctggccaagaaccctgtggtgcgctccaagagctacaacacgcctctgctgaaccccgtgcaggagcacgaggcggagggcgcggcggccggcggtaccagcatccgcaggcactctgtgtcggagatgacgtcctgccccgagcctcagggcttctccgacccgcccggccagggccccaccgggaccttcaggtcctccccggcgccccactcagggccctgccccagcagactgtaccccacgacccagccccctgagcagggcttggatcccacccgcagctccctgccccgctccagcccggagaacctggtggaccagatcctggagtccgtggactcggattctgaagggattttcattgactttggccggggccggggctctggcatgtccgacttggagggctctgggggccggcagagtgtcgtgtgaggcctcacagctggccttgagtttttactgacacgtccctgtgtgcgggggtgtccatgtggcgtgtgtgtgagtgagacttttttactgcgtcccgtcccgccagccctatcggcctcgtcactggccttggtcactttgtatttctgtcttggttggaaataccatcagccttccttgctcggcccaggtctgtttcaggcatctgagtcggcgtttacccaggggccgggccagagacgggggtcggccgctcgctcccacgctcctcctgccccagccctctggtgtccacacctgcccacagagaatgtaaacccagtgggctctgcccacgccgggccccaaagtgaccagactccagcacacctgtctcctcctgcctggggtggccatggggatggaagggggtggaataaaacctgtcaacctggaaaaaaaaaaaaaaacgagtgatcgccattagacttccaggtttaccagctgcaccacttcctcctcataggaaaaaaa

SEQ ID NO: 451373 - DNA, 1420 bp, Homo sapiens
tctagagatcccggcactgttcggatggcgcctcccacgagctggccaccagcggctgctggagtatttgaagtacacactggaccaatacgttgagaacgattataccatcgtctatttccactacgggctgaacagccggaacaagccttccctgggctggctccagagcgcatacaaggagttcgataggaagtacaagaagaacttgaaggccctctacgtggtgcaccccaccagcttcatcaaggtcctgtggaacatcttgaagcccctcatcagtcacaagtttgggaagaaagtcatctatttcaactacctgagtgagctccacgaacaccttaaatacgaccagctggtcatccctcccgaagttttgcggtacgatgagaagctccagagcctgcacgagggccggacgccgcctcccaccaagacaccaccgccgcggcccccgctgcccacacagcagtttggcgtcagtctgcaatacctcaaagacaaaaatcaaggcgaactcatcccccctgtgctgaggttcacagtgacgtacctgagagagaaaggcctgcgcaccgagggcctgttccggagatccgccagcgtgcagaccgtccgcgagatccagaggctctacaaccaagggaagcccgtgaactttgacgactacggggacattcacatccctgccgtgatcctgaagaccttcctgcgagagctgccccagccgcttctgaccttccaggcctacgagcagattctcgggatcacctgtgtggagagcagcctgcgtgtcactggctgccgccagatcttacggagcctcccagagcacaactacgtcgtcctccgctacctcatgggcttcctgcatgcggtgtcccgggagagcatcttcaacaaaatgaacagctctaacctggcctgtgtcttcgggctgaatttgatctggccatcccagggggtctcctccctgagtgcccttgtgcccctgaacatgttcactgaactgctgatcgagtactatgaaaagatcttcagcaccccggaggcacctggggagcacggcctggcaccatgggaacaggggagcagggcagcccctttgcaggaggctgtgccacggacacaagccacgggcctcaccaagcctaccctacctccgagtcccctgatggcagccagaagacgtctctagtgttgcgaacactctgtatatttcgagctacctcccacacctgtctgtgcacttgtatgttttgtaaacttggcatctgtaaaaataaccagccattagatgaattcagaaccttctaatgaaaactccatgcctctggtccttggactcttgtccatggttcctgagctgtggaccgggatagaataatgcatttgttaggatggatgttttgaatcccaa

SEQ ID NO: 451374 - DNA, 2308 bp, Homo sapiens
gcccccggcctccgtttgcgccgggtctgtgctggccgcgcgcctggcgctccacgctgagcctctccgtgcaatgattaacccggcggggcggccggcgcgggacccgagacggaggcgcggggccggggcgggaccccgcaggaccgctcggcttcctgctctcgccggagtttccgcgtagagggcgcatcgccggcccggggcccttggtgcggcgtggcgcagggcgcggcgtggggcgcgcgtgggcgcggcgcaggcggcccgggtcaccatgaggactctccgcaggttgaagttcatgagttcgcccagcctcagtgacctgggcaagagagagccggccgccgccgcggacgagcggggcacgcagcagcgccgggcctgcgccaacgccacctggaacagcatccacaacggggtgatcgccgtcttccagcgcaaggggctgcccgaccaggagctcttcagcctcaacgagggcgtccggcagctgttgaagacagagctggggtccttcttcacggagtacctgcagaaccagctgctgacaaaaggcatggtgatccttcgggacaagattcgcttctatgagggacagaagctgctggactcactggcagagacctgggacttcttcttcagtgacgtgctgcccatgctgcaggccatcttctacccggtgcagggcaaggagccatcggtgcgccagctggccctgctgcacttccggaatgccatcaccctcagtgtgaagctagaggatgcgctggcccgggcccatgcccgtgtgccccctgccatcgtgcagatgctgctggtgctgcagggggtacatgagtccaggggcgtgactgaggactacctgcgcctggagacgctggtccagaaggtggtgtcgccatacctgggcacctacggcctccactccagcgaggggcccttcacccattcctgcatcctggagctgcagagagacaaggcggcggcggctgctgtgctgggtgcagtgaggaagaggccctcggtggtgcccatggctggccaggatcctgcgctgagcacgagtcacccgttctacgacgtggccagacatggcattctgcaggtggcaggtatttgaagtacacactggaccaatacgttgagaacgattataccatcgtctatttccactacgggctgaacagccggaacaagccttccctgggctggctccagagcgcatacaaggagttcgataggaaagacggggatctcactatgtggcccaggctggtctcgaactccaagctcaagcgatcctcccacctcagcctcccaaagtactgggattacaggtacaagaagaacttgaaggccctctacgtggtgcaccccaccagcttcatcaaggtcctgtggaacatcttgaagcccctcatcagtcacaagtttgggaagaaagtcatctatttcaactacctgagtgagctccacgaacaccttaaatacgaccagctggtcatccctcccgaagttttgcggtacgatgagaagctccagagcctgcacgagggccggacgccgcctcccaccaagacaccaccgccgcggcccccgctgcccacacagcagtttggcgtcagtctgcaatacctcaaagacaaaaatcaaggcgaactcatcccccctgtgctgaggttcacagtgacgtacctgagagagaaagccagagcacaactacgtcgtcctccgctacctcatgggcttcctgcatgcggtgtcccgggagagcatcttcaacaaaatgaacagctctaacctggcctgtgtcttcgggctgaatttgatctggccatcccagggggtctcctccctgagtgcccttgtgcccctgaacatgttcactgaactgctgatcgagtactatgaaaagatcttcagcaccccggaggcacctggggagcacggcctggcaccatgggaacaggggagcagggcagcccctttgcaggaggctgtgccacggacacaagccacgggcctcaccaagcctaccctacctccgagtcccctgatggcagccagaagacgtctctagtgttgcgaacactctgtatatttcgagctacctcccacacctgtctgtgcacttgtatgttttgtaaacttggcatctgtaaaaataaccagccattagatgaattcagaaccttctaatgaaaactccatgcctctggtccttggactcttgtccatggttcctgagctgtggaccgggatagaataatgcatttgttaggatggatgttttgaatcccaa

SEQ ID NO: 451375 - DNA, 1189 bp, Homo sapiens
ctccgcggccccctcccccggccccgggctccggctccggctccggctctggctctgcgcggtggcagcggcggcggcggcgcggggaccgaggttgaagttcatgagttcgcccagcctcagtgacctgggcaagagagagccggccgccgccgcggacgagcggggcacgcagcagcgccgggcctgcgccaacgccacctggaacagcatccacaacggggtgatcgccgtcttccagcgcaaggggctgcccgaccaggagctcttcagcctcaacgagggcgtccggcagctgttgaagacagagctggggtccttcttcacggagtacctgcagaaccagctgctgacaaaaggcatggtgatccttcgggacaagattcgcttctatgagggacagaagctgctggactcactggcagagacctgggacttcttcttcagtgacgtgctgcccatgctgcaggccatcttctacccggtgcagggcaaggagccatcggtgcgccagctggccctgctgcacttccggaatgccatcaccctcagtgtgaagctagaggatgcgctggcccgggcccatgcccgtgtgccccctgccatcgtgcagatgctgctggtgctgcagggggtacatgagtccaggggcgtgactgaggactacctgcgcctggagacgctggtccagaaggtggtgtcgccatacctgggcacctacggcctccactccagcgaggggcccttcacccattcctgcatcctggaaaagcgcctcctccgccgctcccgctcgggggacgtgctggccaagaaccctgtggtgcgctccaagagctacaacacgcctctgctgaaccccgtgcaggagcacgaggcggagggcgcggcggccggcggtaccagcatccgcaggcactctgtgtcggagatgacgtcctgccccgagcctcagggcttctccgacccgcccggccagggccccaccgggaccttcaggtcctccccggcgccccactcagggccctgccccagcagactgtaccccacacctgcccacagagaatgtaaacccagtgggctctgcccacgccgggccccaaagtgaccagactccagcacacctgtctcctcctgcctggggtggccatggggatggaagggggtggaataaaacctgtcaacctgg

SEQ ID NO: 451376 - DNA, 1911 bp, Homo sapiens
gcccccggcctccgtttgcgccgggtctgtgctggccgcgcgcctggcgctccacgctgagcctctccgtgcaatgattaacccggcggggcggccggcgcgggacccgagacggaggcgcggggccggggcgggaccccgcaggaccgctcggcttcctgctctcgccggagtttccgcgtagagggcgcatcgccggcccggggcccttggtgcggcgtggcgcagggcgcggcgtggggcgcgcgtgggcgcggcgcaggcggcccgggtcaccatgaggactctccgcaggttgaagttcatgagttcgcccagcctcagtgacctgggcaagagagagccggccgccgccgcggacgagcggggcacgcagcagcgccgggcctgcgccaacgccacctggaacagcatccacaacggggtgatcgccgtcttccagcgcaaggggctgcccgaccaggagctcttcagcctcaacgagggcgtccggcagctgttgaagacagagctggggtccttcttcacggagtacctgcagaaccagctgctgacaaaaggcatggtgatccttcgggacaagattcgcttctatgagggacagaagctgctggactcactggcagagacctgggacttcttcttcagtgacgtgctgcccatgctgcaggccatcttctacccggtgcagggcaaggagccatcggtgcgccagctggccctgctgcacttccggaatgccatcaccctcagtgtgaagctagaggatgcgctggcccgggcccatgcccgtgtgccccctgccatcgtgcagatgctgctggtgctgcagggggtacatgagtccaggggcgtgactgaggactacctgcgcctggagacgctggtccagaaggtggtgtcgccatacctgggcacctacggcctccactccagcgaggggcccttcacccattcctgcatcctggagctgcagagagacaaggcggcggcggctgctgtgctgggtgcagtgaggaagaggccctcggtggtgcccatggctggccaggatcctgcgctgagcacgagtcacccgttctacgacgtggccagacatggcattctgcaggtggcaggggatgaccgctttggaagacgtgttgtcacgttcagctgctgccggatgccaccctcccacgagctggaccaccagcggctgctggagtatttgaagtacacactggaccaatacgttgagaacgattataccatcgtctatttccactacgggctgaacagccggaacaagccttccctgggctggctccagagcgcatacaaggagttcgataggaagtacaagaagaacttgaaggccctctacgtggtgcaccccaccagcttcatcaaggtcctgtggaacatcttgaagcccctcatcagtcacaagtttgggaagaaagtcatctatttcaactacctgagtgagctccacgaacaccttaaatacgaccagctggtcatccctcccgaagttttgcggtaagtgcctgttagaccccagaagccgcatcaatacatcttcgtgcttccaaagggcttggttcagtcccatgaatgtttaaggcttgatttccaaatgtgtgcttggctagatttggctcagaaatctgcggcatcgacaaagatccgcagcaaaaggtgctaactgctgactcagagaaatgaaatggcaaaggttgtatacaggacgggatgttttcctcgcccaccattgcaaaactgatttaaaaaataagccctaacatggcaacggccgtttgttgccttggtgtttaccgtttttgcttttgagcagaaaattaggagaatttcccaggcgtgtggataacgctgtgtacagaatgaagtgttctcagggacgtcacg

SEQ ID NO: 451377 - DNA, 1878 bp, Homo sapiens
gcccccggcctccgtttgcgccgggtctgtgctggccgcgcgcctggcgctccacgctgagcctctccgtgcaatgattaacccggcggggcggccggcgcgggacccgagacggaggcgcggggccggggcgggaccccgcaggaccgctcggcttcctgctctcgccggagtttccgcgtagagggcgcatcgccggcccggggcccttggtgcggcgtggcgcagggcgcggcgtggggcgcgcgtgggcgcggcgcaggcggcccgggtcaccatgaggactctccgcaggttgaagttcatgagttcgcccagcctcagtgacctgggcaagagagagccggccgccgccgcggacgagcggggcacgcagcagcgccgggcctgcgccaacgccacctggaacagcatccacaacggggtgatcgccgtcttccagcgcaaggggctgcccgaccaggagctcttcagcctcaacgagggcgtccggcagctgttgaagacagagctggggtccttcttcacggagtacctgcagaaccagctgctgacaaaaggcatggtgatccttcgggacaagattcgcttctatgagggacagaagctgctggactcactggcagagacctgggacttcttcttcagtgacgtgctgcccatgctgcaggccatcttctacccggtgcagggcaaggagccatcggtgcgccagctggccctgctgcacttccggaatgccatcaccctcagtgtgaagctagaggatgcgctggcccgggcccatgcccgtgtgccccctgccatcgtgcagatgctgctggtgctgcagggggtacatgagtccaggggcgtgactgaggactacctgcgcctggagacgctggtccagaaggtggtgtcgccatacctgggcacctacggcctccactccagcgaggggcccttcacccattcctgcatcctggaaaagcgcctcctccgccgctcccgctcgggggacgtgctggccaagaaccctgtggtgcgctccaagagctacaacacgcctctgctgaaccccgtgcaggagcacgaggcggagggcgcggcggccggcggtaccagcatccgcaggcactctgtgtcggagatgacgtcctgccccgagcctcagggcttctccgacccgcccggccagggccccaccgggaccttcaggtcctccccggcgccccactcagggccctgccccagcagactgtaccccacgacccagccccctgagcagggcttggatcccacccgcagctccctgccccgctccagcccggagaacctggtggaccagatcctggagtccgtggactcggattctgaagggattttcattgactttggccggggccggggctctggcatgtccgacttggagggctctgggggccggcagagtgtcgtgtgaggcctcacagctggccttgagtttttactgacacgtccctgtgtgcgggggtgtccatgtggcgtgtgtgtgagtgagacttttttactgcgtcccgtcccgccagccctatcggcctcgtcactggccttggtcactttgtatttctgtcttggttggaaataccatcagccttccttgctcggcccaggtctgtttcaggcatctgagtcggcgtttacccaggggccgggccagagacgggggtcggccgctcgctcccacgctcctcctgccccagccctctggtgtccacacctgcccacagagaatgtaaacccagtgggctctgcccacgccgggccccaaagtgaccagactccagcacacctgtctcctcctgcctggggtggccatggggatggaagggggtggaataaaacctgtcaacctgg

SEQ ID NO: 451378 - DNA, 3137 bp, Homo sapiens
caggaaggggtgctctgtgggcttggaggatgcaggcgccttcctggggactgctctgtgagcagtgataaaatatttatcagccagcagctgggcttccctgcatagggtgcagtcgggggcagctcccacccgagcctgcagcctgagttctgctgagtcatgggggagcccagtgagccgcctgccctcaagctcctgggccccctctgccctttggccatgtgaacgcctcctaatgtgtaagccattcggctgcccccaaggccaggcatccagtgtgcttagtgctgagcagggtttcagagctcacccccaggagggtgcagacctcagccaaggtcgcagagcagaggagacccgtgggctgggattccacctgtgcccaccctggcagcatcccacctcctgagtcctctcggcacccagcaaggttgaagttcatgagttcgcccagcctcagtgacctgggcaagagagagccggccgccgccgcggacgagcggggcacgcagcagcgccgggcctgcgccaacgccacctggaacagcatccacaacggggtgatcgccgtcttccagcgcaaggggctgcccgaccaggagctcttcagcctcaacgagggcgtccggcagctgttgaagacagagctggggtccttcttcacggagtacctgcagaaccagctgctgacaaaaggcatggtgatccttcgggacaagattcgcttctatgaggagactcacctgtcaagatgtgtccccataccactacgtctggcaagcccagctcctatagccagcttggatgctcttcctccaggaagccctccctgcctgaccctctgcaccctcttcttccttcgacgtggtgctgctattggaaggggtctccgtggatccccagacctgaccacaggcagagctggcctggccctgggtcctctgggccactgactgtggtgcaccctttcctcggaggctcagcctctgtctgcttggtggggggtcgatcacccctggccactgcccttatgatcctgctcagtgtcccacttccctgtcatgtgatggatgggcagctgtttggggctcagctgggtccccagtgcccagcatcagcgccagcacacagtaggtgttctgtgtttgttggaggggcagatagtgtgggggaaggagggaggaggtcggtgggtagaagaaatcaactgcttagccgggttgttaggaggatctgatgagactaggatgtgagttgaaactgctgtgccaggcacacctgtgtgggtctcacttgtgccaggcatacctgcgtgggtctcacctgtgtaggtctcacctgtgccaggtgtacctgtgtgggtcttacctgtgcaggtctcctgatgcaggtctcacctgtgccgagtgtacctacctgtgcgggtctcacctgtgtcaggcgtacgtgtaggggtctcacctgtgaacgtctcacctgtgccaggtgtatacctgtgtggctctcacttgtgtgggtctggtatgtgacaaaggcctgggaattggcagctgtcatctgccaggagcagaccctgagccaagttccctgtgccttaggctcatttcatgccctcagctctgggaggccaatccctttactgccacattttataaatggaagactgaggttaagcagtgggcccagggccatagaacagctgagctgtggagctggacatcgaccttgggcaggtgctgccaggggcctgagcccaggccctccactcccgcatcctctgatgacccatcctgggtgagtggaggcatctgcccgcgccagtcaggcccagtggtgatggcccccatgcccacaggacagaagctgctggactcactggcagagacctgggacttcttcttcagtgacgtgctgcccatgctgcaggccatcttctacccggtgcagggcaaggagccatcggtgcgccagctggccctgctgcacttccggaatgccatcaccctcagtgtgaagctagaggatgcgctggcccgggcccatgcccgtgtgccccctgccatcgtgcagatgctgctggtgctgcagggggtacatgagtccaggggcgtgactgaggactacctgcgcctggagacgctggtccagaaggtggtgtcgccatacctgggcacctacggcctccactccagcgaggggcccttcacccattcctgcatcctggaaaagcgcctcctccgccgctcccgctcgggggacgtgctggccaagaaccctgtggtgcgctccaagagctacaacacgcctctgctgaaccccgtgcaggagcacgaggcggagggcgcggcggccggcggtaccagcatccgcaggcactctgtgtcggagatgacgtcctgccccgagcctcagggcttctccgacccgcccggccagggccccaccgggaccttcaggtcctccccggcgccccactcagggccctgccccagcagactgtaccccacgacccagccccctgagcagggcttggatcccacccgcagctccctgccccgctccagcccggagaacctggtggaccagatcctggagtccgtggactcggattctgaagggattttcattgactttggccggggccggggctctggcatgtccgacttggagggctctgggggccggcagagtgtcgtgtgaggcctcacagctggccttgagtttttactgacacgtccctgtgtgcgggggtgtccatgtggcgtgtgtgtgagtgagacttttttactgcgtcccgtcccgccagccctatcggcctcgtcactggccttggtcactttgtatttctgtcttggttggaaataccatcagccttccttgctcggcccaggtctgtttcaggcatctgagtcggcgtttacccaggggccgggccagagacgggggtcggccgctcgctcccacgctcctcctgccccagccctctggtgtccacacctgcccacagagaatgtaaacccagtgggctctgcccacgccgggccccaaagtgaccagactccagcacacctgtctcctcctgcctggggtggccatggggatggaagggggtggaataaaacctgtcaacctgg

SEQ ID NO: 451379 - DNA, 2998 bp, Homo sapiens
gcccccggcctccgtttgcgccgggtctgtgctggccgcgcgcctggcgctccacgctgagcctctccgtgcaatgattaacccggcggggcggccggcgcgggacccgagacggaggcgcggggccggggcgggaccccgcaggaccgctcggcttcctgctctcgccggagtttccgcgtagagggcgcatcgccggcccggggcccttggtgcggcgtggcgcagggcgcggcgtggggcgcgcgtgggcgcggcgcaggcggcccgggtcaccatgaggactctccgcaggttgaagttcatgagttcgcccagcctcagtgacctgggcaagagagagccggccgccgccgcggacgagcggggcacgcagcagcgccgggcctgcgccaacgccacctggaacagcatccacaacggggtgatcgccgtcttccagcgcaaggggctgcccgaccaggagctcttcagcctcaacgagggcgtccggcagctgttgaagacagagctggggtccttcttcacggagtacctgcagaaccagctgctgacaaaaggcatggtgatccttcgggacaagattcgcttctatgaggagactcacctgtcaagatgtgtccccataccactacgtctggcaagcccagctcctatagccagcttggatgctcttcctccaggaagccctccctgcctgaccctctgcaccctcttcttccttcgacgtggtgctgctattggaaggggtctccgtggatccccagacctgaccacaggcagagctggcctggccctgggtcctctgggccactgactgtggtgcaccctttcctcggaggctcagcctctgtctgcttggtggggggtcgatcacccctggccactgcccttatgatcctgctcagtgtcccacttccctgtcatgtgatggatgggcagctgtttggggctcagctgggtccccagtgcccagcatcagcgccagcacacagtaggtgttctgtgtttgttggaggggcagatagtgtgggggaaggagggaggaggtcggtgggtagaagaaatcaactgcttagccgggttgttaggaggatctgatgagactaggatgtgagttgaaactgctgtgccaggcacacctgtgtgggtctcacttgtgccaggcatacctgcgtgggtctcacctgtgtaggtctcacctgtgccaggtgtacctgtgtgggtcttacctgtgcaggtctcctgatgcaggtctcacctgtgccgagtgtacctacctgtgcgggtctcacctgtgtcaggcgtacgtgtaggggtctcacctgtgaacgtctcacctgtgccaggtgtatacctgtgtggctctcacttgtgtgggtctggtatgtgacaaaggcctgggaattggcagctgtcatctgccaggagcagaccctgagccaagttccctgtgccttaggctcatttcatgccctcagctctgggaggccaatccctttactgccacattttataaatggaagactgaggttaagcagtgggcccagggccatagaacagctgagctgtggagctggacatcgaccttgggcaggtgctgccaggggcctgagcccaggccctccactcccgcatcctctgatgacccatcctgggtgagtggaggcatctgcccgcgccagtcaggcccagtggtgatggcccccatgcccacaggacagaagctgctggactcactggcagagacctgggacttcttcttcagtgacgtgctgcccatgctgcaggccatcttctacccggtgcagggcaaggagccatcggtgcgccagctggccctgctgcacttccggaatgccatcaccctcagtgtgaagctagaggatgcgctggcccgggcccatgcccgtgtgccccctgccatcgtgcagatgctgctggtgctgcagggggtacatgagtccaggggcgtgactgaggactacctgcgcctggagacgctggtccagaaggtggtgtcgccatacctgggcacctacggcctccactccagcgaggggcccttcacccattcctgcatcctggaaaagcgcctcctccgccgctcccgctcgggggacgtgctggccaagaaccctgtggtgcgctccaagagctacaacacgcctctgctgaaccccgtgcaggagcacgaggcggagggcgcggcggccggcggtaccagcatccgcaggcactctgtgtcggagatgacgtcctgccccgagcctcagggcttctccgacccgcccggccagggccccaccgggaccttcaggtcctccccggcgccccactcagggccctgccccagcagactgtaccccacgacccagccccctgagcagggcttggatcccacccgcagctccctgccccgctccagcccggagaacctggtggaccagatcctggagtccgtggactcggattctgaagggattttcattgactttggccggggccggggctctggcatgtccgacttggagggctctgggggccggcagagtgtcgtgtgaggcctcacagctggccttgagtttttactgacacgtccctgtgtgcgggggtgtccatgtggcgtgtgtgtgagtgagacttttttactgcgtcccgtcccgccagccctatcggcctcgtcactggccttggtcactttgtatttctgtcttggttggaaataccatcagccttccttgctcggcccaggtctgtttcaggcatctgagtcggcgtttacccaggggccgggccagagacgggggtcggccgctcgctcccacgctcctcctgccccagccctctggtgtccacacctgcccacagagaatgtaaacccagtgggctctgcccacgccgggccccaaagtgaccagactccagcacacctgtctcctcctgcctggggtggccatggggatggaagggggtggaataaaacctgtcaacctgg

SEQ ID NO: 451380 - DNA, 1853 bp, Homo sapiens
acgtccggggaggggccaggtgagcggcagacccggcacgcaggtgggggccggcggggtccgtggccagagctgcagagagacaaggcggcggcggctgctgtgctgggtgcagtgaggaagaggccctcggtggtgcccatggctggccaggatcctgcgctgagcacgagtcacccgttctacgacgtggccagacatggcattctgcaggtggcaggggatgaccgctttggaagacgtgttgtcacgttcagctgctgccggatgccaccctcccacgagctggaccaccagcggctgctggagtatttgaagtacacactggaccaatacgttgagaacgattataccatcgtctatttccactacgggctgaacagccggaacaagccttccctgggctggctccagagcgcatacaaggagttcgataggaaagacggggatctcactatgtggcccaggctggtctcgaactccaagctcaagcgatcctcccacctcagcctcccaaagtactgggattacaggtacaagaagaacttgaaggccctctacgtggtgcaccccaccagcttcatcaaggtcctgtggaacatcttgaagcccctcatcagtcacaagtttgggaagaaagtcatctatttcaactacctgagtgagctccacgaacaccttaaatacgaccagctggtcatccctcccgaagttttgcggtacgatgagaagctccagagcctgcacgagggccggacgccgcctcccaccaagacaccaccgccgcggcccccgctgcccacacagcagtttggcgtcagtctgcaatacctcaaagacaaaaatcaaggcgaactcatcccccctgtgctgaggttcacagtgacgtacctgagagagaaaggcctgcgcaccgagggcctgttccggagatccgccagcgtgcagaccgtccgcgagatccagaggctctacaaccaagggaagcccgtgaactttgacgactacggggacattcacatccctgccgtgatcctgaagaccttcctgcgagagctgccccagccgcttctgaccttccaggcctacgagcagattctcgggatcacctgtgtggagagcagcctgcgtgtcactggctgccgccagatcttacggagcctcccagagcacaactacgtcgtcctccgctacctcatgggcttcctgcatgcggtgtcccgggagagcatcttcaacaaaatgaacagctctaacctggcctgtgtcttcgggctgaatttgatctggccatcccagggggtctcctccctgagtgcccttgtgcccctgaacatgttcactgaactgctgatcgagtactatgaaaagatcttcagcaccccggaggcacctggggagcacggcctggcaccatgggaacaggggagcagggcagcccctttgcaggaggctgtgccacggacacaagccacgggcctcaccaagcctaccctacctccgagtcccctgatggcagccagaagacgtctctagtgttgcgaacactctgtatatttcgagctacctcccacacctgtctgtgcacttgtatgttttgtaaacttggcatctgtaaaaataaccagccattagatgaattcagaaccttctaatgaaaactccatgcctctgctcaaaaaaaaaaaaaaaatagaaaagaaaaaaacaaaagaaaaaaagcgaatagaaaacaaaacaagagaaagaatcaaaaaaaaaaggaggggggggggcggggacacagatccccctccggggggggcgaccgtttccgtccgccaccccgttttttgggccaggagggggccctc

SEQ ID NO: 451381 - DNA, 1756 bp, Homo sapiens
ctccgcggccccctcccccggccccgggctccggctccggctccggctctggctctgcgcggtggcagcggcggcggcggcgcggggaccgaggttgaagttcatgagttcgcccagcctcagtgacctgggcaagagagagccggccgccgccgcggacgagcggggcacgcagcagcgccgggcctgcgccaacgccacctggaacagcatccacaacggggtgatcgccgtcttccagcgcaaggggctgcccgaccaggagctcttcagcctcaacgagggcgtccggcagctgttgaagacagagctggggtccttcttcacggagtacctgcagaaccagctgctgacaaaaggcatggtgatccttcgggacaagattcgcttctatgagggacagaagctgctggactcactggcagagacctgggacttcttcttcagtgacgtgctgcccatgctgcaggccatcttctacccggtgcagggcaaggagccatcggtgcgccagctggccctgctgcacttccggaatgccatcaccctcagtgtgaagctagaggatgcgctggcccgggcccatgcccgtgtgccccctgccatcgtgcagatgctgctggtgctgcagggggtacatgagtccaggggcgtgactgaggactacctgcgcctggagacgctggtccagaaggtggtgtcgccatacctgggcacctacggcctccactccagcgaggggcccttcacccattcctgcatcctggaaaagcgcctcctccgccgctcccgctcgggggacgtgctggccaagaaccctgtggtgcgctccaagagctacaacacgcctctgctgaaccccgtgcaggagcacgaggcggagggcgcggcggccggcggtaccagcatccgcaggcactctgtgtcggagatgacgtcctgccccgagcctcagggcttctccgacccgcccggccagggccccaccgggaccttcaggtcctccccggcgccccactcagggccctgccccagcagactgtaccccacgacccagccccctgagcagggcttggatcccacccgcagctccctgccccgctccagcccggagaacctggtggaccagatcctggagtccgtggactcggattctgaagggattttcattgactttggccggggccggggctctggcatgtccgacttggagggctctgggggccggcagagtgtcgtgtgaggcctcacagctggccttgagtttttactgacacgtccctgtgtgcgggggtgtccatgtggcgtgtgtgtgagtgagacttttttactgcgtcccgtcccgccagccctatcggcctcgtcactggccttggtcactttgtatttctgtcttggttggaaataccatcagccttccttgctcggcccaggtctgtttcaggcatctgagtcggcgtttacccaggggccgggccagagacgggggtcggccgctcgctcccacgctcctcctgccccagccctctggtgtccacacctgcccacagagaatgtaaacccagtgggctctgcccacgccgggccccaaagtgaccagactccagcacacctgtctcctcctgcctggggtggccatggggatggaagggggtggaataaaacctgtcaacctggaaaaaaaaaaaaaaacgagtgatcgccattagacttccaggtttaccagctgcaccacttcctcctcataggaaaaaaa

SEQ ID NO: 451382 - DNA, 2921 bp, Homo sapiens
  misc_feature (2323)..(2323): n is a, c, g, or t
acgtccggggaggggccaggtgagcggcagacccggcacgcaggtgggggccggcggggtccgtggccagagctgcagagagacaaggcggcggcggctgctgtgctgggtgcagtgaggaagaggccctcggtggtgcccatggctggccaggatcctgcgctgagcacgagtcacccgttctacgacgtggccagacatggcattctgcaggtggcaggggatgaccgctttggaagacgtgttgtcacgttcagctgctgccggatgccaccctcccacgagctggaccaccagcggctgctggagtatttgaagtacacactggaccaatacgttgagaacgattataccatcgtctatttccactacgggctgaacagccggaacaagccttccctgggctggctccagagcgcatacaaggagttcgataggaagtacaagaagaacttgaaggccctctacgtggtgcaccccaccagcttcatcaaggtcctgtggaacatcttgaagcccctcatcagtcacaagtttgggaagaaagtcatctatttcaactacctgagtgagctccacgaacaccttaaatacgaccagctggtcatccctcccgaagttttgcggtacgatgagaagctccagagcctgcacgagggccggacgccgcctcccaccaagacaccaccgccgcggcccccgctgcccacacagcagtttggcgtcagtctgcaatacctcaaagacaaaaatcaaggcgaactcatcccccctgtgctgaggttcacagtgacgtacctgagagagaaaggcctgcgcaccgagggcctgttccggagatccgccagcgtgcagaccgtccgcgagatccagaggctctacaaccaagggaagcccgtgaactttgacgactacggggacattcacatccctgccgtgatcctgaagaccttcctgcgagagctgccccagccgcttctgaccttccaggcctacgagcagattctcgggatcacctgtgcgtagctgccctggcgcaggggtggggggcttggtcctcagatgctgtcccccagctactggcccagggtcaggctctggggtggccgaggtgacgtgtacccaccctcctcctgttgccatctggcactgcagggcaagagagggggttgttggggctgcccccaccatgcacagccagtccacactgtccaaaggcagaggaggtggggtcggtcagggttgtccaggccggtctctcaggcacagctgggccaggaggcagggtgatggggggctctctagatttggggctcatcatcctggtcaaagtcctgcctgtaaccgctcccaggccccagaccctcagctctctcatctagaaagggctctcggcatttctccccagatcattgtaggatgccaagcatatatcacaggaactgagcagctatagtgtctgatcctacaggcgctttgtgatgggtcaaatgctcagtgtggctgagcacagatgactcgtaaaaaactccgtaacagcatctcaaaacactggtgaatgctaaggaaagtgatgcctcgaaagaaccataaaacccctcaggccttcatctaagtcatcgaacaccgtcttttcaaatgggactacctccagcgccctcctttcttcttggagcactaacagtcgaaggggggagctgattttggtgtgaattctgaagcagctcggttaagatatcgtaaagacaaatcttgaatcttaaaatcaatgtttctaccccactgtgtattcaagaatcacatttgcccaaagggcagcctggcctttgtcctggcccctggggggtgacttctgaaccttgcactttcccaaggggcaggagttacctttgtcactcatcaggggccctgatggtttatggtaactcatggttatggtgtgactcaagataggggtgtaggggtggccattccagaaagaccaattacatggttagagggtgcgggctttgagtgatgtgagaccagcctgacctctggggagggcatggggctggagactgatttcagtctcaaggcgtcctgtcaaggtcgctggaccccaaactcccctcaaaggcaaatttacacccatttactcagcagtgctcctaagcgcctgccaaatgcaacgccctttctgagatggggaaggtctctcctacaccctggaagaccatgaaagatgttgagggctgactgactttggctagtggatgggaagcctgggagagttcagagccaggctgagcctcatggagacaaatttgatcatgcgcatagnggtacctatctggtggagacagaaggaggcactacattcagcagcatcctaccagccggggccagagcaggcaagatggacaatgctccatcacctgaatgcgccaggctgtgtcctagagagaagcttccagaagcctcccaacttcattagcccctgcagagggatgatgactccagcctctgtaggttcctgcttgagaaaactcaatgctgccaggcgaacttactgtttgttccagccaaaacctggtgacagggagataggccctggaacccctctttgagcagcagttcctttagaaagcttgcaattgtgggccaggcatggtggctcgcgcctgtaatcccagcactttgggaggctgagttgggtggatcacttgtcataggagttcaggaccagcctggtcaacatggcaaaaccctgtctctactaaaatacaaaaattagccaagcgtggtggtgcacgcctgtggtcccagctactcgggaggctgaggcgggagaatgacttgaacccaggaggcagaggttgtagtgagccgggatcgtgccattgcactgcagcctgggtgacagaacaagactccatctc

SEQ ID NO: 451383 - DNA, 1703 bp, Homo sapiens
cctgctgggcctcggttttctatctgtaaagtggggggattatttccagcgtacggctggtcatgaagatgaacttggaccacgtgcataaagccacaggtgatggatgctcactcagcaggtgtcgcctccgaggaacgctgctgcctgtgcctcccagctcgggctggactggccaaggaggctgctttttgctaagtgcctgaggattttctaggagaaggtggcacagaggctcacctgtgtctgctcctccaggggatgaccgctttggaagacgtgttgtcacgttcagctgctgccggatgccaccctcccacgagctggaccaccagcggctgctggagtatttgaagtacacactggaccaatacgttgagaacgattataccatcgtctatttccactacgggctgaacagccggaacaagccttccctgggctggctccagagcgcatacaaggagttcgataggaagtacaagaagaacttgaaggccctctacgtggtgcaccccaccagcttcatcaaggtcctgtggaacatcttgaagcccctcatcagtcacaagtttgggaagaaagtcatctatttcaactacctgagtgagctccacgaacaccttaaatacgaccagctggtcatccctcccgaagttttgcggtacgatgagaagctccagagcctgcacgagggccggacgccgcctcccaccaagacaccaccgccgcggcccccgctgcccacacagcagtttggcgtcagtctgcaatacctcaaagacaaaaatcaaggcgaactcatcccccctgtgctgaggttcacagtgacgtacctgagagagaaaggcctgcgcaccgagggcctgttccggagatccgccagcgtgcagaccgtccgcgagatccagaggctctacaaccaagggaagcccgtgaactttgacgactacggggacattcacatccctgccgtgatcctgaagaccttcctgcgagagctgccccagccgcttctgaccttccaggcctacgagcagattctcgggatcacctgtgtggagagcagcctgcgtgtcactggctgccgccagatcttacggagcctcccagagcacaactacgtcgtcctccgctacctcatgggcttcctgcatgcggtgtcccgggagagcatcttcaacaaaatgaacagctctaacctggcctgtgtcttcgggctgaatttgatctggccatcccagggggtctcctccctgagtgcccttgtgcccctgaacatgttcactgaactgctgatcgagtactatgaaaagatcttcagcaccccggaggcacctggggagcacggcctggcaccatgggaacaggggagcagggcagcccctttgcaggaggctgtgccacggacacaagccacgggcctcaccaagcctaccctacctccgagtcccctgatggcagccagaagacgtctctagtgttgcgaacactctgtatatttcgagctacctcccacacctgtctgtgcacttgtatgttttgtaaacttggcatctgtaaaaataaccagccattagatgaattcagaaccttctaatgaaaactccatgcctctggtccttggactcttgtccatggttcctgagctgtggaccgggatagaataatgcatttgttaggatggatgttttgaatcccaa

SEQ ID NO: 451384 - DNA, 1387 bp, Homo sapiens
atgtccgtggctgtgttccaagaaaacgttattggcaaaaacaggcagtgggccagatctaagccatgggcggtagtttgccaacccctggtctagaccactcccatttataaagtgattcggctttagcagcttcctggaaggtggtgctgctggctgataaagcagagggatggagcttgtagaattcaggtgatgatagggcttggatctgagtccccagcgcgtctcatgttgaattgaaactttggaggtggggactggtggcaggtgattggatcatgagggcagatacctcatgggttggtgctgtcctcgagatagtgagttcttaccagatctggtttaaaagcatgtggcacctctgtcccactctctcttgctcctgtttttgccacgtgatgcacctccttcctttttgccttctgccataattggaagcctcctgaggcttctccagaagctgaacaggtgctggtgccatgcttgtacagcctgtagaaccatgagccagttaaacctcttttcttataaataaccccatctcagcaagaatagccaaacacacaggtttgctgagcagagccatacggccagaagataagtgggggtcccaagcccaaatgtgggatagtccatcctcagagctgtccttcctccacccgttctcctcccgggccgggatgcagcgctgcccctggcccctctggagctcagcagggagccccatgcccttccaggtgtggagagcagcctgcgtgtcactggctgccgccagatcttacggagcctcccagagcacaactacgtcgtcctccgctacctcatgggcttcctgcatgcggtgtcccgggagagcatcttcaacaaaatgaacagctctaacctggcctgtgtcttcgggctgaatttgatctggccatcccagggggtctcctccctgagtgcccttgtgcccctgaacatgttcactgaactgctgatcgagtactatgaaaagatcttcagcaccccggaggcacctggggagcacggcctggcaccatgggaacaggggagcagggcagcccctttgcaggaggctgtgccacggacacaagccacgggcctcaccaagcctaccctacctccgagtcccctgatggcagccagaagacgtctctagtgttgcgaacactctgtatatttcgagctacctcccacacctgtctgtgcacttgtatgttttgtaaacttggcatctgtaaaaataaccagccattagatgaattcagaaccttctaatgaaaactccatgcctctggtccttggactcttgtccatggttcctgagctgtggaccgggatagaataatgcatttgttaggatggatgttttgaatcccaa

SEQ ID NO: 451385 - DNA, 1787 bp, Homo sapiens
caggaaggggtgctctgtgggcttggaggatgcaggcgccttcctggggactgctctgtgagcagtgataaaatatttatcagccagcagctgggcttccctgcatagggtgcagtcgggggcagctcccacccgagcctgcagcctgagttctgctgagtcatgggggagcccagtgagccgcctgccctcaagctcctgggccccctctgccctttggccatgtgaacgcctcctaatgtgtaagccattcggctgcccccaaggccaggcatccagtgtgcttagtgctgagcagggtttcagagctcacccccaggagggtgcagacctcagccaaggtcgcagagcagaggagacccgtgggctgggattccacctgtgcccaccctggcagcatcccacctcctgagtcctctcggcacccagcaagcatccacaacggggtgatcgccgtcttccagcgcaaggggctgcccgaccaggagctcttcagcctcaacgagggcgtccggcagctgttgaagacagagctggggtccttcttcacggagtacctgcagaaccagctgctgacaaaaggcatggtgatccttcgggacaagattcgcttctatgaggagctgcagagagacaaggcggcggcggctgctgtgctgggtgcagtgaggaagaggccctcggtggtgcccatggctggccaggatcctgcgctgagcacgagtcacccgttctacgacgtggccagacatggcattctgcaggtggcaggggatgaccgctttggaagacgtgttgtcacgttcagctgctgccggatgccaccctcccacgagctggaccaccagcggctgctggagtatttgaagtacacactggaccaatacgttgagaacgattataccatcgtctatttccactacgggctgaacagccggaacaagccttccctgggctggctccagagcgcatacaaggagttcgataggaaagacggggatctcactatgtggcccaggctggtctcgaactccaagctcaagcgatcctcccacctcagcctcccaaagtactgggattacaggcaggagccaccatgccaagccaacactcttgttcttaaagggccagacagtcagcattttagctttgcaggcctgttgctctattgcaacaactctgctggactgtgttccagtaaaacattatggacgctgaaatgtgaatttcatgtcattttcacgtgtcatgaaatattcttctgtttttttttttcaaccacttaaaaacataaaaagccatttttagcttgcagcctgtaccaaagcaggaagcaggctaggttcatcctgcctgcccattctcccacccctggtccagtgaattactggcaaagaaacaactgcatgaccgtttcttcactaaagcctcttcttgctttcacagccctttacagtctgcaaggggcattctgatgcctcttgttggtgagatggcagcctcattttacagatgaggacataggccccagggagcaagtgacttacccgtggtcactcagcttgtgtgtggtagggcaggatcccaccccaggcccccgcctccctctcccacccaacgctactcaccgcttggccatggcctggagccggcagacttttcctgagggacgtccggcctaataatcaacttggcaatatatctggctcgtagactgcggcgatgggcgttgatgtggatatcctagattcctctgggttttccttcttcaaagtcctttcaaacct

SEQ ID NO: 451386 - DNA, 1709 bp, Homo sapiens
gcccccggcctccgtttgcgccgggtctgtgctggccgcgcgcctggcgctccacgctgagcctctccgtgcaatgattaacccggcggggcggccggcgcgggacccgagacggaggcgcggggccggggcgggaccccgcaggaccgctcggcttcctgctctcgccggagtttccgcgtagagggcgcatcgccggcccggggcccttggtgcggcgtggcgcagggcgcggcgtggggcgcgcgtgggcgcggcgcaggcggcccgggtcaccatgaggactctccgcaggttgaagttcatgagttcgcccagcctcagtgacctgggcaagagagagccggccgccgccgcggacgagcggggcacgcagcagcgccgggcctgcgccaacgccacctggaacagcatccacaacggggtgatcgccgtcttccagcgcaaggggctgcccgaccaggagctcttcagcctcaacgagggcgtccggcagctgttgaagacagagctggggtccttcttcacggagtacctgcagaaccagctgctgacaaaaggcatggtgatccttcgggacaagattcgcttctatgagggacagaagctgctggactcactggcagagacctgggacttcttcttcagtgacgtgctgcccatgctgcaggccatcttctacccggtgcagggcaaggagccatcggtgcgccagctggccctgctgcacttccggaatgccatcaccctcagtgtgaagctagaggatgcgctggcccgggcccatgcccgtgtgccccctgccatcgtgcagatgctgctggtgctgcagggggtacatgagtccaggggcgtgactgaggactacctgcgcctggagacgctggtccagaaggtggtgtcgccatacctgggcacctacggcctccactccagcgaggggcccttcacccattcctgcatcctggagctgcagagagacaaggcggcggcggctgctgtgctgggtgcagtgaggaagaggccctcggtggtgcccatggctggccaggatcctgcgctgagcacgagtcacccgttctacgacgtggccagacatggcattctgcaggtggcaggggatgaccgctttggaagacgtgttgtcacgttcagctgctgccggatgccaccctcccacgagctggaccaccagcggctgctggagtatttgaagtacacactggaccaatacgttgagaacgattataccatcgtctatttccactacgggctgaacagccggaacaagccttccctgggctggctccagagcgcatacaaggagttcgataggaagtacgtgcccgcaagccttcagggacgtgggtgtgggctgcttgtggcaggaggaggcattgtggccacaaggggtcgcagagtgtgcagtgggggaggggtctggtagggcggagggtggagggtgagcaaatgtggggcagtggaggttcacctcccctctgggccaagctctggaatcccgggcaggggttggcactcatttttttttttctttctttcttttttttaagagacggtctcacccagccaccatggctcacacctgtaatcccagtactttgggaggccaaggtgggtggatcacctgaggtcaggagttcgagaccaggctggccaacatggcgaaaccctgtctctagtaaaaatac

SEQ ID NO: 451387 - DNA, 1031 bp, Homo sapiens
  misc_feature (804)..(804): n is a, c, g, or t
  misc_feature (822)..(822): n is a, c, g, or t
  misc_feature (827)..(827): n is a, c, g, or t
  misc_feature (830)..(830): n is a, c, g, or t
  misc_feature (835)..(835): n is a, c, g, or t
  misc_feature (837)..(837): n is a, c, g, or t
  misc_feature (1029)..(1030): n is a, c, g, or t
aattcgcggccgcgtcgaccgacagaaggggaccaaacctcttcgaggcacaaggcacaacaggctgctctgggattctcttcagccaatcttcattgctcaagtgtctgaagcagccatggcagaagtacctgagctcgccagtgaaatgatggcttattacagtggcaatgaggatgacttgttctttgaagctgatggccctaaacagatgaagtgctccttccaggacctggacctctgccctctggatggcggcatccagctacgaatctccgaccaccactacagcaagggcttcaggcaggccgcgtcagttgttgtggccatggacaagctgaggaagatgctggttccctgcccacagaccttccaggagaatgacctgagcaccttctttcccttcatctttgaagaagaacctatcttcttcgacacatgggataacgaggcttatgtgcacgatgcacctgtacgatcactgaactgcacgctccgggactcacagcaaaaaagcttggtgatgtctggtccatatgaactgaaagctctccacctccagggacaggatatggagcaacaagtggtgttctccatgtcctttgtacaaggagaagaaagtaatgacaaaatacctgtggccttgggcctcaaggaaaagaatctgtacctgtcctgcgtgttgaaagatgataagcccactctacagctggagagtgtagatcccaaaaattacccaaagaagaagatggaaaagcgatttgtcttcaacaagatagaaatcaataacaagctggaattggnctggccgtcccaagggtncttgnctntcagngnaaaatggcgcttcgggggccaggcggcggataatggtcccgccatggggttctaagagcgccaaatcggggatggggccactcggggcgaggacaaggtgaagctaccgactgttcacaccgctgggtagtgtccccagaatctggccgtgtgggcccagcacagtatgcccctttctgcgctccttctccnnc

SEQ ID NO: 451388 - DNA, 2125 bp, Homo sapiens
agaaatttctcagcctcctacttctgcttttgaaagctataaaaacagcgagggagaaactggcagataccaaacctcttcgaggcacaaggcacaacaggctgctctgggattctcttcagccaatcttcattgctcaagtgtctgaagcagccatggcagaagtacctgagctcgccagtgaaatgatggcttattacagtggcaatgaggatgacttgttctttgaagctgatggccctaaacagatgaagtgctccttccaggacctggacctctgccctctggatggcggcatccagctacgaatctccgaccaccactacagcaagggcttcaggcaggccgcgtcagttgttgtggccatggacaagctgaggaagatgctggttccctgcccacagaccttccaggagaatgacctgagcaccttctttcccttcatctttgaagaaggtagttagccaagagcaggcagtagatctccacttgtgtcctcttggaagtcatcaagccccagccaactcaattcccccagagccaaagccctttaaaggtagaaggcccagcggggagacaaaacaaagaaggctggaaaccaaagcaatcatctctttagtggaaactattcttaaagaagatcttgatggctactgacatttgcaactccctcactctttctcaggggcctttcacttacattgtcaccagaggttcgtaacctccctgtgggctagtgttatgaccatcaccattttacctaagtagctctgttgctcggccacagtgagcagtaatagacctgaagctggaacccatgtctaatagtgtcaggtccagtgttcttagccaccccaatcccagcttcatccctactggtgttgtcatcagactttgaccgtatatgctcaggtgtcctccaagaaatcaaattttgccgcctcgcctcacgaggcctgcccttctgattttatacctaaacaacatgtgctccacatttcagaacctatcttcttcgacacatgggataacgaggcttatgtgcacgatgcacctgtacgatcactgaactgcacgctccgggactcacagcaaaaaagcttggtgatgtctggtccatatgaactgaaagctctccacctccagggacaggatatggagcaacaagtggtgttctccatgtcctttgtacaaggagaagaaagtaatgacaaaatacctgtggccttgggcctcaaggaaaagaatctgtacctgtcctgcgtgttgaaagatgataagcccactctacagctggagagtgtagatcccaaaaattacccaaagaagaagatggaaaagcgatttgtcttcaacaagatagaaatcaataacaagctggaatttgagtctgcccagttccccaactggtacatcagcacctctcaagcagaaaacatgcccgtcttcctgggagggaccaaaggcggccaggatataactgacttcaccatgcaatttgtgtcttcctaaagagagctgtacccagagagtcctgtgctgaatgtggactcaatccctagggctggcagaaagggaacagaaaggtttttgagtacggctatagcctggactttcctgttgtctacaccaatgcccaactgcctgccttagggtagtgctaagaggatctcctgtccatcagccaggacagtcagctctctcctttcagggccaatccccagcccttttgttgagccaggcctctctcacctctcctactcacttaaagcccgcctgacagaaaccacggccacatttggttctaagaaaccctctgtcattcgctcccacattctgatgagcaaccgcttccctatttatttatttatttgtttgtttgttttattcattggtctaatttattcaaagggggcaagaagtagcagtgtctgtaaaagagcctagtttttaatagctatggaatcaattcaatttggactggtgtgctctctttaaatcaagtcctttaattaagactgaaaatatataagctcagattatttaaatgggaatatttataaatgagcaaatatcatactgttcaatggttctgaaataaacttcactgaagaaaaaaaaaggg

SEQ ID NO: 451389 - DNA, 1068 bp, Homo sapiens
  misc_feature (841)..(841): n is a, c, g, or t
  misc_feature (859)..(859): n is a, c, g, or t
  misc_feature (864)..(864): n is a, c, g, or t
  misc_feature (867)..(867): n is a, c, g, or t
  misc_feature (872)..(872): n is a, c, g, or t
  misc_feature (874)..(874): n is a, c, g, or t
  misc_feature (1066)..(1067): n is a, c, g, or t
agaaatttctcagcctcctacttctgcttttgaaagctataaaaacagcgagggagaaactggcagataccaaacctcttcgaggcacaaggcacaacaggctgctctgggattctcttcagccaatcttcattgctcaagtgtctgaagcagccatggcagaagtacctgagctcgccagtgaaatgatggcttattacagtggcaatgaggatgacttgttctttgaagctgatggccctaaacagatgaagtgctccttccaggacctggacctctgccctctggatggcggcatccagctacgaatctccgaccaccactacagcaagggcttcaggcaggccgcgtcagttgttgtggccatggacaagctgaggaagatgctggttccctgcccacagaccttccaggagaatgacctgagcaccttctttcccttcatctttgaagaagaacctatcttcttcgacacatgggataacgaggcttatgtgcacgatgcacctgtacgatcactgaactgcacgctccgggactcacagcaaaaaagcttggtgatgtctggtccatatgaactgaaagctctccacctccagggacaggatatggagcaacaagtggtgttctccatgtcctttgtacaaggagaagaaagtaatgacaaaatacctgtggccttgggcctcaaggaaaagaatctgtacctgtcctgcgtgttgaaagatgataagcccactctacagctggagagtgtagatcccaaaaattacccaaagaagaagatggaaaagcgatttgtcttcaacaagatagaaatcaataacaagctggaattggnctggccgtcccaagggtncttgnctntcagngnaaaatggcgcttcgggggccaggcggcggataatggtcccgccatggggttctaagagcgccaaatcggggatggggccactcggggcgaggacaaggtgaagctaccgactgttcacaccgctgggtagtgtccccagaatctggccgtgtgggcccagcacagtatgcccctttctgcgctccttctccnnc

SEQ ID NO: 451390 - DNA, 1791 bp, Homo sapiens
cttgccccaacatccgtcccacccaatgccaggtggttccttgtagggaaattttaccgcccagcaggaacttatatctctccgctgtaacgggcaaaagtttcaagtgcggtgaacccatcattagctgtggtgatctgcctggcatcgtgccacagtagccaaagcctctgcacaggagtgtgggcaactaaggctgctgactttgaaggacagcctcactcagggggaagctatttgctctcagccaggccaagaaaatcctgtttctttggaatcgggtagtaagagtgatcccagggcctccaattgacactgctgtgactgaggaagatcaaaatgagtgtctctctttggagccactttcccagctcagcctctcctctcccagtttcttcccatgggctactctctgttcctgaaacagttctggtgcctgatttctggcagaagtacagcttcacctctttcctttccttccacattgatcaagttgttccgctcctgtggatgggcacattgccagccagtgacacaatggcttccttccttccttccttcagcatttaaaatgtagaccctctttcattctccgttcctactgctatgaggctctgagaaaccctcaggcctttgaggggaaaccctaaatcaacaaaatgaccctgctattgtctgtgagaagtcaagttatcctgtgtcttaggccaaggaacctcactgtgggttcccacagaggctaccaaattacatgtatcctactcatggggcctaggggttggggtgaccctgcactgctgtgtccctaaccacaagacccccttctttcttcagtggtgttctccatgtcctttgtacaaggagaagaaagtaatgacaaaatacctgtggccttgggcctcaaggaaaagaatctgtacctgtcctgcgtgttgaaagatgataagcccactctacagctggagagtgtagatcccaaaaattacccaaagaagaagatggaaaagcgatttgtcttcaacaagatagaaatcaataacaagctggaatttgagtctgcccagttccccaactggtacatcagcacctctcaagcagaaaacatgcccgtcttcctgggagggaccaaaggcggccaggatataactgacttcaccatgcaatttgtgtcttcctaaagagagctgtacccagagagtcctgtgctgaatgtggactcaatccctagggctggcagaaagggaacagaaaggtttttgagtacggctatagcctggactttcctgttgtctacaccaatgcccaactgcctgccttagggtagtgctaagaggatctcctgtccatcagccaggacagtcagctctctcctttcagggccaatccccagcccttttgttgagccaggcctctctcacctctcctactcacttaaagcccgcctgacagaaaccacggccacatttggttctaagaaaccctctgtcattcgctcccacattctgatgagcaaccgcttccctatttatttatttatttgtttgtttgttttattcattggtctaatttattcaaagggggcaagaagtagcagtgtctgtaaaagagcctagtttttaatagctatggaatcaattcaatttggactggtgtgctctctttaaatcaagtcctttaattaagactgaaaatatataagctcagattatttaaatgggaatatttataaatgagcaaatatcatactgttcaatggttctgaaataaacttcactgaagaaaaaaaaaggg

SEQ ID NO: 451391 - DNA, 308 bp, Homo sapiens
  misc_feature (288)..(288): n is a, c, g, or t
aattcgcggccgcgtcgaccgacagaaggggaccaaacctcttcgaggcacaaggcacaacaggctgctctgggattctcttcagccaatcttcattgctcaagtgtctgaagcagccatggcagaagtacctgagctcgccagtgaaatgatggcttattacagtggcaatgaggatgacttgttctttgaagctgatggccctaaacagatgaagtgctctctagacctgacctctgcctctgatgcgcatcagctcgatctcgacacactacagcagctagcagngtcagtgtgtgcatgcagct

SEQ ID NO: 451392 - DNA, 852 bp, Homo sapiens
ggcacaaggcacaacaggctgctctgggattctcttcagccaatcttcattgctcaagtatgactttaatcttccttacaactaggtgctaagggagtctctctgtctctctgcctctttgtgtgtatgcatattctctctctctctctctttctttctctgtctctccctctccttccctctctgcctccctctctcagctttttgcaaaaatgccaggtgtaatataatgcttatgactcgggaaatattctgggaatggatactgcttatctaacagctgacaccctaaaggttagtgtcaaagcctctgctccagctctcctagccaatacattgctagttggggtttggtttagcaaatgcttttctctagacccaaaggacttctctttcacacattcattcatttactcagagatcatttctttgcatgactgccatgcactggatgctgagagaaatcacacatgaacgtagccgtcatggggaagtcactcattttctcctttttacacaggtgtctgaagcagccatggcagaagtacctgagctcgccagtgaaatgatggcttattacaggtcagtggagacgctgagaccagtaacatgagcaggtctcctctttcaagagtagagtgttatctgtgcttggagaccagatttttcccctaaattgcctctttcagtggcaaacagggtgccaagtaaatctgatttaaagactactttcccattacaagtccctccagccttgggacctggaggctatccagatgtgttgttgcaagggcttcctgcagaggcaaatggggagaaaagactccaagcccacaatacaaggaatccctt

SEQ ID NO: 451393 - DNA, 1578 bp, Homo sapiens
agaaatttctcagcctcctacttctgcttttgaaagctataaaaacagcgagggagaaactggcagataccaaacctcttcgaggcacaaggcacaacaggctgctctgggattctcttcagccaatcttcattgctcaagtgtctgaagcagccatggcagaagtacctgagctcgccagtgaaatgatggcttattacagtggcaatgaggatgacttgttctttgaagctgatggccctaaacagatgaagtgctccttccaggacctggacctctgccctctggatggcggcatccagctacgaatctccgaccaccactacagcaagggcttcaggcaggccgcgtcagttgttgtggccatggacaagctgaggaagatgctggttccctgcccacagaccttccaggagaatgacctgagcaccttctttcccttcatctttgaagaagaacctatcttcttcgacacatgggataacgaggcttatgtgcacgatgcacctgtacgatcactgaactgcacgctccgggactcacagcaaaaaagcttggtgatgtctggtccatatgaactgaaagctctccacctccagggacaggatatggagcaacaagtggtgttctccatgtcctttgtacaaggagaagaaagtaatgacaaaatacctgtggccttgggcctcaaggaaaagaatctgtacctgtcctgcgtgttgaaagatgataagcccactctacagctggagagtgtagatcccaaaaattacccaaagaagaagatggaaaagcgatttgtcttcaacaagatagaaatcaataacaagctggaatttgagtctgcccagttccccaactggtacatcagcacctctcaagcagaaaacatgcccgtcttcctgggagggaccaaaggcggccaggatataactgacttcaccatgcaatttgtgtcttcctaaagagagctgtacccagagagtcctgtgctgaatgtggactcaatccctagggctggcagaaagggaacagaaaggtttttgagtacggctatagcctggactttcctgttgtctacaccaatgcccaactgcctgccttagggtagtgctaagaggatctcctgtccatcagccaggacagtcagctctctcctttcagggccaatccccagcccttttgttgagccaggcctctctcacctctcctactcacttaaagcccgcctgacagaaaccacggccacatttggttctaagaaaccctctgtcattcgctcccacattctgatgagcaaccgcttccctatttatttatttatttgtttgtttgttttattcattggtctaatttattcaaagggggcaagaagtagcagtgtctgtaaaagagcctagtttttaatagctatggaatcaattcaatttggactggtgtgctctctttaaatcaagtcctttaattaagactgaaaatatataagctcagattatttaaatgggaatatttataaatgagcaaatatcatactgttcaatggttctgaaataaacttcactgaagaaaaaaaaaggg

SEQ ID NO: 451394 - DNA, 1541 bp, Homo sapiens
aattcgcggccgcgtcgaccgacagaaggggaccaaacctcttcgaggcacaaggcacaacaggctgctctgggattctcttcagccaatcttcattgctcaagtgtctgaagcagccatggcagaagtacctgagctcgccagtgaaatgatggcttattacagtggcaatgaggatgacttgttctttgaagctgatggccctaaacagatgaagtgctccttccaggacctggacctctgccctctggatggcggcatccagctacgaatctccgaccaccactacagcaagggcttcaggcaggccgcgtcagttgttgtggccatggacaagctgaggaagatgctggttccctgcccacagaccttccaggagaatgacctgagcaccttctttcccttcatctttgaagaagaacctatcttcttcgacacatgggataacgaggcttatgtgcacgatgcacctgtacgatcactgaactgcacgctccgggactcacagcaaaaaagcttggtgatgtctggtccatatgaactgaaagctctccacctccagggacaggatatggagcaacaagtggtgttctccatgtcctttgtacaaggagaagaaagtaatgacaaaatacctgtggccttgggcctcaaggaaaagaatctgtacctgtcctgcgtgttgaaagatgataagcccactctacagctggagagtgtagatcccaaaaattacccaaagaagaagatggaaaagcgatttgtcttcaacaagatagaaatcaataacaagctggaatttgagtctgcccagttccccaactggtacatcagcacctctcaagcagaaaacatgcccgtcttcctgggagggaccaaaggcggccaggatataactgacttcaccatgcaatttgtgtcttcctaaagagagctgtacccagagagtcctgtgctgaatgtggactcaatccctagggctggcagaaagggaacagaaaggtttttgagtacggctatagcctggactttcctgttgtctacaccaatgcccaactgcctgccttagggtagtgctaagaggatctcctgtccatcagccaggacagtcagctctctcctttcagggccaatccccagcccttttgttgagccaggcctctctcacctctcctactcacttaaagcccgcctgacagaaaccacggccacatttggttctaagaaaccctctgtcattcgctcccacattctgatgagcaaccgcttccctatttatttatttatttgtttgtttgttttattcattggtctaatttattcaaagggggcaagaagtagcagtgtctgtaaaagagcctagtttttaatagctatggaatcaattcaatttggactggtgtgctctctttaaatcaagtcctttaattaagactgaaaatatataagctcagattatttaaatgggaatatttataaatgagcaaatatcatactgttcaatggttctgaaataaacttcactgaagaaaaaaaaaggg

SEQ ID NO: 451395 - DNA, 2004 bp, Homo sapiens
aattcgcggccgcgtcgaccgacagaaggggaccaaacctcttcgaggcacaaggcacaacaggctgctctgggattctcttcagccaatcttcattgctcaagtatgactttaatcttccttacaactaggtgctaagggagtctctctgtctctctgcctctttgtgtgtatgcatattctctctctctctctctttctttctctgtctctccctctccttccctctctgcctccctctctcagctttttgcaaaaatgccaggtgtaatataatgcttatgactcgggaaatattctgggaatggatactgcttatctaacagctgacaccctaaaggttagtgtcaaagcctctgctccagctctcctagccaatacattgctagttggggtttggtttagcaaatgcttttctctagacccaaaggacttctctttcacacattcattcatttactcagagatcatttctttgcatgactgccatgcactggatgctgagagaaatcacacatgaacgtagccgtcatggggaagtcactcattttctcctttttacacaggtgtctgaagcagccatggcagaagtacctgagctcgccagtgaaatgatggcttattacagtggcaatgaggatgacttgttctttgaagctgatggccctaaacagatgaagtgctccttccaggacctggacctctgccctctggatggcggcatccagctacgaatctccgaccaccactacagcaagggcttcaggcaggccgcgtcagttgttgtggccatggacaagctgaggaagatgctggttccctgcccacagaccttccaggagaatgacctgagcaccttctttcccttcatctttgaagaagaacctatcttcttcgacacatgggataacgaggcttatgtgcacgatgcacctgtacgatcactgaactgcacgctccgggactcacagcaaaaaagcttggtgatgtctggtccatatgaactgaaagctctccacctccagggacaggatatggagcaacaagtggtgttctccatgtcctttgtacaaggagaagaaagtaatgacaaaatacctgtggccttgggcctcaaggaaaagaatctgtacctgtcctgcgtgttgaaagatgataagcccactctacagctggagagtgtagatcccaaaaattacccaaagaagaagatggaaaagcgatttgtcttcaacaagatagaaatcaataacaagctggaatttgagtctgcccagttccccaactggtacatcagcacctctcaagcagaaaacatgcccgtcttcctgggagggaccaaaggcggccaggatataactgacttcaccatgcaatttgtgtcttcctaaagagagctgtacccagagagtcctgtgctgaatgtggactcaatccctagggctggcagaaagggaacagaaaggtttttgagtacggctatagcctggactttcctgttgtctacaccaatgcccaactgcctgccttagggtagtgctaagaggatctcctgtccatcagccaggacagtcagctctctcctttcagggccaatccccagcccttttgttgagccaggcctctctcacctctcctactcacttaaagcccgcctgacagaaaccacggccacatttggttctaagaaaccctctgtcattcgctcccacattctgatgagcaaccgcttccctatttatttatttatttgtttgtttgttttattcattggtctaatttattcaaagggggcaagaagtagcagtgtctgtaaaagagcctagtttttaatagctatggaatcaattcaatttggactggtgtgctctctttaaatcaagtcctttaattaagactgaaaatatataagctcagattatttaaatgggaatatttataaatgagcaaatatcatactgttcaatggttctgaaataaacttcactgaagaaaaaaaaaggg

SEQ ID NO: 451396 - DNA, 1304 bp, Homo sapiens
agaaatttctcagcctcctacttctgcttttgaaagctataaaaacagcgagggagaaactggcagataccaaacctcttcgaggcacaaggcacaacaggctgctctgggattctcttcagccaatcttcattgctcaagtgtctgaagcagccatggcagaagtacctgagctcgccagtgaaatgatggcttattacagtggcaatgaggatgacttgttctttgaagctgatggccctaaacagatgaagtgctccttccaggacctggacctctgccctctggatggcggcatccagctacgaatctccgaccaccactacagcaagggcttcaggcaggccgcgtcagttgttgtggccatggacaagctgaggaagatgctggttccctgcccacagaccttccaggagaatgacctgagcaccttctttcccttcatctttgaagaaggtagttagccaagagcaggcagtagatctccacttgtgtcctcttggaagtcatcaagccccagccaactcaattcccccagagccaaagccctttaaaggtagaaggcccagcggggagacaaaacaaagaaggctggaaaccaaagcaatcatctctttagtggaaactattcttaaagaagatcttgatggctactgacatttgcaactccctcactctttctcaggggcctttcacttacattgtcaccagaggttcgtaacctccctgtgggctagtgttatgaccatcaccattttacctaagtagctctgttgctcggccacagtgagcagtaatagacctgaagctggaacccatgtctaatagtgtcaggtccagtgttcttagccaccccaatcccagcttcatccctactggtgttgtcatcagactttgaccgtatatgctcaggtgtcctccaagaaatcaaattttgccgcctcgcctcacgaggcctgcccttctgattttatacctaaacaacatgtgctccacatttcagaacctatcttcttcgacacatgggataacgaggcttatgtgcacgatgcacctgtacgatcactgaactgcacgctccgggactcacagcaaaaaagcttggtgatgtctggtccatatgaactgaaagctctccacctccagggacaggatatggagcaacaaggtaaatggaaacatcctggtttccctgcctggcctcctggcagcttgctaattctccatgttttaaacaaagtagaaagttaatttaaggcaaatgatcaacacaagtgaaaaaaaatattaaaaaggaatataca

SEQ ID NO: 451397 - DNA, 897 bp, Homo sapiens
caacctttctttccccagtgtcctaaaagtatgaggatctcctgtttcaaagctgaacaaggcaatatgggagaaaatttgacaagaaacctcacagttgtaattaacctctggtgattctattttattttttcttttcttgaagccttgaagattttgatatctttatctgctcgatagcatagcatctgaatgggttggacttccacctctgccttcagccaggtgtctcttcggtctgggagaggtggatgataaaatctatgtagttgcaggcaaagaccttcaaacagaggcttcgctggattcagtattatgctatgatcctgtggctgcaaaatggaacgaagtaaaaaaactccctatcaaagtctatggccataatgtgatttcacataaagggatgatatattgtctaggaggaaagacagatgacaaaaaatgtacaaacagggtgtttatcttcaaccccaaaaaaggagattggaaagatctggctccaatgaaaattcctcgttccatgtttggagtagcagtccataaaggcaaaattgtgattgcaggaggtgtcactgaagatggtctttcagcttcagttgaagcttttgaccttacaacaaataaatgggatgtaatgaccgaatttccccaagaaagaagctccatcagtttggtcagcctggctggatctctgtatgcaattggtggttttgctatgattcaactggagtctaaagaatttgcacccactgaagtcaatgacatatggaatgctttggaggtttggcgtttctacaaagatcgggcgggttgagggcaaccttgctccagagcgttggcgtgacagtttaatcttctcaccgtgtacgtggcccggggcccttttggggggcgtgg

SEQ ID NO: 451398 - DNA, 1398 bp, Homo sapiens
caacctttctttccccagtgtcctaaaagtatgaggatctcctgtttcaaagctgaacaaggcaatatgggagaaaatttgacaagaaacctcacagttgtaattaacctctgctcgatagcatagcatctgaatgggttggacttccacctctgccttcagccaggtgtctcttcggtctgggagaggtggatgataaaatctatgtagttgcaggcaaagaccttcaaacagaggcttcgctggattcagtattatgctatgatcctgtggctgcaaaatggaacgaagtaaaaaaactccctatcaaagtctatggccataatgtgatttcacataaagggatgatatattgtctaggaggaaagacagatgacaaaaaatgtacaaacagggtgtttatcttcaaccccaaaaaaggagattggaaagatctggctccaatgaaaattcctcgttccatgtttggagtagcagtccataaaggcaaaattgtgattgcaggaggtgtcactgaagatggtctttcagcttcagttgaagcttttgaccttacaacaaataaatgggatgtaatgaccgaatttccccaagaaagaagctccatcagtttggtcagcctggctggatctctgtatgcaattggtggttttgctatgattcaactggagtctaaagaatttgcacccactgaagtcaatgacatatggaagtatgaagatgataaaaaagaatgggctgggatgttgaaggaaatacgttatgcttcaggagctagttgcctagcaacacgtttaaatctcttcaaactgtctaaactgtgaacaaggtgacaaaacataatagattgggaggtggtttgtttggtgaatggggctttaatttattctgttttttaaaagcttgtacagacactcatgtagaaattattcaagaagttattgtctaagagatgagcagtaggtaagaaaacctcagtcattgactcttcaatgtaatgatcagagtttaaaaccattttctaataataaattaaatcttcagttgaacaaattattttgtgaatctgtttcactcaatggattgtaaagaaggctcctaaatttgagttgtttgctaatcatttcatttgcatcattagggtatccttaaactgattttctattacaattggaagtggagaatatgtgcatctacactaaaaaaatgtttaagatatcaaaaacctctcctcgtgcttcaaaatgacaggaatcctgtgcattatactaagaattacatgccataagatgacttcagaaatcctacttcagaagtgtaataaatggatggggaaatcgtttgatggggaaaagtctcttgtaagtaaaagtagtcaaattcaaatggcaaaatctc

SEQ ID NO: 451399 - DNA, 2110 bp, Homo sapiens
gcctttttacagctagacctgtgtgctgcaaggagctaaggccttcagtgtccccttccttacccaggtttctcacagaatggattcccagcgggaacttgcagaggaactgcggctttaccaatccacccttcttcaggatggtctaaaagatctcctggatgagaaaaaattcatcgattgcaccctaaaagcaggtgacaaaagtcttccttgccacagattgattttgtcagcttgtagtccttacttccgtgagtactttttatctgaaattgatgaggcgaaaaaaaaggaggtagtgctagacaatgtggatcctgctatacttgatttaatcatcaaatacctgtactctgccagtattgatctcaatgacggaaatgtgcaagatatttttgcattggccagccgctttcagatcccctcagtgtttactgtctgcgtttcttatcttcagaaaagacttgctcctggtaactgtctagccatcctaagattaggacttcttcttgactgcccgagactcgccatttctgcccgtgaatttgtgtctgatcgctttgtacagatttgtaaggaagaggactttatgcaactgtctccacaggaactgatctcagtcatttcaaatgacagcctaaatgtagaaaaagaagaagcagtatttgaggcagtgatgaaatgggtgcgaacagacaaggaaaacagggttaaaaaccttagtgaagtgtttgattgtatccgttttcgccttatgacagaaaaatattttaaggatcatgttgagaaagatgatataattaaaagcaacccagacctccagaaaaaaatcaaagttctaaaagatgctttcgcaggcaaactcccagaacctagcaaaaatgccgcgaagactggggctggtgaggtgaatggtgatgttggtgatgaagatttacttcctggttacctgaatgacattcccaggcatggaatgtttgtaaaagacctcatcctcttggttaatgacacagcagcagtggcttatgaccccacggaaaatgaatgctaccttactgcactggctgagcagattcccagaaatcattccagcattgttacccagcaaaatcagatatatgtggtaggaggactatatgtggatgaagaaaataaggatcaacctctacagtcatacttcttccagctcgatagcatagcatctgaatgggttggacttccacctctgccttcagccaggtgtctcttcggtctgggagaggtggatgataaaatctatgtagttgcaggcaaagaccttcaaacagaggcttcgctggattcagtattatgctatgatcctgtggctgcaaaatggaacgaagtaaaaaaactccctatcaaagtctatggccataatgtgatttcacataaagggatgatatattgtctaggaggaaagacagatgacaaaaaatgtacaaacagggtgtttatcttcaaccccaaaaaaggagattggaaagatctggctccaatgaaaattcctcgttccatgtttggagtagcagtccataaaggcaaaattgtgattgcaggaggtgtcactgaagatggtctttcagcttcagttgaagcttttgaccttacaacaaataaatgggatgtaatgaccgaatttccccaagaaagaagctccatcagtttggtcagcctggctggatctctgtatgcaattggtggttttgctatgattcaactggagtctaaagaatttgcacccactgaagtcaatgacatatggaagtatgaagatgataaaaaagaatgggctgggatgttgaaggaaatacgttatgcttcaggagctagttgcctagcaacacgtttaaatctcttcaaactgtctaaactgtgaacaaggtgacaaaacataatagattgggaggtggtttgtttggtgaatggggctttaatttattctgttggggggggacctggacccgactctcctttatagaaggtttaataaagttatcgtggccgagattaaccaacgggtgagatggcaaaacccgggggttccccaattaaatgacctggagaaaaatccccttttttcacagtt

SEQ ID NO: 451400 - DNA, 852 bp, Homo sapiens
ttcattccttccatttatttgttgtaggtcaaagcttcaactgaagctgaaagaccatcttcagtttggtcagcctggctggatctctgtatgcaattggtggttttgctatgattcaactggagtctaaagaatttgcacccactgaagtcaatgacatatggaagtatgaagatgataaaaaagaatgggctgggatgttgaaggaaatacgttatgcttcaggagctagttgcctagcaacacgtttaaatctcttcaaactgtctaaactgtgaacaaggtgacaaaacataatagattgggaggtggtttgtttggtgaatggggctttaatttattctgttttttaaaagcttgtacagacactcatgtagaaattattcaagaagttattgtctaagagatgagcagtaggtaagaaaacctcagtcattgactcttcaatgtaatgatcagagtttaaaaccattttctaataataaattaaatcttcagttgaacaaattattttgtgaatctgtttcactcaatggattgtaaagaaggctcctaaatttgagttgtttgctaatcatttcatttgcatcattagggtatccttaaactgattttctattacaattggaagtggagaatatgtgcatctacactaaaaaaatgtttaagatatcaaaaacctctcctcgtgcttcaaaatgacaggaatcctgtgcattatactaagaattacatgccataagatgacttcagaaatcctacttcagaagtgtaataaatggatggggaaatcgtttgatggggaaaagtctcttgtaagtaaaagtagtcaaattcaaatggcaaaatctc

SEQ ID NO: 451401 - DNA, 2474 bp, Homo sapiens
gcctttttacagctagacctgtgtgctgcaaggagctaaggccttcagtgtccccttccttacccaggtttctcacagaatggattcccagcgggaacttgcagaggaactgcggctttaccaatccacccttcttcaggatggtctaaaagatctcctggatgagaaaaaattcatcgattgcaccctaaaagcaggtgacaaaagtcttccttgccacagattgattttgtcagcttgtagtccttacttccgtgagtactttttatctgaaattgatgaggcgaaaaaaaaggaggtagtgctagacaatgtggatcctgctatacttgatttaatcatcaaatacctgtactctgccagtattgatctcaatgacggaaatgtgcaagatatttttgcattggccagccgctttcagatcccctcagtgtttactgtctgcgtttcttatcttcagaaaagacttgctcctggtaactgtctagccatcctaagattaggacttcttcttgactgcccgagactcgccatttctgcccgtgaatttgtgtctgatcgctttgtacagatttgtaaggaagaggactttatgcaactgtctccacaggaactgatctcagtcatttcaaatgacagcctaaatgtagaaaaagaagaagcagtatttgaggcagtgatgaaatgggtgcgaacagacaaggaaaacagggttaaaaaccttagtgaagtgtttgattgtatccgttttcgccttatgacagaaaaatattttaaggatcatgttgagaaagatgatataattaaaagcaacccagacctccagaaaaaaatcaaagttctaaaagatgctttcgcaggcaaactcccagaacctagcaaaaatgccgcgaagactggggctggtgaggtgaatggtgatgttggtgatgaagatttacttcctggttacctgaatgacattcccaggcatggaatgtttgtaaaagacctcatcctcttggttaatgacacagcagcagtggcttatgaccccacggaaaatgaatgctaccttactgcactggctgagcagattcccagaaatcattccagcattgttacccagcaaaatcagatatatgtggtaggaggactatatgtggatgaagaaaataaggatcaacctctacagtcatacttcttccagctcgatagcatagcatctgaatgggttggacttccacctctgccttcagccaggtgtctcttcggtctgggagaggtggatgataaaatctatgtagttgcaggcaaagaccttcaaacagaggcttcgctggattcagtattatgctatgatcctgtggctgcaaaatggaacgaagtaaaaaaactccctatcaaagtctatggccataatgtgatttcacataaagggatgatatattgtctaggaggaaagacagatgacaaaaaatgtacaaacagggtgtttatcttcaaccccaaaaaaggagattggaaagatctggctccaatgaaaattcctcgttccatgtttggagtagcagtccataaaggcaaaattgtgattgcaggaggtgtcactgaagatggtctttcagcttcagttgaagcttttgaccttacaacaaataaatgggatgtaatgaccgaatttccccaagaaagaagctccatcagtttggtcagcctggctggatctctgtatgcaattggtggttttgctatgattcaactggagtctaaagaatttgcacccactgaagtcaatgacatatggaagtatgaagatgataaaaaagaatgggctgggatgttgaaggaaatacgttatgcttcaggagctagttgcctagcaacacgtttaaatctcttcaaactgtctaaactgtgaacaaggtgacaaaacataatagattgggaggtggtttgtttggtgaatggggctttaatttattctgttttttaaaagcttgtacagacactcatgtagaaattattcaagaagttattgtctaagagatgagcagtaggtaagaaaacctcagtcattgactcttcaatgtaatgatcagagtttaaaaccattttctaataataaattaaatcttcagttgaacaaattattttgtgaatctgtttcactcaatggattgtaaagaaggctcctaaatttgagttgtttgctaatcatttcatttgcatcattagggtatccttaaactgattttctattacaattggaagtggagaatatgtgcatctacactaaaaaaatgtttaagatatcaaaaacctctcctcgtgcttcaaaatgacaggaatcctgtgcattatactaagaattacatgccataagatgacttcagaaatcctacttcagaagtgtaataaatggatggggaaatcgtttgatggggaaaagtctcttgtaagtaaaagtagtcaaattcaaatggcaaaatctc

SEQ ID NO: 451402 - DNA, 2127 bp, Homo sapiens
gcctttttacagctagacctgtgtgctgcaaggagctaaggccttcagtgtccccttccttacccaggtttctcacagaatggattcccagcgggaacttgcagaggaactgcggctttaccaatccacccttcttcaggatggtctaaaagatctcctggatgagaaaaaattcatcgattgcaccctaaaagcaggtgacaaaagtcttccttgccacagattgattttgtcagcttgtagtccttacttccgtgagtactttttatctgaaattgatgaggcgaaaaaaaaggaggtagtgctagacaatgtggatcctgctatacttgatttaatcatcaaatacctgtactctgccagtattgatctcaatgacggaaatgtgcaagatatttttgcattggccagccgctttcagatcccctcagtgtttactgtctgcgtttcttatcttcagaaaagacttgctcctggtaactgtctagccatcctaagattaggacttcttcttgactgcccgagactcgccatttctgcccgtgaatttgtgtctgatcgctttgtacagatttgtaaggaagaggactttatgcaactgtctccacaggaactgatctcagtcatttcaaatgacagcctaaatgtagaaaaagaagaagcagtatttgaggcagtgatgaaatgggtgcgaacagacaaggaaaacagggttaaaaaccttagtgaagtgtttgattgtatccgttttcgccttatgacagaaaaatattttaaggatcatgttgagaaagatgatataattaaaagcaacccagacctccagaaaaaaatcaaagttctaaaagatgctttcgcaggcaaactcccagaacctagcaaaaatgccgcgaagactggggctggtgaggtgaatggtgatgttggtgatgaagatttacttcctggttacctgaatgacattcccaggcatggaatgtttgtaaaagacctcatcctcttggttaatgacacagcagcagtggcttatgaccccacggaaaatgaatgctaccttactgcactggctgagcagattcccagaaatcattccagcattgttacccagcaaaatcagatatatgtggtaggaggactatatgtggatgaagaaaataaggatcaacctctacagtcatacttcttccagctcgatagcatagcatctgaatgggttggacttccacctctgccttcagccaggtgtctcttcggtctgggagaggtggatgataaaatctatgtagttgcaggcaaagaccttcaaacagaggcttcgctggattcagtattatgctatgatcctgtggctgcaaaatggaacgaagtaaaaaaactccctatcaaagtctatggccataatgtgatttcacataaagggatgatatattgtctaggaggaaagacagatgacaaaaaatgtacaaacagggtgtttatcttcaaccccaaaaaaggagattggaaagatctggctccaatgaaaattcctcgttccatgtttggagtagcagtccataaaggcaaaattgtgattgcaggaggtgtcactgaagatggtctttcagcttcagttgaagcttttgaccttacaacaaataaatgggatgtaatgaccgaatttccccaagaaagaagctccatcagtttggtcagcctggctggatctctgtatgcaattggtggttttgctatgattcaactggagtctaaagaatttgcacccactgaagtcaatgacatatggaagtatgaagatgataaaaaagaatgggctgggatgttgaaggaaatacgttatgcttcaggagctagttgcctagcaacacgtttaaatctcttcaaactgtctaaactgtgaacaaggtgacaaaacataatagattgggaggtggtttgtttggtgaatggggctttaatttattctgttttttaaaagcttgtacagacactcatgtagaaattattcaagaagttattgtctaagagatgagcagtaggtaagaaaacctcagtcattgactcttcaatgtaatgatcagagtttaaaaccattttctaataataaattaaatcttcagttgaaca

SEQ ID NO: 451403 - DNA, 1992 bp, Homo sapiens
gcctttttacagctagacctgtgtgctgcaaggagctaaggccttcagtgtccccttccttacccaggtttctcacagaatggattcccagcgggaacttgcagaggaactgcggctttaccaatccacccttcttcaggatggtctaaaagatctcctggatgagaaaaaattcatcgattgcaccctaaaagcaggtgacaaaagtcttccttgccacagattgattttgtcagcttgtagtccttacttccgtgagtactttttatctgaaattgatgaggcgaaaaaaaaggaggtagtgctagacaatgtggatcctgctatacttgatttaatcatcaaatacctgtactctgccagtattgatctcaatgacggaaatgtgcaagatatttttgcattggccagccgctttcagatcccctcagtgtttactgtctgcgtttcttatcttcagaaaagacttgctcctggtaactgtctagccatcctaagattaggacttcttcttgactgcccgagactcgccatttctgcccgtgaatttgtgtctgatcgctttgtacagatttgtaaggaagaggactttatgcaactgtctccacaggaactgatctcagtcatttcaaatgacagcctaaatgtagaaaaagaagaagcagtatttgaggcagtgatgaaatgggtgcgaacagacaaggaaaacagggttaaaaaccttagtgaagtgtttgattgtatccgttttcgccttatgacagaaaaatattttaaggatcatgttgagaaagatgatataattaaaagcaacccagacctccagaaaaaaatcaaagttctaaaagatgctttcgcaggcaaactcccagaacctagcaaaaatgccgcgaagactggggctggtgaggtgaatggtgatgttggtgatgaagatttacttcctggttacctgaatgacattcccaggcatggaatgtttgtaaaagacctcatcctcttggttaatgacacagcagcagtggcttatgaccccacggaaaatgaatgctaccttactgcactggctgagcagattcccagaaatcattccagcattgttacccagcaaaatcagatatatgtggtaggaggactatatgtggatgaagaaaataaggatcaacctctacagtcatacttcttccagctcgatagcatagcatctgaatgggttggacttccacctctgccttcagccaggtgtctcttcggtctgggagaggtggatgataaaatctatgtagttgcaggcaaagaccttcaaacagaggcttcgctggattcagtattatgctatgatcctgtggctgcaaaatggaacgaagtaaaaaaactccctatcaaagtctatggccataatgtgatttcacataaagggatgatatattgtctaggaggaaagacagatgacaaaaaatgtacaaacagggtgtttatcttcaaccccaaaaaaggagattggaaagatctggctccaatgaaaattcctcgttccatgtttggagtagcagtccataaaggcaaaattgtgattgcaggaggtgtcactgaagatggtctttcagcttcagttgaagcttttgaccttacaacaaataaatgggatgtaatgaccgaatttccccaagaaagaagctccatcagtttggtcagcctggctggatctctgtatgcaattggtggttttgctatgattcaactggagtctaaagaatttgcacccactgaagtcaatgacatatggaaggagtccatgcctttggggagtctgagatcgtcacaagcatgcgtgcgctgttgcacggactaccgtttgcttcaggagctgttgccatcacccgtttaattctccaccgtctcacgggcccgggccccctctgtggggggggggggcgggggggccaatcctcggtccgcgtgcgccccctgttcccttctcgacccgggacc

SEQ ID NO: 451404 - DNA, 4373 bp, Homo sapiens
gaatgtggaggaaatcctgatgcaccaacaaggaagtttctgatcagataaggatttcaggacagttgcatgtgcaaaactattcgttgaggttccagaaacactgatatagagaccctcacagaagatacggtcccttatgcaccccactatgcttcactctttggggtgcagttagatattatgacttcagccaagcttcttggtaataaatgcattgacacactgacatatttagtaggttggggcaagtatttttagaagttttcatcctaagttcacaaccaccatgcaagctgccaggggccatgtgattcctgcccagaagttcagcttaggattgaaagtctggctggccttgactccctgggctctggtcatcagcaaatcatgagtttgggcaacaaaggtcaattccatctgatgctcatttttgtgaacaatttgcctccctcttagggagaaagattgctaaaataatttttgaaaattacctaatttttttgttgttcaaaacgttgaactcctcaatctaattatatcagagccaaagtatcctgtgaaaacaaagctttatatccaaaaatgtgcttttgcaaaattctttaatctgtgtaatggagggcagagggtatggggtaggagggtgggagaaagaaaagaaaagaatttggattctaatttatgaccatcttgacatatggtcaaaggtgtcattttcctactcagtttcaattctgagttaatttcttaagccttaaataataagaacaatggacagcctggcctggcagagagtttcacagatgacttaatctgagcaccatcacagagaagtcaggactaaaccccctactgagcagggcggcggagtgtccaaaggtctcagttctgtggagcagagtaccacgctttctgtggaatggggacagggtcaccacgctcactaaaatgcagtatgttccattgcagcaaagctttcgcctgtgttcaaaatgcatgtctagcagattgcagccttttaaattaaatatatataaatggttgtatatagaatatactctggactgtgagggcatcctattttggtatgcctcctggctgtggatggcatgtccagtgctctgtgagtgttttcagtcattcacattcactatgtgtttagagattctctccctgcttacagctgaaggatgttgatacaggcatcaagaaggctgaggggcagatggggcctgcaggttaaggcattgttaacttgctccatggaaatgtccatatcttaatgagtaaaaaagtgtatttttctgatacgtaaaccagaattgtgggcgtgtaggtcacatcactatttctttagcagcaaatctgttttcccagttgagagagacaatagcttctgcacaagaatatatgatggtaggatccatctgttcaattgtgtctgaaagaatctttattccaaagcgaaacctggggaaatgttttaccttcagccagatgctgtgtgtgtacttgggtcccttgtctttcctctaaggagaggtgcttgtggaaagtggaggttgtgggcatcttttcaaccttttcaatctgacctttcaacaggtcaggtgagagaaaagacaaagctatttgaacctatgtttttcttatgtccagaaatccgttctttcatcaaaccactaaaccactcgccttagcctcttctgcagtttctggtggctctatctgtgggcaagggactcctgcctgtgagaagtggccaggccctccagagcaacggggtctggcttcagggagcagtggggtgtggggaaagcaatgttcatcttggctgctccatttttataccatccatcaaggactcttgcgcttctctccacctgtgacgtagcagcattgccttctttcctcttggtgcttctgggcaaaactggaatttgaaatccagaactggcgttgtcttcttaaagagtatggttcctgcctcagttccagcctggtatggttctttgatatgccctgaaggttctcacatggaaacatcagtatcctgccattcatgttgttttaagatgttttaaaaaccaatggacaaacttcttgcttcaaggaacaaactcttaggttggcaacagcatataaaaaaaaagatcacagctgaatctcatgaaagattaaaaaccaaaggattcaagaccggtgttgtaaaatgaagaggaattttacttacatgttacagctgccaagtttttagatgttcctgtcatagctaaatagtcactgctagcctttcagagaacagatagtaacaattgtttgcagctgcagtgttgcatctaattttggtgtttaggctttttattttgtgggaagctttttgttaatatcctgcagggcaactgcctgttgggagggagaggatggaagaaggagcttactctgggggccttgcctattgagggaggctgttgcccagagcagttgcttcatggaagtcatccaaaggcgctctcagtcattacaatgacaggatctcaaagttgggaaagggctgttaagtcatccagtctagtctccacataggtgctgacattctgcctacaaccatcccaccaaggggttgagcagtctggacttaaacacctccgaggacagagaacccactacctcgtggagaagcctgttctttgtaaacctctggcttttctatgttctctgtaatttccatcttagtctctgccccatgggggccacatgggacaagttatttttggcaaagcacctaattgctggcactgtcccaaagcatagcgtttgccttttggaaagaaacaatgctaggacatggacactttggtacactgtccttacccctgagtattagtccactcagttccttgttggagaatgttgagaaaaccctactggctggcttgtttctgccaaagcttggggagaggagagggggatgagaagatgttagcagcctgctaaacctcagacagatgaggactcagttctgtgcttgccccacaaaaacggatgctcacatcatcaggaaattgttcagctggaggatttataacttcgttgctttgcatgaagtttaaagttttcatggttgcccagggcttgtaccttagattcctgtaaggactttgcactgtttttgctgagaaaacaacgcttcaggacttaaggtctaagcgtcagagaagtgccgtattttcaaggtggaaagtctgttaagcttgctgttgtccaatcatccgtttttagagatggggaaactaaaactcaaaaagatgtgcctgaggtcatatggcattatcagaaccaacctctggccctcttgacctgtctagcattctttctttctgacctataggatgactctaattcagtctaaatcggctgccctcagattcttgagaacttaaaattgagcagaaattcccaaggccaacctagctctcagggaccaacctgcagaactcaagattgagcgaaatgtttaggccagttgagttttgcaaaatgagtggtaagggaaaacagatctagcctgttatttaaaaccagggttcaaaagccctattgggagaggtagtattgtcctagcatttaaattctcatgaaatgtgcttggtctgtgatctcttggtcagatatctgccttccaggcgatcctttgaggttgtgtaattcagctggccctggctcctggtccctgttactgagctgggcagtcgaaccgaagggcagatgagctcaagatcatgccttgggaagcatggtgctctaggggtgcctttttattcctttcattgtattatagactgtttccaagtttatggttagaaatggtaaagtgggtctggtgttttgaggtagaacccagcctagggcaagatatgaactgttcttgaggtagaaatgtctacagtcagttgtttcatctagcttgcatcttaaaacacaaacccttcagttgctttcacttaatgcacacatttgccaatgacagagggttatacaggatccttcttttacatttctattgtctgctacgctcatcagagtatattttggggtacaaggttttgggggttttttttcccattttgtaactgccttattgaaaagtaagtgcccttccattccaggcctcctcatattgtacttgtttcctgccaaatctgggggatcatttgtattttaactttgtaatctatggctctgtactgttgaaaggctctcaattctgtggggtctccttagtatgtatgtgacttttcatgttgcaatatcacacgatgggatggcccgacttttgctcttaataaataatctgaatgagtaagaga

SEQ ID NO: 451405 - DNA, 4882 bp, Homo sapiens
gaatgtggaggaaatcctgatgcaccaacaaggaagtttctgatcagataaggatttcaggacagttgcatgtgcaaaactattcgttgaggttccagaaacactgatatagagaccctcacagaagatacggtcccttatgcaccccactatgcttcactctttggggtgcagttagatattatgacttcagccaagcttcttggtaataaatgcattgacacactgacatatttagtaggttggggcaagtatttttagaagttttcatcctaagttcacaaccaccatgcaagctgccaggggccatgtgattcctgcccagaagttcagcttaggattgaaagtctggctggccttgactccctgggctctggtcatcagcaaatcatgagtttgggcaacaaaggtcaattccatctgatgctcatttttgtgaacaatttgcctccctcttagggagaaagattgctaaaataatttttgaaaattacctaatttttttgttgttcaaaacgttgaactcctcaatctaattatatcagagccaaagtatcctgtgaaaacaaagctttatatccaaaaatgtgcttttgcaaaattctttaatctgtgtaatggagggcagagggtatggggtaggagggtgggagaaagaaaagaaaagaatttggattctaatttatgaccatcttgacatatggtcaaaggtgtcattttcctactcagtttcaattctgagttaatttcttaagccttaaataataagaacaatggacagcctggcctggcagagagtttcacagatgacttaatctgagcaccatcacagagaagtcaggactaaaccccctactgagcagggcggcggagtgtccaaaggtctcagttctgtggagcagagtaccacgctttctgtggaatggggacagggtcaccacgctcactaaaatgcagtatgttccattgcagcaaagctttcgcctgtgttcaaaatgcatgtctagcagattgcagccttttaaattaaatatatataaatggttgtatatagaatatactctggactgtgagggcatcctattttggtatgcctcctggctgtggatggcatgtccagtgctctgtgagtgttttcagtcattcacattcactatgtgtttagagattctctccctgcttacagctgaaggatgttgatacaggcatcaagaaggctgaggggcagatggggcctgcaggttaaggcattgttaacttgctccatggaaatgtccatatcttaatgagtaaaaaagtgtatttttctgatacgtaaaccagaattgtgggcgtgtaggtcacatcactatttctttagcagcaaatctgttttcccagttgagagagacaatagcttctgcacaagaatatatgatggtaggatccatctgttcaattgtgtctgaaagaatctttattccaaagcgaaacctggggaaatgttttaccttcagccagatgctgtgtgtgtacttgggtcccttgtctttcctctaaggagaggtgcttgtggaaagtggaggttgtgggcatcttttcaaccttttcaatctgacctttcaacaggtcaggtgagagaaaagacaaagctatttgaacctatgtttttcttatgtccagaaatccgttctttcatcaaaccactaaaccactcgccttagcctcttctgcagtttctggtggctctatctgtgggcaagggactcctgcctgtgagaagtggccaggccctccagagcaacggggtctggcttcagggagcagtggggtgtggggaaagcaatgttcatcttggctgctccatttttataccatccatcaaggactcttgcgcttctctccacctgtgacgtagcagcattgccttctttcctcttggtgcttctgggcaaaactggaatttgaaatccagaactggcgttgtcttcttaaagagtatggttcctgcctcagttccagcctggtatggttctttgatatgccctgaaggttctcacatggaaacatcagtatcctgccattcatgttgttttaagatgttttaaaaaccaatggacaaacttcttgcttcaaggaacaaactcttaggttggcaacagcatataaaaaaaaagatcacagctgaatctcatgaaagattaaaaaccaaaggattcaagaccggtgttgtaaaatgaagaggaattttacttacatgttacagctgccaagtttttagatgttcctgtcatagctaaatagtcactgctagcctttcagagaacagatagtaacaattgtttgcagctgcagtgttgcatctaattttggtgtttaggctttttattttgtgggaagctttttgttaatatcctgcagggcaactgcctgttgggagggagaggatggaagaaggagcttactctgggggccttgcctattgagggaggctgttgcccagagcagttgcttcatggaagtcatccaaaggcgctctcagtcattacaatgacaggatctcaaagttgggaaagggctgttaagtcatccagtctagtctccacataggtgctgacattctgcctacaaccatcccaccaaggggttgagcagtctggacttaaacacctccgaggacagagaacccactacctcgtggagaagcctgttctttgtaaacctctggcttttctatgttctctgtaatttccatcttagtctctgccccatgggggccacatgggacaagttatttttggcaaagcacctaattgctggcactgtcccaaagcatagcgtttgccttttggaaagaaacaatgctaggacatggacactttggtacactgtccttacccctgagtattagtccactcagttccttgttggagaatgttgagaaaaccctactggctggcttgtttctgccaaagcttggggagaggagagggggatgagaagatgttagcagcctgctaaacctcagacagatgaggactcagttctgtgcttgccccacaaaaacggatgctcacatcatcaggaaattgttcagctggaggatttataacttcgttgctttgcatgaagtttaaagttttcatggttgcccagggcttgtaccttagattcctgtaaggactttgcactgtttttgctgagaaaacaacgcttcaggacttaaggtctaagcgtcagagaagtgccgtattttcaaggtggaaagtctgttaagcttgctgttgtccaatcatccgtttttagagatggggaaactaaaactcaaaaagatgtgcctgaggtcatatggcattatcagaaccaacctctggccctcttgacctgtctagcattctttctttctgacctataggatgactctaattcagtctaaatcggctgccctcagattcttgagaacttaaaattgagcagaaattcccaaggccaacctagctctcagggaccaacctgcagaactcaagattgagcgaaatgtttaggccagttgagttttgcaaaatgagtggtaagggaaaacagatctagcctgttatttaaaaccagggttcaaaagccctattgggagaggtagtattgtcctagcatttaaattctcatgaaatgtgcttggtctgtgatctcttggtcagatatctgccttccaggcgatcctttgaggttgtgtaattcagctggccctggctcctggtccctgttactgagctgggcagtcgaaccgaagggcagatgagctcaagatcatgccttgggaagcatggtgctctaggggtgcctttttattcctttcattgtattatagactgtttccaagtttatggttagaaatggtaaagtgggtctggtgttttgaggtagaacccagcctagggcaagatatgaactgttcttgaggtagaaatgtctacagtcagttgtttcatctagcttgcatcttaaaacacaaacccttcagttgctttcacttaatgcacacatttgccaatgacagagggttatacaggatccttcttttacatttctattgtctgctacgctcatcagagtatattttggggtacaaggttttgggggttttttttcccattttgtaactgccttattgaaaagtaagtgcccttccattccaggcctcctcatattgtacttgtttcctgccaaatctgggggatcatttgtattttaactttgtaatctatggctctgtactgttgaaaggctctcaattctgtggggtctccttagtatgtatgtgacttttcatgttgcaatatcacacgatgggatggcccgacttttgctcttaataaataatctgaatgagtaagagaaaaaaaaaaaaaaaaaaaaaaaaacaaaacaaaagaaaaaacacaaatcaaaaaaaagggggggggcgccgccctcaaaatatattcctcccccggagggagcaccaaaagattcataaggtgattaccccacagtttctcatgtgatccacaaaaggtgtggcccccaaaaatagtgagggctccttatatataagagacatacgagaagccacgggcgcggtcctgttataacacacgtcatcgggtacggggaaaaagaggtgtgcttaccatgggggaactctttggtgaagaagacacccacaactaacggggggagggagacaaaaaaattggaggaaaaatcaccccccacgcaaatcttgcacagacccaacagcagtcaaattaacaaaaacctcgcggtgtgtagaagggtggaacaaccaccgacgatatgcgtgccgcctcgaaaaaattgcgcaccaggcattatccattcagacatttcccgaggcctgaaccac

SEQ ID NO: 451406 - DNA, 3227 bp, Homo sapiens
cgggaacgcgccgcggccgcctcctcctccccggctcccgcccgcggcggtgttggcggcggcggtggcggcggcggcggcgcttccccggcgcggagcggctttaaaaggcggcactccaccccccggcgcactcgcagctcgggcgccgcgcgagcctgtcgccgctatgcctccgcgcgcgccgcctgcgcccgggccccggccgccgccccgggccgccgccgccaccgacaccgccgcgggcgcggggggcgcggggggcgcggggggcgccggcgggcccgggttccggccgctcgcgccgcgtccctggcgctggctgctgctgctggcgctgcctgccgcctgctccgcgcccccgccgcgccccgtctacaccaaccactgggcggtgcaagtgctgggcggcccggccgaggcggaccgcgtggcggcggcgcacggctacctcaacttgggccagattggaaacctggaagattactaccatttttatcacagcaaaacctttaaaagatcaaccttgagtagcagaggccctcacaccttcctcagaatggacccccaggtgaaatggctccagcaacaggaagtgaaacgaagggtgaagagacaggtgcgaagtgacccgcaggccctttacttcaacgaccccatttggtccaacatgtggtacctgcattgtggcgacaagaacagtcgctgccggtcggaaatgaatgtccaggcagcgtggaagaggggctacacaggaaaaaacgtggtggtcaccatccttgatgatggcatagagagaaatcaccctgacctggccccaaattatgattcctacgccagctacgacgtgaacggcaatgattatgacccatctccacgatatgatgccagcaatgaaaataaacacggcactcgttgtgcgggagaagttgctgcttcagcaaacaattcctactgcatcgtgggcatagcgtacaatgccaaaataggaggcatccgcatgctggacggcgatgtcacagatgtggtcgaggcaaagtcgctgggcatcagacccaactacatcgacatttacagtgccagctgggggccggacgacgacggcaagacggtggacgggcccggccgactggctaagcaggctttcgagtatggcattaaaaagggccggcagggcctgggctccattttcgtctgggcatctgggaatggcgggagagagggggactactgctcgtgcgatggctacaccaacagcatctacaccatctccgtcagcagcgccaccgagaatggctacaagccctggtacctggaagagtgtgcctccaccctggccaccacctacagcagtggggccttttatgagcgaaaaatcgtcaccacggatctgcgtcagcgctgtaccgatggccacactgggacctcagtctctgcccccatggtggcgggcatcatcgccttggctctagaagcaaacagccagttaacctggagggacgtccagcacctgctagtgaagacatcccggccggcccacctgaaagcgagcgactggaaagtaaacggcgcgggtcataaagttagccatttctatggatttggtttggtggacgcagaagctctcgttgtggaggcaaagaagtggacagcagtgccatcgcagcacatgtgtgtggccgcctcggacaagagacccaggagcatccccttagtgcaggtgctgcggactacggccctgaccagcgcctgcgcggagcactcggaccagcgggtggtctacttggagcacgtggtggttcgcacctccatctcacacccacgccgaggagacctccagatctacctggtttctccctcgggaaccaagtctcaacttttggcaaagaggttgctggatctttccaatgaagggtttacaaactgggaattcatgactgtccactgctggggagaaaaggctgaagggcagtggaccttggaaatccaagatctgccatcccaggtccgcaacccggagaagcaagggaagttgaaagaatggagcctcatactgtatggcacagcagagcacccgtaccacaccttcagtgcccatcagtcccgctcgcggatgctggagctctcagccccagagctggagccacccaaggctgccctgtcaccctcccaggtggaagttcctgaagatgaggaagattacacagctcaatccaccccaggctctgctaatattttacagaccagtgtgtgccatccggagtgtggtgacaaaggctgtgatggccccaatgcagaccagtgcttgaactgcgtccacttcagcctggggagtgtcaagaccagcaggaagtgcgtgagtgtgtgccccttgggctactttggggacacagcagcaagacgctgtcgccggtgccacaaggggtgtgagacctgctccagcagagctgcgacgcagtgcctgtcttgccgccgcgggttctatcaccaccaggagatgaacacctgtgtgaccctctgtcctgcaggattttatgctgatgaaagtcagaaaaattgccttaaatgccacccaagctgtaaaaagtgcgtggatgaacctgagaaatgtactgtctgtaaagaaggattcagccttgcacggggcagctgcattcctgactgtgagccaggcacctactttgactcagagctgatcagatgtggggaatgccatcacacctgcggaacctgcgtggggccaggcagagaagagtgcattcactgtgcgaaaaacttccacttccacgactggaagtgtgtgccagcctgtggtgagggcttctacccagaagagatgccgggcttgccccacaaagtgtgtcgaaggtacggtcctcctggcggggaacggcaggcaactgtgtccagcaaaggagtgcctggagggcagagtctgtcagcatcttccccaggggccggggagggcatgttgcatcaccccactgtggacaggagcccatttacagagctgctgaggggccttcgtccctttgttcactggatgcatatttgttgggtccctgctgtgggcagacaccgtgcagcagcgggataagatgggaagcagaatagcaaggtgctcacaccccattggtggactacgcgggacgtccctgcccatgtcgcgctcagcatgcatcctttgcactgtcgataatcagagaaaccatgttttgggttaaaaa

SEQ ID NO: 451407 - DNA, 406 bp, Homo sapiens
ctcaccactacagaccagcccacactaagggtgaccagatatcttagactcccttttgaaacaacaggaaccaaagtgccccagggcagagaacatcctgttgccaaaatagtggttctcaacccagggatgacttttgtccttcccaggggacatttggcaacgtctggagacattttgggttgtcacaactggaaggatgtactcacatccagtgggtggaggccaggaatgctgctaagcaccctgcaatgcacagcagcccccatgacaaagaactgtccagaccaaaatgtcaatagtgccgaggttgagaaattccggccaaaagaaatggaatcaaaaaagaaaattgtttgcaacttcatagagataccctcaatgaataaaaccacatatggtttga

SEQ ID NO: 451408 - DNA, 409 bp, Homo sapiens
gcacgaggcagtggggggaggaaaagggggaggaagagggggacgaggcccttcctgcaagctgtctcaggtcgtaaactcagtgacctgaggcaccaggggtctgtctttgcagctgcacccctgggtggctccggtaccagcgccctactcctttaattagacaccagcgcctgcctatgatgatggtcgggggcgtgtcagggcctcgggggccgggaaaatagagacccctcgagtatctatttctacatagtcagctacttctgaaactgcagcagtggcttagaaagtccaattccaaagccagaccagaagattctatccccctgcctcggcttaccacaagtactgagattacaggcgctgagcctggtatgtgcctgggccagggcacagtaagtgggta

SEQ ID NO: 451409 - DNA, 4454 bp, Homo sapiens
cgggaacgcgccgcggccgcctcctcctccccggctcccgcccgcggcggtgttggcggcggcggtggcggcggcggcggcgcttccccggcgcggagcggctttaaaaggcggcactccaccccccggcgcactcgcagctcgggcgccgcgcgagcctgtcgccgctatgcctccgcgcgcgccgcctgcgcccgggccccggccgccgccccgggccgccgccgccaccgacaccgccgcgggcgcggggggcgcggggggcgcggggggcgccggcgggcccgggttccggccgctcgcgccgcgtccctggcgctggctgctgctgctggcgctgcctgccgcctgctccgcgcccccgccgcgccccgtctacaccaaccactgggcggtgcaagtgctgggcggcccggccgaggcggaccgcgtggcggcggcgcacggctacctcaacttgggccagattggaaacctggaagattactaccatttttatcacagcaaaacctttaaaagatcaaccttgagtagcagaggccctcacaccttcctcagaatggacccccaggtgaaatggctccagcaacaggaagtgaaacgaagggtgaagagacaggtgcgaagtgacccgcaggccctttacttcaacgaccccatttggtccaacatgtggtacctgcattgtggcgacaagaacagtcgctgccggtcggaaatgaatgtccaggcagcgtggaagaggggctacacaggaaaaaacgtggtggtcaccatccttgatgatggcatagagagaaatcaccctgacctggccccaaattatgattcctacgccagctacgacgtgaacggcaatgattatgacccatctccacgatatgatgccagcaatgaaaataaacacggcactcgttgtgcgggagaagttgctgcttcagcaaacaattcctactgcatcgtgggcatagcgtacaatgccaaaataggaggcatccgcatgctggacggcgatgtcacagatgtggtcgaggcaaagtcgctgggcatcagacccaactacatcgacatttacagtgccagctgggggccggacgacgacggcaagacggtggacgggcccggccgactggctaagcaggctttcgagtatggcattaaaaagggccggcagggcctgggctccattttcgtctgggcatctgggaatggcgggagagagggggactactgctcgtgcgatggctacaccaacagcatctacaccatctccgtcagcagcgccaccgagaatggctacaagccctggtacctggaagagtgtgcctccaccctggccaccacctacagcagtggggccttttatgagcgaaaaatcgtcaccacggatctgcgtcagcgctgtaccgatggccacactgggacctcagtctctgcccccatggtggcgggcatcatcgccttggctctagaagcaaacagccagttaacctggagggacgtccagcacctgctagtgaagacatcccggccggcccacctgaaagcgagcgactggaaagtaaacggcgcgggtcataaagttagccatttctatggatttggtttggtggacgcagaagctctcgttgtggaggcaaagaagtggacagcagtgccatcgcagcacatgtgtgtggccgcctcggacaagagacccaggagcatccccttagtgcaggtgctgcggactacggccctgaccagcgcctgcgcggagcactcggaccagcgggtggtctacttggagcacgtggtggttcgcacctccatctcacacccacgccgaggagacctccagatctacctggtttctccctcgggaaccaagtctcaacttttggcaaagaggttgctggatctttccaatgaagggtttacaaactgggaattcatgactgtccactgctggggagaaaaggctgaagggcagtggaccttggaaatccaagatctgccatcccaggtccgcaacccggagaagcaagggaagttgaaagaatggagcctcatactgtatggcacagcagagcacccgtaccacaccttcagtgcccatcagtcccgctcgcggatgctggagctctcagccccagagctggagccacccaaggctgccctgtcaccctcccaggtggaagttcctgaagatgaggaagattacacagctcaatccaccccaggctctgctaatattttacagaccagtgtgtgccatccggagtgtggtgacaaaggctgtgatggccccaatgcagaccagtgcttgaactgcgtccacttcagcctggggagtgtcaagaccagcaggaagtgcgtgagtgtgtgccccttgggctactttggggacacagcagcaagacgctgtcgccggtgccacaaggggtgtgagacctgctccagcagagctgcgacgcagtgcctgtcttgccgccgcgggttctatcaccaccaggagatgaacacctgtgtgaccctctgtcctgcaggattttatgctgatgaaagtcagaaaaattgccttaaatgccacccaagctgtaaaaagtgcgtggatgaacctgagaaatgtactgtctgtaaagaaggattcagccttgcacggggcagctgcattcctgactgtgagccaggcacctactttgactcagagctgatcagatgtggggaatgccatcacacctgcggaacctgcgtggggccaggcagagaagagtgcattcactgtgcgaaaaacttccacttccacgactggaagtgtgtgccagcctgtggtgagggcttctacccagaagagatgccgggcttgccccacaaagtgtgtcgaaggtgtgacgagaactgcttgagctgtgcaggctccagcaggaactgtagcaggtgtaagacgggcttcacacagctggggacctcctgcatcaccaaccacacgtgcagcaacgctgacgagacattctgcgagatggtgaagtccaaccggctgtgcgaacggaagctcttcattcagttctgctgccgcacgtgcctcctggccgggtaagggtgcctagctgcccacagagggcaggcactcccatccatccatccgtccaccttcctccagactgtcggccagagtctgtttcaggagcggcgccctgcacctgacagctttatctccccaggagcagcatctctgagcacccaagccaggtgggtggtggctcttaaggaggtgttcctaaaatggtgatatcctctcaaatgctgcttgttggctccagtcttccgacaaactaacaggaacaaaatgaattctgggaatccacagctctggctttggagcagcttctgggaccataagtttactgaatcttcaagaccaaagcagaaaagaaaggcgcttggcatcacacatcactcttctccccgtgcttttctgcggctgtgtagtaaatctccccggcccagctggcgaaccctgggccatcctcacatgtgacaaagggccagcagtctacctgctcgttgcctgccactgagcagtctggggacggtttggtcagactataaataagataggtttgagggcataaaatgtatgaccactggggccggagtatctatttctacatagtcagctacttctgaaactgcagcagtggcttagaaagtccaattccaaagccagaccagaagattctatcccccgcagcgctctcctttgagcaagccgagctctccttgttaccgtgttctgtctgtgtcttcaggagtctcatggcctgaacgaccacctcgacctgatgcagagccttctgaggagaggcaacaggaggcattctgtggccagccaaaaggtaccccgatggccaagcaattcctctgaacaaaatgtaaagccagccatgcattgttaatcatccatcacttcccattttatggaattgcttttaaaatacatttggcctctgcccttcagaagactcgtttttaaggtggaaactcctgtgtctgtgtatattacaagcctacatgacacagttggatttattctgccaaacctgtgtaggcattttataagctacatgttctaatttttaccgatgttaattattttgacaaatatttcatatattttcattgaaatgcacagatctgcttgatcaattcccttgaatagggaagtaacatttgccttaaattttttcgacctcgtctttctccatattgtcctgctcccctgtttgacgacagtgcatttgccttgtcacctgtgagctggagagaacccagatgttgtttattgaatctacaactctgaaagagaaatcaatgaagcaagtacaatgttaaccctaaattaataaaagagttaacatcccatggcaaaaaaaaaaaaataatttataaatttaattatatatataaaattt

SEQ ID NO: 451410 - DNA, 4310 bp, Homo sapiens
cgggaacgcgccgcggccgcctcctcctccccggctcccgcccgcggcggtgttggcggcggcggtggcggcggcggcggcgcttccccggcgcggagcggctttaaaaggcggcactccaccccccggcgcactcgcagctcgggcgccgcgcgagcctgtcgccgctatgcctccgcgcgcgccgcctgcgcccgggccccggccgccgccccgggccgccgccgccaccgacaccgccgcgggcgcggggggcgcggggggcgcggggggcgccggcgggcccgggttccggccgctcgcgccgcgtccctggcgctggctgctgctgctggcgctgcctgccgcctgctccgcgcccccgccgcgccccgtctacaccaaccactgggcggtgcaagtgctgggcggcccggccgaggcggaccgcgtggcggcggcgcacggctacctcaacttgggccagattggaaacctggaagattactaccatttttatcacagcaaaacctttaaaagatcaaccttgagtagcagaggccctcacaccttcctcagaatggacccccaggtgaaatggctccagcaacaggaagtgaaacgaagggtgaagagacaggtgcgaagtgacccgcaggccctttacttcaacgaccccatttggtccaacatgtggtacctggattcctacgccagctacgacgtgaacggcaatgattatgacccatctccacgatatgatgccagcaatgaaaataaacacggcactcgttgtgcgggagaagttgctgcttcagcaaacaattcctactgcatcgtgggcatagcgtacaatgccaaaataggaggcatccgcatgctggacggcgatgtcacagatgtggtcgaggcaaagtcgctgggcatcagacccaactacatcgacatttacagtgccagctgggggccggacgacgacggcaagacggtggacgggcccggccgactggctaagcaggctttcgagtatggcattaaaaagggccggcagggcctgggctccattttcgtctgggcatctgggaatggcgggagagagggggactactgctcgtgcgatggctacaccaacagcatctacaccatctccgtcagcagcgccaccgagaatggctacaagccctggtacctggaagagtgtgcctccaccctggccaccacctacagcagtggggccttttatgagcgaaaaatcgtcaccacggatctgcgtcagcgctgtaccgatggccacactgggacctcagtctctgcccccatggtggcgggcatcatcgccttggctctagaagcaaacagccagttaacctggagggacgtccagcacctgctagtgaagacatcccggccggcccacctgaaagcgagcgactggaaagtaaacggcgcgggtcataaagttagccatttctatggatttggtttggtggacgcagaagctctcgttgtggaggcaaagaagtggacagcagtgccatcgcagcacatgtgtgtggccgcctcggacaagagacccaggagcatccccttagtgcaggtgctgcggactacggccctgaccagcgcctgcgcggagcactcggaccagcgggtggtctacttggagcacgtggtggttcgcacctccatctcacacccacgccgaggagacctccagatctacctggtttctccctcgggaaccaagtctcaacttttggcaaagaggttgctggatctttccaatgaagggtttacaaactgggaattcatgactgtccactgctggggagaaaaggctgaagggcagtggaccttggaaatccaagatctgccatcccaggtccgcaacccggagaagcaagggaagttgaaagaatggagcctcatactgtatggcacagcagagcacccgtaccacaccttcagtgcccatcagtcccgctcgcggatgctggagctctcagccccagagctggagccacccaaggctgccctgtcaccctcccaggtggaagttcctgaagatgaggaagattacacagctcaatccaccccaggctctgctaatattttacagaccagtgtgtgccatccggagtgtggtgacaaaggctgtgatggccccaatgcagaccagtgcttgaactgcgtccacttcagcctggggagtgtcaagaccagcaggaagtgcgtgagtgtgtgccccttgggctactttggggacacagcagcaagacgctgtcgccggtgccacaaggggtgtgagacctgctccagcagagctgcgacgcagtgcctgtcttgccgccgcgggttctatcaccaccaggagatgaacacctgtgtgaccctctgtcctgcaggattttatgctgatgaaagtcagaaaaattgccttaaatgccacccaagctgtaaaaagtgcgtggatgaacctgagaaatgtactgtctgtaaagaaggattcagccttgcacggggcagctgcattcctgactgtgagccaggcacctactttgactcagagctgatcagatgtggggaatgccatcacacctgcggaacctgcgtggggccaggcagagaagagtgcattcactgtgcgaaaaacttccacttccacgactggaagtgtgtgccagcctgtggtgagggcttctacccagaagagatgccgggcttgccccacaaagtgtgtcgaaggtgtgacgagaactgcttgagctgtgcaggctccagcaggaactgtagcaggtgtaagacgggcttcacacagctggggacctcctgcatcaccaaccacacgtgcagcaacgctgacgagacattctgcgagatggtgaagtccaaccggctgtgcgaacggaagctcttcattcagttctgctgccgcacgtgcctcctggccgggtaagggtgcctagctgcccacagagggcaggcactcccatccatccatccgtccaccttcctccagactgtcggccagagtctgtttcaggagcggcgccctgcacctgacagctttatctccccaggagcagcatctctgagcacccaagccaggtgggtggtggctcttaaggaggtgttcctaaaatggtgatatcctctcaaatgctgcttgttggctccagtcttccgacaaactaacaggaacaaaatgaattctgggaatccacagctctggctttggagcagcttctgggaccataagtttactgaatcttcaagaccaaagcagaaaagaaaggcgcttggcatcacacatcactcttctccccgtgcttttctgcggctgtgtagtaaatctccccggcccagctggcgaaccctgggccatcctcacatgtgacaaagggccagcagtctacctgctcgttgcctgccactgagcagtctggggacggtttggtcagactataaataagataggtttgagggcataaaatgtatgaccactggggccggagtatctatttctacatagtcagctacttctgaaactgcagcagtggcttagaaagtccaattccaaagccagaccagaagattctatcccccgcagcgctctcctttgagcaagccgagctctccttgttaccgtgttctgtctgtgtcttcaggagtctcatggcctgaacgaccacctcgacctgatgcagagccttctgaggagaggcaacaggaggcattctgtggccagccaaaaggtaccccgatggccaagcaattcctctgaacaaaatgtaaagccagccatgcattgttaatcatccatcacttcccattttatggaattgcttttaaaatacatttggcctctgcccttcagaagactcgtttttaaggtggaaactcctgtgtctgtgtatattacaagcctacatgacacagttggatttattctgccaaacctgtgtaggcattttataagctacatgttctaatttttaccgatgttaattattttgacaaatatttcatatattttcattgaaatgcacagatctgcttgatcaattcccttgaatagggaagtaacatttgccttaaattttttcgacctcgtctttctccatattgtcctgctcccctgtttgacgacagtgcatttgccttgtcacctgtgagctggagagaacccagatgttgtttattgaatctacaactctgaaagagaaatcaatgaagcaagtacaatgttaaccctaaattaataaaagagttaacatcccatggcaaaaaaaaaaaaataatttataaatttaattatatatataaaattt

SEQ ID NO: 451411 - DNA, 4078 bp, Homo sapiens
cgggaacgcgccgcggccgcctcctcctccccggctcccgcccgcggcggtgttggcggcggcggtggcggcggcggcggcgcttccccggcgcggagcggctttaaaaggcggcactccaccccccggcgcactcgcagctcgggcgccgcgcgagcctgtcgccgctatgcctccgcgcgcgccgcctgcgcccgggccccggccgccgccccgggccgccgccgccaccgacaccgccgcgggcgcggggggcgcggggggcgcggggggcgccggcgggcccgggttccggccgctcgcgccgcgtccctggcgctggctgctgctgctggcgctgcctgccgcctgctccgcgcccccgccgcgccccgtctacaccaaccactgggcggtgcaagtgctgggcggcccggccgaggcggaccgcgtggcggcggcgcacggctacctcaacttgggccagattggaaacctggaagattactaccatttttatcacagcaaaacctttaaaagatcaaccttgagtagcagaggccctcacaccttcctcagaatggacccccaggtgaaatggctccagcaacaggaagtgaaacgaagggtgaagagacaggtgcgaagtgacccgcaggccctttacttcaacgaccccatttggtccaacatgtggtacctgcattgtggcgacaagaacagtcgctgccggtcggaaatgaatgtccaggcagcgtggaagaggggctacacaggaaaaaacgtggtggtcaccatccttgatgatggcatagagagaaatcaccctgacctggccccaaattatgattcctacgccagctacgacgtgaacggcaatgattatgacccatctccacgatatgatgccagcaatgaaaataaacacggcactcgttgtgcgggagaagttgctgcttcagcaaacaattcctactgcatcgtgggcatagcgtacaatgccaaaataggaggcatccgcatgctggacggcgatgtcacagatgtggtcgaggcaaagtcgctgggcatcagacccaactacatcgacatttacagtgccagctgggggccggacgacgacggcaagacggtggacgggcccggccgactggctaagcaggctttcgagtatggcattaaaaagggccggcagggcctgggctccattttcgtctgggcatctgggaatggcgggagagagggggactactgctcgtgcgatggctacaccaacagcatctacaccatctccgtcagcagcgccaccgagaatggctacaagccctggtacctggaagagtgtgcctccaccctggccaccacctacagcagtggggccttttatgagcgaaaaatcgtcaccacggatctgcgtcagcgctgtaccgatggccacactgggacctcagtctctgcccccatggtggcgggcatcatcgccttggctctagaagcaaacagccagttaacctggagggacgtccagcacctgctagtgaagacatcccggccggcccacctgaaagcgagcgactggaaagtaaacggcgcgggtcataaagttagccatttctatggatttggtttggtggacgcagaagctctcgttgtggaggcaaagaagtggacagcagtgccatcgcagcacatgtgtgtggccgcctcggacaagagacccaggagcatccccttagtgcaggtgctgcggactacggccctgaccagcgcctgcgcggagcactcggaccagcgggtggtctacttggagcacgtggtggttcgcacctccatctcacacccacgccgaggagacctccagatctacctggtttctccctcgggaaccaagtctcaacttttggcaaagaggtggaagttcctgaagatgaggaagattacacaggtgtgtgccatccggagtgtggtgacaaaggctgtgatggccccaatgcagaccagtgcttgaactgcgtccacttcagcctggggagtgtcaagaccagcaggaagtgcgtgagtgtgtgccccttgggctactttggggacacagcagcaagacgctgtcgccggtgccacaaggggtgtgagacctgctccagcagagctgcgacgcagtgcctgtcttgccgccgcgggttctatcaccaccaggagatgaacacctgtgtgaccctctgtcctgcaggattttatgctgatgaaagtcagaaaaattgccttaaatgccacccaagctgtaaaaagtgcgtggatgaacctgagaaatgtactgtctgtaaagaaggattcagccttgcacggggcagctgcattcctgactgtgagccaggcacctactttgactcagagctgatcagatgtggggaatgccatcacacctgcggaacctgcgtggggccaggcagagaagagtgcattcactgtgcgaaaccagaagagatgccgggcttgccccacaaagtgtgtcgaaggtgtgacgagaactgcttgagctgtgcaggctccagcaggaactgtagcaggtgtaagacgggcttcacacagctggggacctcctgcatcaccaaccacacgtgcagcaacgctgacgagacattctgcgagatggtgaagtccaaccggctgtgcgaacggaagctcttcattcagttctgctgccgcacgtgcctcctggccgggtaagggtgcctagctgcccacagagggcaggcactcccatccatccatccgtccaccttcctccagactgtcggccagagtctgtttcaggagcggcgccctgcacctgacagctttatctccccaggagcagcatctctgagcacccaagccaggtgggtggtggctcttaaggaggtgttcctaaaatggtgatatcctctcaaatgctgcttgttggctccagtcttccgacaaactaacaggaacaaaatgaattctgggaatccacagctctggctttggagcagcttctgggaccataagtttactgaatcttcaagaccaaagcagaaaagaaaggcgcttggcatcacacatcactcttctccccgtgcttttctgcggctgtgtagtaaatctccccggcccagctggcgaaccctgggccatcctcacatgtgacaaagggccagcagtctacctgctcgttgcctgccactgagcagtctggggacggtttggtcagactataaataagataggtttgagggcataaaatgtatgaccactggggccggagtatctatttctacatagtcagctacttctgaaactgcagcagtggcttagaaagtccaattccaaagccagaccagaagattctatcccccgcagcgctctcctttgagcaagccgagctctccttgttaccgtgttctgtctgtgtcttcaggagtctcatggcctgaacgaccacctcgacctgatgcagagccttctgaggagaggcaacaggaggcattctgtggccagccaaaaggtaccccgatggccaagcaattcctctgaacaaaatgtaaagccagccatgcattgttaatcatccatcacttcccattttatggaattgcttttaaaatacatttggcctctgcccttcagaagactcgtttttaaggtggaaactcctgtgtctgtgtatattacaagcctacatgacacagttggatttattctgccaaacctgtgtaggcattttataagctacatgttctaatttttaccgatgttaattattttgacaaatatttcatatattttcattgaaatgcacagatctgcttgatcaattcccttgaatagggaagtaacatttgccttaaattttttcgacctcgtctttctccatattgtcctgctcccctgtttgacgacagtgcatttgccttgtcacctgtgagctggagagaacccagatgttgtttattgaatctacaactctgaaagagaaatcaatgaagcaagtacaatgttaaccctaaattaataaaagagttaacatcccatggcaaaaaaaaaaaaataatttataaatttaattatatatataaaattt

SEQ ID NO: 451412 - DNA, 1686 bp, Homo sapiens
gtggcctgggggcactgggcccctgggtcctccagaccactgacatctctttaaatgactcagctcggccctggttctcgtctcaccagtggcattgtctgtgtgacgagaactgcttgagctgtgcaggctccagcaggaactgtagcaggtgtaagacgggcttcacacagctggggacctcctgcatcaccaaccacacgtgcagcaacgctgacgagacattctgcgagatggtgaagtccaaccggctgtgcgaacggaagctcttcattcagttctgctgccgcacgtgcctcctggccgggtaagggtgcctagctgcccacagagggcaggcactcccatccatccatccgtccaccttcctccagactgtcggccagagtctgtttcaggagcggcgccctgcacctgacagctttatctccccaggagcagcatctctgagcacccaagccaggtgggtggtggctcttaaggaggtgttcctaaaatggtgatatcctctcaaatgctgcttgttggctccagtcttccgacaaactaacaggaacaaaatgaattctgggaatccacagctctggctttggagcagcttctgggaccataagtttactgaatcttcaagaccaaagcagaaaagaaaggcgcttggcatcacacatcactcttctccccgtgcttttctgcggctgtgtagtaaatctccccggcccagctggcgaaccctgggccatcctcacatgtgacaaagggccagcagtctacctgctcgttgcctgccactgagcagtctggggacggtttggtcagactataaataagataggtttgagggcataaaatgtatgaccactggggccggagtatctatttctacatagtcagctacttctgaaactgcagcagtggcttagaaagtccaattccaaagccagaccagaagattctatcccccgcagcgctctcctttgagcaagccgagctctccttgttaccgtgttctgtctgtgtcttcaggagtctcatggcctgaacgaccacctcgacctgatgcagagccttctgaggagaggcaacaggaggcattctgtggccagccaaaaggtaccccgatggccaagcaattcctctgaacaaaatgtaaagccagccatgcattgttaatcatccatcacttcccattttatggaattgcttttaaaatacatttggcctctgcccttcagaagactcgtttttaaggtggaaactcctgtgtctgtgtatattacaagcctacatgacacagttggatttattctgccaaacctgtgtaggcattttataagctacatgttctaatttttaccgatgttaattattttgacaaatatttcatatattttcattgaaatgcacagatctgcttgatcaattcccttgaatagggaagtaacatttgccttaaattttttcgacctcgtctttctccatattgtcctgctcccctgtttgacgacagtgcatttgccttgtcacctgtgagctggagagaacccagatgttgtttattgaatctacaactctgaaagagaaatcaatgaagcaagtacaatgttaaccctaaattaataaaagagttaacatcccatggcaaaaaaaaaaaaataatttataaatttaattatatatataaaattt

SEQ ID NO: 451413 - DNA, 4400 bp, Homo sapiens
cgggaacgcgccgcggccgcctcctcctccccggctcccgcccgcggcggtgttggcggcggcggtggcggcggcggcggcgcttccccggcgcggagcggctttaaaaggcggcactccaccccccggcgcactcgcagctcgggcgccgcgcgagcctgtcgccgctatgcctccgcgcgcgccgcctgcgcccgggccccggccgccgccccgggccgccgccgccaccgacaccgccgcgggcgcggggggcgcggggggcgcggggggcgccggcgggcccgggttccggccgctcgcgccgcgtccctggcgctggctgctgctgctggcgctgcctgccgcctgctccgcgcccccgccgcgccccgtctacaccaaccactgggcggtgcaagtgctgggcggcccggccgaggcggaccgcgtggcggcggcgcacggctacctcaacttgggccagattggaaacctggaagattactaccatttttatcacagcaaaacctttaaaagatcaaccttgagtagcagaggccctcacaccttcctcagaatggacccccaggtgaaatggctccagcaacaggaagtgaaacgaagggtgaagagacaggtgcgaagtgacccgcaggccctttacttcaacgaccccatttggtccaacatgtggtacctgcattgtggcgacaagaacagtcgctgccggtcggaaatgaatgtccaggcagcgtggaagaggggctacacaggaaaaaacgtggtggtcaccatccttgatgatggcatagagagaaatcaccctgacctggccccaaattatgattcctacgccagctacgacgtgaacggcaatgattatgacccatctccacgatatgatgccagcaatgaaaataaacacggcactcgttgtgcgggagaagttgctgcttcagcaaacaattcctactgcatcgtgggcatagcgtacaatgccaaaataggaggcatccgcatgctggacggcgatgtcacagatgtggtcgaggcaaagtcgctgggcatcagacccaactacatcgacatttacagtgccagctgggggccggacgacgacggcaagacggtggacgggcccggccgactggctaagcaggctttcgagtatggcattaaaaagggccggcagggcctgggctccattttcgtctgggcatctgggaatggcgggagagagggggactactgctcgtgcgatggctacaccaacagcatctacaccatctccgtcagcagcgccaccgagaatggctacaagccctggtacctggaagagtgtgcctccaccctggccaccacctacagcagtggggccttttatgagcgaaaaatcgtcaccacggatctgcgtcagcgctgtaccgatggccacactgggacctcagtctctgcccccatggtggcgggcatcatcgccttggctctagaagcaaacagccagttaacctggagggacgtccagcacctgctagtgaagacatcccggccggcccacctgaaagcgagcgactggaaagtaaacggcgcgggtcataaagttagccatttctatggatttggtttggtggacgcagaagctctcgttgtggaggcaaagaagtggacagcagtgccatcgcagcacatgtgtgtggccgcctcggacaagagacccaggagcatccccttagtgcaggtgctgcggactacggccctgaccagcgcctgcgcggagcactcggaccagcgggtggtctacttggagcacgtggtggttcgcacctccatctcacacccacgccgaggagacctccagatctacctggtttctccctcgggaaccaagtctcaacttttggcaaagaggttgctggatctttccaatgaagggtttacaaactgggaattcatgactgtccactgctggggagaaaaggctgaagggcagtggaccttggaaatccaagatctgccatcccaggtccgcaacccggagaagcaagggaagttgaaagaatggagcctcatactgtatggcacagcagagcacccgtaccacaccttcagtgcccatcagtcccgctcgcggatgctggagctctcagccccagagctggagccacccaaggctgccctgtcaccctcccaggtggaagttcctgaagatgaggaagattacacagctcaatccaccccaggctctgctaatattttacagaccagtgtgtgccatccggagtgtggtgacaaaggctgtgatggccccaatgcagaccagtgcttgaactgcgtccacttcagcctggggagtgtcaagaccagcaggaagtgcgtgagtgtgtgccccttgggctactttggggacacagcagcaagacgctgtcgccggtgccacaaggggtgtgagacctgctccagcagagctgcgacgcagtgcctgtcttgccgccgcgggttctatcaccaccaggagatgaacacctgtgtgaccctctgtcctgcaggattttatgctgatgaaagtcagaaaaattgccttaaatgccacccaagctgtaaaaagtgcgtggatgaacctgagaaatgtactgtctgtaaagaaggattcagccttgcacggggcagctgcattcctgactgtgagccaggcacctactttgactcagagctgatcagatgtggggaatgccatcacacctgcggaacctgcgtggggccaggcagagaagagtgcattcactgtgcgaaaaacttccacttccacgactggaagtgtgtgccagcctgtggtgagggcttctacccagaagagatgccgggcttgccccacaaagtgtgtcgaaggtgtgacgagaactgcttgagctgtgcaggctccagcaggaactgtagcaggtgtaagacgggcttcacacagctggggacctcctgcatcaccaaccacacgtgcagcaacgctgacgagacattctgcgagatggtgaagtccaaccggctgtgcgaacggaagctcttcattcagttctgctgccgcacgtgcctcctggccgggtaagggtgcctagctgcccacagagggcaggcactcccatccatccatccgtccaccttcctccagactgtcggccagagtctgtttcaggagcggcgccctgcacctgacagctttatctccccaggagcagcatctctgagcacccaagccaggtgggtggtggctcttaaggaggtgttcctaaaatggtgatatcctctcaaatgctgcttgttggctccagtcttccgacaaactaacaggaacaaaatgaattctgggaatccacagctctggctttggagcagcttctgggaccataagtttactgaatcttcaagaccaaagcagctgtgtagtaaatctccccggcccagctggcgaaccctgggccatcctcacatgtgacaaagggccagcagtctacctgctcgttgcctgccactgagcagtctggggacggtttggtcagactataaataagataggtttgagggcataaaatgtatgaccactggggccggagtatctatttctacatagtcagctacttctgaaactgcagcagtggcttagaaagtccaattccaaagccagaccagaagattctatcccccgcagcgctctcctttgagcaagccgagctctccttgttaccgtgttctgtctgtgtcttcaggagtctcatggcctgaacgaccacctcgacctgatgcagagccttctgaggagaggcaacaggaggcattctgtggccagccaaaaggtaccccgatggccaagcaattcctctgaacaaaatgtaaagccagccatgcattgttaatcatccatcacttcccattttatggaattgcttttaaaatacatttggcctctgcccttcagaagactcgtttttaaggtggaaactcctgtgtctgtgtatattacaagcctacatgacacagttggatttattctgccaaacctgtgtaggcattttataagctacatgttctaatttttaccgatgttaattattttgacaaatatttcatatattttcattgaaatgcacagatctgcttgatcaattcccttgaatagggaagtaacatttgccttaaattttttcgacctcgtctttctccatattgtcctgctcccctgtttgacgacagtgcatttgccttgtcacctgtgagctggagagaacccagatgttgtttattgaatctacaactctgaaagagaaatcaatgaagcaagtacaatgttaaccctaaattaataaaagagttaacatcccatggcaaaaaaaaaaaaataatttataaatttaattatatatataaaattt

SEQ ID NO: 451414 - DNA, 3216 bp, Homo sapiens
  misc_feature (2236)..(2236): n is a, c, g, or t
  misc_feature (2262)..(2262): n is a, c, g, or t
  misc_feature (2268)..(2268): n is a, c, g, or t
  misc_feature (2289)..(2289): n is a, c, g, or t
cgggaacgcgccgcggccgcctcctcctccccggctcccgcccgcggcggtgttggcggcggcggtggcggcggcggcggcgcttccccggcgcggagcggctttaaaaggcggcactccaccccccggcgcactcgcagctcgggcgccgcgcgagcctgtcgccgctatgcctccgcgcgcgccgcctgcgcccgggccccggccgccgccccgggccgccgccgccaccgacaccgccgcgggcgcggggggcgcggggggcgcggggggcgccggcgggcccgggttccggccgctcgcgccgcgtccctggcgctggctgctgctgctggcgctgcctgccgcctgctccgcgcccccgccgcgccccgtctacaccaaccactgggcggtgcaagtgctgggcggcccggccgaggcggaccgcgtggcggcggcgcacggctacctcaacttgggccagattggaaacctggaagattactaccatttttatcacagcaaaacctttaaaagatcaaccttgagtagcagaggccctcacaccttcctcagaatggacccccaggtgaaatggctccagcaacaggaagtgaaacgaagggtgaagagacaggtgcgaagtgacccgcaggccctttacttcaacgaccccatttggtccaacatgtggtacctgcattgtggcgacaagaacagtcgctgccggtcggaaatgaatgtccaggcagcgtggaagaggggctacacaggaaaaaacgtggtggtcaccatccttgatgatggcatagagagaaatcaccctgacctggccccaaattatgattcctacgccagctacgacgtgaacggcaatgattatgacccatctccacgatatgatgccagcaatgaaaataaacacggcactcgttgtgcgggagaagttgctgcttcagcaaacaattcctactgcatcgtgggcatagcgtacaatgccaaaataggaggcatccgcatgctggacggcgatgtcacagatgtggtcgaggcaaagtcgctgggcatcagacccaactacatcgacatttacagtgccagctgggggccggacgacgacggcaagacggtggacgggcccggccgactggctaagcaggctttcgagtatggcattaaaaagggccggcagggcctgggctccattttcgtctgggcatctgggaatggcgggagagagggggactactgctcgtgcgatggctacaccaacagcatctacaccatctccgtcagcagcgccaccgagaatggctacaagccctggtacctggaagagtgtgcctccaccctggccaccacctacagcagtggggccttttatgagcgaaaaatcgtcaccacggatctgcgtcagcgctgtaccgatggccacactgggacctcagtctctgcccccatggtggcgggcatcatcgccttggctctagaagcaaacagccagttaacctggagggacgtccagcacctgctagtgaagacatcccggccggcccacctgaaagcgagcgactggaaagtaaacggcgcgggtcataaagttagccatttctatggatttggtttggtggacgcagaagctctcgttgtggaggcaaagaagtggacagcagtgccatcgcagcacatgtgtgtggccgcctcggacaagagacccaggagcatccccttagtgcaggtgctgcggactacggccctgaccagcgcctgcgcggagcactcggaccagcgggtggtctacttggagcacgtggtggttcgcacctccatctcacacccacgccgaggagacctccagatctacctggtttctccctcgggaaccaagtctcaacttttggcaaagaggttgctggatctttccaatgaagggtttacaaactgggaattcatgactgtccactgctggggagaaaaggctgaagggcagtggaccttggaaatccaagatctgccatcccaggtccgcaacccggagaagcaaggtgatcttgagactcctgttgcaaatcaactgaccacagaagagagggaacctggactaaaacacgtgttccggtggcagattgaacaagagctttggtaatctctgtgaaatactgcagagggacagatgaccaaagccaccacatttagaactttggctgcctttggaagtccagagctggatctctcagctcccgcccccagaggntcagcactttggacatggctcacaancagttnttgattgactgcatgaatgcntgtgcgtgcaagcatgaaccttgtttaaatcaagagcttacataattttaaccagttctgtcttcagctgtacatactcagtaaaatgtttaatgaaggggaagagattagtctcttctgtgtgaccatgttttccctttattcatcctaaaaagttccatgaattcttgatttcctttcagtggccctttcaacaatgtcttttttcccaagagcataactgttctcattttattgctagccatcttgatctgtgttttattgacatctcttttgagctaatcttcatttctaagataagagttgagattttgcaatctgtgttcgatggctcaatctatcctgtgcttgatgctagaaaggaagacagatttaaagcacatgccttctgtgccggctttcaagtttgtcactaaactctcatttctggaaagtgcaattatagagtatcactcccacttccttggaaacagagctgaagaacttggcacactctccaaacagtcaccatacacactgttgtcaaaaagttccatttttaaccccatttgcattaatattgcagtcaatctctttacctccttttctctttcacggggccgtgacagtgacgcctttccccaaaactctcctcgtttgagaaaaaaagaagtatgtatccccacttatctcggggagaaatgcaaccaactgctgctgtgcacatttatgaatcacagtattgtttagtcggttctgtatctccagtagaaagcataacaaaaagatgacctttgtctcacctcatagctaatttttgcaaataaaatactaaacattgatgaaaatgaaaatgacagatctgaggaagagggagagcatgctatggacatgatgacgcagtagagcccgcagattcgagggatgatggtactctctgtgtattcc

SEQ ID NO: 451415 - DNA, 1055 bp, Homo sapiens
gcacgaggcagtggggggaggaaaagggggaggaagagggggacgaggcccttcctgcaagctgtctcaggtcgtaaactcagtgacctgaggcaccaggggtctgtctttgcagctgcacccctgggtggctccggtaccagcgccctactcctttaattagacaccagcgcctgcctatgatgatggtcgggggcgtgtcagggcctcgggggccgggaaaatagagacccctcgagtatctatttctacatagtcagctacttctgaaactgcagcagtggcttagaaagtccaattccaaagccagaccagaagattctatcccccgcagcgctctcctttgagcaagccgagctctccttgttaccgtgttctgtctgtgtcttcaggagtctcatggcctgaacgaccacctcgacctgatgcagagccttctgaggagaggcaacaggaggcattctgtggccagccaaaaggtaccccgatggccaagcaattcctctgaacaaaatgtaaagccagccatgcattgttaatcatccatcacttcccattttatggaattgcttttaaaatacatttggcctctgcccttcagaagactcgtttttaaggtggaaactcctgtgtctgtgtatattacaagcctacatgacacagttggatttattctgccaaacctgtgtaggcattttataagctacatgttctaatttttaccgatgttaattattttgacaaatatttcatatattttcattgaaatgcacagatctgcttgatcaattcccttgaatagggaagtaacatttgccttaaattttttcgacctcgtctttctccatattgtcctgctcccctgtttgacgacagtgcatttgccttgtcacctgtgagctggagagaacccagatgttgtttattgaatctacaactctgaaagagaaatcaatgaagcaagtacaatgttaaccctaaattaataaaagagttaacatcccatggcaaaaaaaaaaaaataatttataaatttaattatatatataaaattt

SEQ ID NO: 451416 - DNA, 3332 bp, Homo sapiens
cgggaacgcgccgcggccgcctcctcctccccggctcccgcccgcggcggtgttggcggcggcggtggcggcggcggcggcgcttccccggcgcggagcggctttaaaaggcggcactccaccccccggcgcactcgcagctcgggcgccgcgcgagcctgtcgccgctatgcctccgcgcgcgccgcctgcgcccgggccccggccgccgccccgggccgccgccgccaccgacaccgccgcgggcgcggggggcgcggggggcgcggggggcgccggcgggcccgggttccggccgctcgcgccgcgtccctggcgctggctgctgctgctggcgctgcctgccgcctgctccgcgcccccgccgcgccccgtctacaccaaccactgggcggtgcaagtgctgggcggcccggccgaggcggaccgcgtggcggcggcgcacggctacctcaacttgggccagattggaaacctggaagattactaccatttttatcacagcaaaacctttaaaagatcaaccttgagtagcagaggccctcacaccttcctcagaatggacccccaggtgaaatggctccagcaacaggaagtgaaacgaagggtgaagagacaggtgcgaagtgacccgcaggccctttacttcaacgaccccatttggtccaacatgtggtacctgcattgtggcgacaagaacagtcgctgccggtcggaaatgaatgtccaggcagcgtggaagaggggctacacaggaaaaaacgtggtggtcaccatccttgatgatggcatagagagaaatcaccctgacctggccccaaattatgattcctacgccagctacgacgtgaacggcaatgattatgacccatctccacgatatgatgccagcaatgaaaataaacacggcactcgttgtgcgggagaagttgctgcttcagcaaacaattcctactgcatcgtgggcatagcgtacaatgccaaaataggaggcatccgcatgctggacggcgatgtcacagatgtggtcgaggcaaagtcgctgggcatcagacccaactacatcgacatttacagtgccagctgggggccggacgacgacggcaagacggtggacgggcccggccgactggctaagcaggctttcgagtatggcattaaaaagggccggcagggcctgggctccattttcgtctgggcatctgggaatggcgggagagagggggactactgctcgtgcgatggctacaccaacagcatctacaccatctccgtcagcagcgccaccgagaatggctacaagccctggtacctggaagagtgtgcctccaccctggccaccacctacagcagtggggccttttatgagcgaaaaatcgtcaccacggatctgcgtcagcgctgtaccgatggccacactgggacctcagtctctgcccccatggtggcgggcatcatcgccttggctctagaagcaaacagccagttaacctggagggacgtccagcacctgctagtgaagacatcccggccggcccacctgaaagcgagcgactggaaagtaaacggcgcgggtcataaagttagccatttctatggatttggtttggtggacgcagaagctctcgttgtggaggcaaagaagtggacagcagtgccatcgcagcacatgtgtgtggccgcctcggacaagagacccaggagcatccccttagtgcaggtgctgcggactacggccctgaccagcgcctgcgcggagcactcggaccagcgggtggtctacttggagcacgtggtggttcgcacctccatctcacacccacgccgaggagacctccagatctacctggtttctccctcgggaaccaagtctcaacttttggcaaagaggttgctggatctttccaatgaagggtttacaaactgggaattcatgactgtccactgctggggagaaaaggctgaagggcagtggaccttggaaatccaagatctgccatcccaggtccgcaacccggagaagcaagggaagttgaaagaatggagcctcatactgtatggcacagcagagcacccgtaccacaccttcagtgcccatcagtcccgctcgcggatgctggagctctcagccccagagctggagccacccaaggctgccctgtcaccctcccaggtggaagttcctgaagatgaggaagattacacagctcaatccaccccaggctctgctaatattttacagaccagtgtgtgccatccggagtgtggtgacaaaggctgtgatggccccaatgcagaccagtgcttgaactgcgtccacttcagcctggggagtgtcaagaccagcaggaagtgcgtgagtgtgtgccccttgggctactttggggacacagcagcaagacgctgtcgccggtgccacaaggggtgtgagacctgctccagcagagctgcgacgcagtgcctgtcttgccgccgcgggttctatcaccaccaggagatgaacacctgtgtgaccctctgtcctgcaggattttatgctgatgaaagtcagaaaaattgccttaaatgccacccaagctgtaaaaagtgcgtggatgaacctgagaaatgtactgtctgtaaagaaggattcagccttgcacggggcagctgcattcctgactgtgagccaggcacctactttgactcagagctgatcagatgtggggaatgccatcacacctgcggaacctgcgtggggccaggcagagaagagtgcattcactgtgcgaaaaacttccacttccacgactggaagtgtgtgccagcctgtggtgagggcttctacccagaagagatgccgggcttgccccacaaagtgtgtcgaaggtgtgacgagaactgcttgagctgtgcaggctccagcaggaactgtagcaggtgtaagacgggcttcacacagctggggacctcctgcatcaccaaccacacgtgcagcaacgctgacgagacattctgcgagatggtgaagtccaaccggctgtgcgaacggaagctcttcattcagttctgctgccgcacgtgcctcctggccgggggacatttggcaacgtctggagacattttgggttgtcacaactggaaggatgtactcacatccagtgggtggaggccaggaatgctgctaagcaccctgcaatgcacagcagcccccatgacaaagaactgtccagaccaaaatgtcaatagtgccgaggttgagaaattccggccaaaagaaatggaatcaaaaaagaaaattgtttgcaacttcatagagataccctcaatgaataaaaccacatatggtttga

SEQ ID NO: 451417 - DNA, 1355 bp, Homo sapiens
cgggaacgcgccgcggccgcctcctcctccccggctcccgcccgcggcggtgttggcggcggcggtggcggcggcggcggcgcttccccggcgcggagcggctttaaaaggcggcactccaccccccggcgcactcgcagctcgggcgccgcgcgagcctgtcgccgctatgcctccgcgcgcgccgcctgcgcccgggccccggccgccgccccgggccgccgccgccaccgacaccgccgcgggcgcggggggcgcggggggcgcggggggcgccggcgggcccgggttccggccgctcgcgccgcgtccctggcgctggctgctgctgctggcgctgcctgccgcctgctccgcgcccccgccgcgccccgtctacaccaaccactgggcggtgcaagtgctgggcggcccggccgaggcggaccgcgtggcggcggcgcacggctacctcaacttgggccagattggaaacctggaagattactaccatttttatcacagcaaaacctttaaaagatcaaccttgagtagcagaggccctcacaccttcctcagaatggacccccaggtgaaatggctccagcaacaggaagtgaaacgaagggtgaagagacaggtgcgaagtgacccgcaggccctttacttcaacgaccccatttggtccaacatgtggtacctggattcctacgccagctacgacgtgaacggcaatgattatgacccatctccacgatatgatgccagcaatgaaaataaacacggcactcgttgtgcgggagaagttgctgcttcagcaaacaattcctactgcatcgtgggcatagcgtacaatgccaaaataggaggcatccgcatgctggacggcgatgtcacagatgtggtcgaggcaaagtcgctgggcatcagacccaactacatcgacatttacagtgccagctgggggccggacgacgacggcaagacggtggacgggcccggccgactggctaagcaggctttcgagtatggcattaaaaagggccggcagggcctgggctccattttcgtctgggcatctgggaatggcgggagagagggggactactgctcgtgcgatggctacaccaacagcatctacaccatctccgtcagcagcgccaccgagaatggctacaagccctggtacctggaagagtgtgcctccaccctggccaccacctacagcagtggggccttttatgagcgaaaaatcgtcaccacggatctgcgtcagcgctgtaccgatggccacactgggacctcagtctctgcccccatggtggcgggcatcatcgccttggctctagaagcaaagtaagttcccacttaccttt

SEQ ID NO: 451418 - DNA, 350 bp, Homo sapiens
aggaacttaccatctaaaatatctgctatgacacagatattcacgcacaaggaaggctgtagcacctgcaaagaggctacataaaatcaagaaatcatttctaatataaacagtaattgcatttcttctggtaggtgaaatggctccagcaacaggaagtgaaacgaagggtgaagagacaggtgcgaagtgacccgcaggccctttacttcaacgaccccatttggtccaacatgtggtacctggtgagtaggacaggacctctgtctgccccaggacacttgcactgccaggtctctgaaatgggttaatttccctcaacaaagctaaattcaaacaacatctccaga

SEQ ID NO: 451419 - DNA, 426 bp, Homo sapiens
ttcttctggtaggtgaaatggctccagcaacaggaagtgaaacgaagggtgaagagacaggtgcgaagtgacccgcaggccctttacttcaacgaccccatttggtccaacatgtggtacctggtgagtaggacaggacctctgtctgccccaggacacttgcactgccaggtctctgaaatgggttaatttccctcaacaaagctaaattcaaacaacatctccagacagacacacttcaccttgagggtgtaaaaccactaccgcaaggctgtgcagtaccggctttcctgtggattttttctgaaactttgtgcagcacactctgggatgggggctctttgagaagggaagtgatttgatgcaggctgtatgactaaatggcaaagcccagcccatggacagagctcctgctgggaggcgatg

SEQ ID NO: 451420 - DNA, 513 bp, Homo sapiens
agaaatgcaaccaactgctgctgtgcacatttatgaatcacagtattgtttagtcggttctgtatctccagtagaaagcataacaaaaagatgacctttgtctcacctcatagctaatttttgcaaataaaatactaaacattgatgaaaatgaaaatgacagatctgaggaagagggagagctctcttgaaacccctttcccagatttgccctcagttttaggaatgaggtacgcttgggcattcctgttgcctgcatggttcggcattctggcagccaggttcgccccagaatagataagtgtgtttgattttcgaacatttgactttattacctatttccagaaacacttcgtgttcaaactacgtctctacaggcatttctacttggtctttttctcccctgacatttcacagagtcctaactgtgctgcatgtataacttgttctttctttttgttacttgcatagcaagcatgtttctatgtcattaaatatcctttgtaagcagca

SEQ ID NO: 451421 - DNA, 3188 bp, Homo sapiens
cgggaacgcgccgcggccgcctcctcctccccggctcccgcccgcggcggtgttggcggcggcggtggcggcggcggcggcgcttccccggcgcggagcggctttaaaaggcggcactccaccccccggcgcactcgcagctcgggcgccgcgcgagcctgtcgccgctatgcctccgcgcgcgccgcctgcgcccgggccccggccgccgccccgggccgccgccgccaccgacaccgccgcgggcgcggggggcgcggggggcgcggggggcgccggcgggcccgggttccggccgctcgcgccgcgtccctggcgctggctgctgctgctggcgctgcctgccgcctgctccgcgcccccgccgcgccccgtctacaccaaccactgggcggtgcaagtgctgggcggcccggccgaggcggaccgcgtggcggcggcgcacggctacctcaacttgggccagattggaaacctggaagattactaccatttttatcacagcaaaacctttaaaagatcaaccttgagtagcagaggccctcacaccttcctcagaatggacccccaggtgaaatggctccagcaacaggaagtgaaacgaagggtgaagagacaggtgcgaagtgacccgcaggccctttacttcaacgaccccatttggtccaacatgtggtacctgcattgtggcgacaagaacagtcgctgccggtcggaaatgaatgtccaggcagcgtggaagaggggctacacaggaaaaaacgtggtggtcaccatccttgatgatggcatagagagaaatcaccctgacctggccccaaattatgattcctacgccagctacgacgtgaacggcaatgattatgacccatctccacgatatgatgccagcaatgaaaataaacacggcactcgttgtgcgggagaagttgctgcttcagcaaacaattcctactgcatcgtgggcatagcgtacaatgccaaaataggaggcatccgcatgctggacggcgatgtcacagatgtggtcgaggcaaagtcgctgggcatcagacccaactacatcgacatttacagtgccagctgggggccggacgacgacggcaagacggtggacgggcccggccgactggctaagcaggctttcgagtatggcattaaaaagggccggcagggcctgggctccattttcgtctgggcatctgggaatggcgggagagagggggactactgctcgtgcgatggctacaccaacagcatctacaccatctccgtcagcagcgccaccgagaatggctacaagccctggtacctggaagagtgtgcctccaccctggccaccacctacagcagtggggccttttatgagcgaaaaatcgtcaccacggatctgcgtcagcgctgtaccgatggccacactgggacctcagtctctgcccccatggtggcgggcatcatcgccttggctctagaagcaaacagccagttaacctggagggacgtccagcacctgctagtgaagacatcccggccggcccacctgaaagcgagcgactggaaagtaaacggcgcgggtcataaagttagccatttctatggatttggtttggtggacgcagaagctctcgttgtggaggcaaagaagtggacagcagtgccatcgcagcacatgtgtgtggccgcctcggacaagagacccaggagcatccccttagtgcaggtgctgcggactacggccctgaccagcgcctgcgcggagcactcggaccagcgggtggtctacttggagcacgtggtggttcgcacctccatctcacacccacgccgaggagacctccagatctacctggtttctccctcgggaaccaagtctcaacttttggcaaagaggttgctggatctttccaatgaagggtttacaaactgggaattcatgactgtccactgctggggagaaaaggctgaagggcagtggaccttggaaatccaagatctgccatcccaggtccgcaacccggagaagcaagggaagttgaaagaatggagcctcatactgtatggcacagcagagcacccgtaccacaccttcagtgcccatcagtcccgctcgcggatgctggagctctcagccccagagctggagccacccaaggctgccctgtcaccctcccaggtggaagttcctgaagatgaggaagattacacaggtgtgtgccatccggagtgtggtgacaaaggctgtgatggccccaatgcagaccagtgcttgaactgcgtccacttcagcctggggagtgtcaagaccagcaggaagtgcgtgagtgtgtgccccttgggctactttggggacacagcagcaagacgctgtcgccggtgccacaaggggtgtgagacctgctccagcagagctgcgacgcagtgcctgtcttgccgccgcgggttctatcaccaccaggagatgaacacctgtgtgaccctctgtcctgcaggattttatgctgatgaaagtcagaaaaattgccttaaatgccacccaagctgtaaaaagtgcgtggatgaacctgagaaatgtactgtctgtaaagaaggattcagccttgcacggggcagctgcattcctgactgtgagccaggcacctactttgactcagagctgatcagatgtggggaatgccatcacacctgcggaacctgcgtggggccaggcagagaagagtgcattcactgtgcgaaaaacttccacttccacgactggaagtgtgtgccagcctgtggtgagggcttctacccagaagagatgccgggcttgccccacaaagtgtgtcgaaggtacggtcctcctggcggggaacggcaggcaactgtgtccagcaaaggagtgcctggagggcagagtctgtcagcatcttccccaggggccggggagggcatgttgcatcaccccactgtggacaggagcccatttacagagctgctgaggggccttcgtccctttgttcactggatgcatatttgttgggtccctgctgtgggcagacaccgtgcagcagcgggataagatgggaagcagaatagcaaggtgctcacaccccattggtggactacgcgggacgtccctgcccatgtcgcgctcagcatgcatcctttgcactgtcgataatcagagaaaccatgttttgggttaaaaa

SEQ ID NO: 451422 - DNA, 2073 bp, Homo sapiens
gtcgactgctaccttttttttttcaaactccaattgttcactgctggcatataatcgatttttatatattaactttgtaccctgcaaccttgctaaactcactgattggtccgaggagttttttttataatttctttacacttttctacatgaaagaatctatctcctatgaatagaggaagtttaatttctctcttcccgatatatatgcattttattcatttatttttgcctaactgtactggctaggacttttactaccatggtaaatatgactggtgagaaaaaaaaatatcattacctagctccaaatgctagaagactgaatgctttccccttatgaagtattttagctgtatattttttgtagatgctctttattaagttcctttctattactagttcattgagatttttttttttaaatgatgaatagatattccccaggtgaaatggctccagcaacaggaagtgaaacgaagggtgaagagacaggtgcgaagtgacccgcaggccctttacttcaacgaccccatttggtccaacatgtggtacctgcattgtggcgacaagaacagtcgctgccggtcggaaatgaatgtccaggcagcgtggaagaggggctacacaggaaaaaacgtggtggtcaccatccttgatgatggcatagagagaaatcaccctgacctggccccaaattatgattcctacgccagctacgacgtgaacggcaatgattatgacccatctccacgatatgatgccagcaatgaaaataaacacggcactcgttgtgcgggagaagttgctgcttcagcaaacaattcctactgcatcgtgggcatagcgtacaatgccaaaataggaggcatccgcatgctggacggcgatgtcacagatgtggtcgaggcaaagtcgctgggcatcagacccaactacatcgacatttacagtgccagctgggggccggacgacgacggcaagacggtggacgggcccggccgactggctaagcaggctttcgagtatggcattaaaaagggccggcagggcctgggctccattttcgtctgggcatctgggaatggcgggagagagggggactactgctcgtgcgatggctacaccaacagcatctacaccatctccgtcagcagcgccaccgagaatggctacaagccctggtacctggaagagtgtgcctccaccctggccaccacctacagcagtggggccttttatgagcgaaaaatcgtcaccacggatctgcgtcagcgctgtaccgatggccacactgggacctcagtctctgcccccatggtggcgggcatcatcgccttggctctagaagcaaacagccagttaacctggagggacgtccagcacctgctagtgaagacatcccggccggcccacctgaaagcgagcgactggaaagtaaacggcgcgggtcataaagttagccatttctatggatttggtttggtggacgcagaagctctcgttgtggaggcaaagaagtggacagcagtgccatcgcagcacatgtgtgtggccgcctcggacaagagacccaggagcatccccttagtgcaggtgctgcggactacggccctgaccagcgcctgcgcggagcactcggaccagcgggtggtctacttggagcacgtggtggttcgcacctccatctcacacccacgccgaggagacctccagatctacctggtttctccctcgggaaccaagtctcaacttttggcaaagaggttgctggatctttccaatgaagggtttacaaactgggaattcatgactgtccactgctggggagaaaaggctgaagggcagtggaccttggaaatccaagatctgccatcccaggtccgcaacccggagaagcaaggtgatcttgagactcctgttgcaaatcaactgaccacagaagagaggttcgtttccacactctcgattctgttccattggtctgtatatctatcttggagtcagtaccatattgttttgatcactgtagctttgtagtaagttttgaaataagaaagtgcgagtcttcca

SEQ ID NO: 451423 - DNA, 4415 bp, Homo sapiens
cgggaacgcgccgcggccgcctcctcctccccggctcccgcccgcggcggtgttggcggcggcggtggcggcggcggcggcgcttccccggcgcggagcggctttaaaaggcggcactccaccccccggcgcactcgcagctcgggcgccgcgcgagcctgtcgccgctatgcctccgcgcgcgccgcctgcgcccgggccccggccgccgccccgggccgccgccgccaccgacaccgccgcgggcgcggggggcgcggggggcgcggggggcgccggcgggcccgggttccggccgctcgcgccgcgtccctggcgctggctgctgctgctggcgctgcctgccgcctgctccgcgcccccgccgcgccccgtctacaccaaccactgggcggtgcaagtgctgggcggcccggccgaggcggaccgcgtggcggcggcgcacggctacctcaacttgggccagattggaaacctggaagattactaccatttttatcacagcaaaacctttaaaagatcaaccttgagtagcagaggccctcacaccttcctcagaatggacccccaggtgaaatggctccagcaacaggaagtgaaacgaagggtgaagagacaggtgcgaagtgacccgcaggccctttacttcaacgaccccatttggtccaacatgtggtacctgcattgtggcgacaagaacagtcgctgccggtcggaaatgaatgtccaggcagcgtggaagaggggctacacaggaaaaaacgtggtggtcaccatccttgatgatggcatagagagaaatcaccctgacctggccccaaattatgattcctacgccagctacgacgtgaacggcaatgattatgacccatctccacgatatgatgccagcaatgaaaataaacacggcactcgttgtgcgggagaagttgctgcttcagcaaacaattcctactgcatcgtgggcatagcgtacaatgccaaaataggaggcatccgcatgctggacggcgatgtcacagatgtggtcgaggcaaagtcgctgggcatcagacccaactacatcgacatttacagtgccagctgggggccggacgacgacggcaagacggtggacgggcccggccgactggctaagcaggctttcgagtatggcattaaaaagggccggcagggcctgggctccattttcgtctgggcatctgggaatggcgggagagagggggactactgctcgtgcgatggctacaccaacagcatctacaccatctccgtcagcagcgccaccgagaatggctacaagccctggtacctggaagagtgtgcctccaccctggccaccacctacagcagtggggccttttatgagcgaaaaatcgtcaccacggatctgcgtcagcgctgtaccgatggccacactgggacctcagtctctgcccccatggtggcgggcatcatcgccttggctctagaagcaaacagccagttaacctggagggacgtccagcacctgctagtgaagacatcccggccggcccacctgaaagcgagcgactggaaagtaaacggcgcgggtcataaagttagccatttctatggatttggtttggtggacgcagaagctctcgttgtggaggcaaagaagtggacagcagtgccatcgcagcacatgtgtgtggccgcctcggacaagagacccaggagcatccccttagtgcaggtgctgcggactacggccctgaccagcgcctgcgcggagcactcggaccagcgggtggtctacttggagcacgtggtggttcgcacctccatctcacacccacgccgaggagacctccagatctacctggtttctccctcgggaaccaagtctcaacttttggcaaagaggttgctggatctttccaatgaagggtttacaaactgggaattcatgactgtccactgctggggagaaaaggctgaagggcagtggaccttggaaatccaagatctgccatcccaggtccgcaacccggagaagcaagggaagttgaaagaatggagcctcatactgtatggcacagcagagcacccgtaccacaccttcagtgcccatcagtcccgctcgcggatgctggagctctcagccccagagctggagccacccaaggctgccctgtcaccctcccaggtggaagttcctgaagatgaggaagattacacaggtgtgtgccatccggagtgtggtgacaaaggctgtgatggccccaatgcagaccagtgcttgaactgcgtccacttcagcctggggagtgtcaagaccagcaggaagtgcgtgagtgtgtgccccttgggctactttggggacacagcagcaagacgctgtcgccggtgccacaaggggtgtgagacctgctccagcagagctgcgacgcagtgcctgtcttgccgccgcgggttctatcaccaccaggagatgaacacctgtgtgaccctctgtcctgcaggattttatgctgatgaaagtcagaaaaattgccttaaatgccacccaagctgtaaaaagtgcgtggatgaacctgagaaatgtactgtctgtaaagaaggattcagccttgcacggggcagctgcattcctgactgtgagccaggcacctactttgactcagagctgatcagatgtggggaatgccatcacacctgcggaacctgcgtggggccaggcagagaagagtgcattcactgtgcgaaaaacttccacttccacgactggaagtgtgtgccagcctgtggtgagggcttctacccagaagagatgccgggcttgccccacaaagtgtgtcgaaggtgtgacgagaactgcttgagctgtgcaggctccagcaggaactgtagcaggtgtaagacgggcttcacacagctggggacctcctgcatcaccaaccacacgtgcagcaacgctgacgagacattctgcgagatggtgaagtccaaccggctgtgcgaacggaagctcttcattcagttctgctgccgcacgtgcctcctggccgggtaagggtgcctagctgcccacagagggcaggcactcccatccatccatccgtccaccttcctccagactgtcggccagagtctgtttcaggagcggcgccctgcacctgacagctttatctccccaggagcagcatctctgagcacccaagccaggtgggtggtggctcttaaggaggtgttcctaaaatggtgatatcctctcaaatgctgcttgttggctccagtcttccgacaaactaacaggaacaaaatgaattctgggaatccacagctctggctttggagcagcttctgggaccataagtttactgaatcttcaagaccaaagcagaaaagaaaggcgcttggcatcacacatcactcttctccccgtgcttttctgcggctgtgtagtaaatctccccggcccagctggcgaaccctgggccatcctcacatgtgacaaagggccagcagtctacctgctcgttgcctgccactgagcagtctggggacggtttggtcagactataaataagataggtttgagggcataaaatgtatgaccactggggccggagtatctatttctacatagtcagctacttctgaaactgcagcagtggcttagaaagtccaattccaaagccagaccagaagattctatcccccgcagcgctctcctttgagcaagccgagctctccttgttaccgtgttctgtctgtgtcttcaggagtctcatggcctgaacgaccacctcgacctgatgcagagccttctgaggagaggcaacaggaggcattctgtggccagccaaaaggtaccccgatggccaagcaattcctctgaacaaaatgtaaagccagccatgcattgttaatcatccatcacttcccattttatggaattgcttttaaaatacatttggcctctgcccttcagaagactcgtttttaaggtggaaactcctgtgtctgtgtatattacaagcctacatgacacagttggatttattctgccaaacctgtgtaggcattttataagctacatgttctaatttttaccgatgttaattattttgacaaatatttcatatattttcattgaaatgcacagatctgcttgatcaattcccttgaatagggaagtaacatttgccttaaattttttcgacctcgtctttctccatattgtcctgctcccctgtttgacgacagtgcatttgccttgtcacctgtgagctggagagaacccagatgttgtttattgaatctacaactctgaaagagaaatcaatgaagcaagtacaatgttaaccctaaattaataaaagagttaacatcccatggcaaaaaaaaaaaaataatttataaatttaattatatatataaaattt

SEQ ID NO: 451424 - DNA, 4400 bp, Homo sapiens
cgggaacgcgccgcggccgcctcctcctccccggctcccgcccgcggcggtgttggcggcggcggtggcggcggcggcggcgcttccccggcgcggagcggctttaaaaggcggcactccaccccccggcgcactcgcagctcgggcgccgcgcgagcctgtcgccgctatgcctccgcgcgcgccgcctgcgcccgggccccggccgccgccccgggccgccgccgccaccgacaccgccgcgggcgcggggggcgcggggggcgcggggggcgccggcgggcccgggttccggccgctcgcgccgcgtccctggcgctggctgctgctgctggcgctgcctgccgcctgctccgcgcccccgccgcgccccgtctacaccaaccactgggcggtgcaagtgctgggcggcccggccgaggcggaccgcgtggcggcggcgcacggctacctcaacttgggccagattggaaacctggaagattactaccatttttatcacagcaaaacctttaaaagatcaaccttgagtagcagaggccctcacaccttcctcagaatggacccccaggtgaaatggctccagcaacaggaagtgaaacgaagggtgaagagacaggtgcgaagtgacccgcaggccctttacttcaacgaccccatttggtccaacatgtggtacctgcattgtggcgacaagaacagtcgctgccggtcggaaatgaatgtccaggcagcgtggaagaggggctacacaggaaaaaacgtggtggtcaccatccttgatgatggcatagagagaaatcaccctgacctggccccaaattatgattcctacgccagctacgacgtgaacggcaatgattatgacccatctccacgatatgatgccagcaatgaaaataaacacggcactcgttgtgcgggagaagttgctgcttcagcaaacaattcctactgcatcgtgggcatagcgtacaatgccaaaataggaggcatccgcatgctggacggcgatgtcacagatgtggtcgaggcaaagtcgctgggcatcagacccaactacatcgacatttacagtgccagctgggggccggacgacgacggcaagacggtggacgggcccggccgactggctaagcaggctttcgagtatggcattaaaaagggccggcagggcctgggctccattttcgtctgggcatctgggaatggcgggagagagggggactactgctcgtgcgatggctacaccaacagcatctacaccatctccgtcagcagcgccaccgagaatggctacaagccctggtacctggaagagtgtgcctccaccctggccaccacctacagcagtggggccttttatgagcgaaaaatcgtcaccacggatctgcgtcagcgctgtaccgatggccacactgggacctcagtctctgcccccatggtggcgggcatcatcgccttggctctagaagcaaacagccagttaacctggagggacgtccagcacctgctagtgaagacatcccggccggcccacctgaaagcgagcgactggaaagtaaacggcgcgggtcataaagttagccatttctatggatttggtttggtggacgcagaagctctcgttgtggaggcaaagaagtggacagcagtgccatcgcagcacatgtgtgtggccgcctcggacaagagacccaggagcatccccttagtgcaggtgctgcggactacggccctgaccagcgcctgcgcggagcactcggaccagcgggtggtctacttggagcacgtggtggttcgcacctccatctcacacccacgccgaggagacctccagatctacctggtttctccctcgggaaccaagtctcaacttttggcaaagaggttgctggatctttccaatgaagggtttacaaactgggaattcatgactgtccactgctggggagaaaaggctgaagggcagtggaccttggaaatccaagatctgccatcccaggtccgcaacccggagaagcaagggaagttgaaagaatggagcctcatactgtatggcacagcagagcacccgtaccacaccttcagtgcccatcagtcccgctcgcggatgctggagctctcagccccagagctggagccacccaaggctgccctgtcaccctcccaggtggaagttcctgaagatgaggaagattacacagctcaatccaccccaggctctgctaatattttacagaccagtgtgtgccatccggagtgtggtgacaaaggctgtgatggccccaatgcagaccagtgcttgaactgcgtccacttcagcctggggagtgtcaagaccagcaggaagtgcgtgagtgtgtgccccttgggctactttggggacacagcagcaagacgctgtcgccggtgccacaaggggtgtgagacctgctccagcagagctgcgacgcagtgcctgtcttgccgccgcgggttctatcaccaccaggagatgaacacctgtgtgaccctctgtcctgcaggattttatgctgatgaaagtcagaaaaattgccttaaatgccacccaagctgtaaaaagtgcgtggatgaacctgagaaatgtactgtctgtaaagaaggattcagccttgcacggggcagctgcattcctgactgtgagccaggcacctactttgactcagagctgatcagatgtggggaatgccatcacacctgcggaacctgcgtggggccaggcagagaagagtgcattcactgtgcgaaaccagaagagatgccgggcttgccccacaaagtgtgtcgaaggtgtgacgagaactgcttgagctgtgcaggctccagcaggaactgtagcaggtgtaagacgggcttcacacagctggggacctcctgcatcaccaaccacacgtgcagcaacgctgacgagacattctgcgagatggtgaagtccaaccggctgtgcgaacggaagctcttcattcagttctgctgccgcacgtgcctcctggccgggtaagggtgcctagctgcccacagagggcaggcactcccatccatccatccgtccaccttcctccagactgtcggccagagtctgtttcaggagcggcgccctgcacctgacagctttatctccccaggagcagcatctctgagcacccaagccaggtgggtggtggctcttaaggaggtgttcctaaaatggtgatatcctctcaaatgctgcttgttggctccagtcttccgacaaactaacaggaacaaaatgaattctgggaatccacagctctggctttggagcagcttctgggaccataagtttactgaatcttcaagaccaaagcagaaaagaaaggcgcttggcatcacacatcactcttctccccgtgcttttctgcggctgtgtagtaaatctccccggcccagctggcgaaccctgggccatcctcacatgtgacaaagggccagcagtctacctgctcgttgcctgccactgagcagtctggggacggtttggtcagactataaataagataggtttgagggcataaaatgtatgaccactggggccggagtatctatttctacatagtcagctacttctgaaactgcagcagtggcttagaaagtccaattccaaagccagaccagaagattctatcccccgcagcgctctcctttgagcaagccgagctctccttgttaccgtgttctgtctgtgtcttcaggagtctcatggcctgaacgaccacctcgacctgatgcagagccttctgaggagaggcaacaggaggcattctgtggccagccaaaaggtaccccgatggccaagcaattcctctgaacaaaatgtaaagccagccatgcattgttaatcatccatcacttcccattttatggaattgcttttaaaatacatttggcctctgcccttcagaagactcgtttttaaggtggaaactcctgtgtctgtgtatattacaagcctacatgacacagttggatttattctgccaaacctgtgtaggcattttataagctacatgttctaatttttaccgatgttaattattttgacaaatatttcatatattttcattgaaatgcacagatctgcttgatcaattcccttgaatagggaagtaacatttgccttaaattttttcgacctcgtctttctccatattgtcctgctcccctgtttgacgacagtgcatttgccttgtcacctgtgagctggagagaacccagatgttgtttattgaatctacaactctgaaagagaaatcaatgaagcaagtacaatgttaaccctaaattaataaaagagttaacatcccatggcaaaaaaaaaaaaataatttataaatttaattatatatataaaattt

SEQ ID NO: 451425 - DNA, 3948 bp, Homo sapiens
cgggaacgcgccgcggccgcctcctcctccccggctcccgcccgcggcggtgttggcggcggcggtggcggcggcggcggcgcttccccggcgcggagcggctttaaaaggcggcactccaccccccggcgcactcgcagctcgggcgccgcgcgagcctgtcgccgctatgcctccgcgcgcgccgcctgcgcccgggccccggccgccgccccgggccgccgccgccaccgacaccgccgcgggcgcggggggcgcggggggcgcggggggcgccggcgggcccgggttccggccgctcgcgccgcgtccctggcgctggctgctgctgctggcgctgcctgccgcctgctccgcgcccccgccgcgccccgtctacaccaaccactgggcggtgcaagtgctgggcggcccggccgaggcggaccgcgtggcggcggcgcacggctacctcaacttgggccagattggaaacctggaagattactaccatttttatcacagcaaaacctttaaaagatcaaccttgagtagcagaggccctcacaccttcctcagaatggacccccaggtgaaatggctccagcaacaggaagtgaaacgaagggtgaagagacaggtgcgaagtgacccgcaggccctttacttcaacgaccccatttggtccaacatgtggtacctgcattgtggcgacaagaacagtcgctgccggtcggaaatgaatgtccaggcagcgtggaagaggggctacacaggaaaaaacgtggtggtcaccatccttgatgatggcatagagagaaatcaccctgacctggccccaaattatgattcctacgccagctacgacgtgaacggcaatgattatgacccatctccacgatatgatgccagcaatgaaaataaacacggcactcgttgtgcgggagaagttgctgcttcagcaaacaattcctactgcatcgtgggcatagcgtacaatgccaaaataggaggcatccgcatgctggacggcgatgtcacagatgtggtcgaggcaaagtcgctgggcatcagacccaactacatcgacatttacagtgccagctgggggccggacgacgacggcaagacggtggacgggcccggccgactggctaagcaggctttcgagtatggcattaaaaagggccggcagggcctgggctccattttcgtctgggcatctgggaatggcgggagagagggggactactgctcgtgcgatggctacaccaacagcatctacaccatctccgtcagcagcgccaccgagaatggctacaagccctggtacctggaagagtgtgcctccaccctggccaccacctacagcagtggggccttttatgagcgaaaaatcgtcaccacggatctgcgtcagcgctgtaccgatggccacactgggacctcagtctctgcccccatggtggcgggcatcatcgccttggctctagaagcaaacagccagttaacctggagggacgtccagcacctgctagtgaagacatcccggccggcccacctgaaagcgagcgactggaaagtaaacggcgcgggtcataaagttagccatttctatggatttggtttggtggacgcagaagctctcgttgtggaggcaaagaagtggacagcagtgccatcgcagcacatgtgtgtggccgcctcggacaagagacccagctcaatccaccccaggctctgctaatattttacagaccagtgtgtgccatccggagtgtggtgacaaaggctgtgatggccccaatgcagaccagtgcttgaactgcgtccacttcagcctggggagtgtcaagaccagcaggaagtgcgtgagtgtgtgccccttgggctactttggggacacagcagcaagacgctgtcgccggtgccacaaggggtgtgagacctgctccagcagagctgcgacgcagtgcctgtcttgccgccgcgggttctatcaccaccaggagatgaacacctgtgtgaccctctgtcctgcaggattttatgctgatgaaagtcagaaaaattgccttaaatgccacccaagctgtaaaaagtgcgtggatgaacctgagaaatgtactgtctgtaaagaaggattcagccttgcacggggcagctgcattcctgactgtgagccaggcacctactttgactcagagctgatcagatgtggggaatgccatcacacctgcggaacctgcgtggggccaggcagagaagagtgcattcactgtgcgaaaaacttccacttccacgactggaagtgtgtgccagcctgtggtgagggcttctacccagaagagatgccgggcttgccccacaaagtgtgtcgaaggtgtgacgagaactgcttgagctgtgcaggctccagcaggaactgtagcaggtgtaagacgggcttcacacagctggggacctcctgcatcaccaaccacacgtgcagcaacgctgacgagacattctgcgagatggtgaagtccaaccggctgtgcgaacggaagctcttcattcagttctgctgccgcacgtgcctcctggccgggtaagggtgcctagctgcccacagagggcaggcactcccatccatccatccgtccaccttcctccagactgtcggccagagtctgtttcaggagcggcgccctgcacctgacagctttatctccccaggagcagcatctctgagcacccaagccaggtgggtggtggctcttaaggaggtgttcctaaaatggtgatatcctctcaaatgctgcttgttggctccagtcttccgacaaactaacaggaacaaaatgaattctgggaatccacagctctggctttggagcagcttctgggaccataagtttactgaatcttcaagaccaaagcagaaaagaaaggcgcttggcatcacacatcactcttctccccgtgcttttctgcggctgtgtagtaaatctccccggcccagctggcgaaccctgggccatcctcacatgtgacaaagggccagcagtctacctgctcgttgcctgccactgagcagtctggggacggtttggtcagactataaataagataggtttgagggcataaaatgtatgaccactggggccggagtatctatttctacatagtcagctacttctgaaactgcagcagtggcttagaaagtccaattccaaagccagaccagaagattctatcccccgcagcgctctcctttgagcaagccgagctctccttgttaccgtgttctgtctgtgtcttcaggagtctcatggcctgaacgaccacctcgacctgatgcagagccttctgaggagaggcaacaggaggcattctgtggccagccaaaaggtaccccgatggccaagcaattcctctgaacaaaatgtaaagccagccatgcattgttaatcatccatcacttcccattttatggaattgcttttaaaatacatttggcctctgcccttcagaagactcgtttttaaggtggaaactcctgtgtctgtgtatattacaagcctacatgacacagttggatttattctgccaaacctgtgtaggcattttataagctacatgttctaatttttaccgatgttaattattttgacaaatatttcatatattttcattgaaatgcacagatctgcttgatcaattcccttgaatagggaagtaacatttgccttaaattttttcgacctcgtctttctccatattgtcctgctcccctgtttgacgacagtgcatttgccttgtcacctgtgagctggagagaacccagatgttgtttattgaatctacaactctgaaagagaaatcaatgaagcaagtacaatgttaaccctaaattaataaaagagttaacatcccatggcaaaaaaaaaaaaataatttataaatttaattatatatataaaattt

SEQ ID NO: 451426 - DNA, 4400 bp, Homo sapiens
cgggaacgcgccgcggccgcctcctcctccccggctcccgcccgcggcggtgttggcggcggcggtggcggcggcggcggcgcttccccggcgcggagcggctttaaaaggcggcactccaccccccggcgcactcgcagctcgggcgccgcgcgagcctgtcgccgctatgcctccgcgcgcgccgcctgcgcccgggccccggccgccgccccgggccgccgccgccaccgacaccgccgcgggcgcggggggcgcggggggcgcggggggcgccggcgggcccgggttccggccgctcgcgccgcgtccctggcgctggctgctgctgctggcgctgcctgccgcctgctccgcgcccccgccgcgccccgtctacaccaaccactgggcggtgcaagtgctgggcggcccggccgaggcggaccgcgtggcggcggcgcacggctacctcaacttgggccagattggaaacctggaagattactaccatttttatcacagcaaaacctttaaaagatcaaccttgagtagcagaggccctcacaccttcctcagaatggacccccaggtgaaatggctccagcaacaggaagtgaaacgaagggtgaagagacaggtgcgaagtgacccgcaggccctttacttcaacgaccccatttggtccaacatgtggtacctgcattgtggcgacaagaacagtcgctgccggtcggaaatgaatgtccaggcagcgtggaagaggggctacacaggaaaaaacgtggtggtcaccatccttgatgatggcatagagagaaatcaccctgacctggccccaaattatgattcctacgccagctacgacgtgaacggcaatgattatgacccatctccacgatatgatgccagcaatgaaaataaacacggcactcgttgtgcgggagaagttgctgcttcagcaaacaattcctactgcatcgtgggcatagcgtacaatgccaaaataggaggcatccgcatgctggacggcgatgtcacagatgtggtcgaggcaaagtcgctgggcatcagacccaactacatcgacatttacagtgccagctgggggccggacgacgacggcaagacggtggacgggcccggccgactggctaagcaggctttcgagtatggcattaaaaagggccggcagggcctgggctccattttcgtctgggcatctgggaatggcgggagagagggggactactgctcgtgcgatggctacaccaacagcatctacaccatctccgtcagcagcgccaccgagaatggctacaagccctggtacctggaagagtgtgcctccaccctggccaccacctacagcagtggggccttttatgagcgaaaaatcgtcaccacggatctgcgtcagcgctgtaccgatggccacactgggacctcagtctctgcccccatggtggcgggcatcatcgccttggctctagaagcaaacagccagttaacctggagggacgtccagcacctgctagtgaagacatcccggccggcccacctgaaagcgagcgactggaaagtaaacggcgcgggtcataaagttagccatttctatggatttggtttggtggacgcagaagctctcgttgtggaggcaaagaagtggacagcagtgccatcgcagcacatgtgtgtggccgcctcggacaagagacccaggagcatccccttagtgcaggtgctgcggactacggccctgaccagcgcctgcgcggagcactcggaccagcgggtggtctacttggagcacgtggtggttcgcacctccatctcacacccacgccgaggagacctccagatctacctggtttctccctcgggaaccaagtctcaacttttggcaaagaggttgctggatctttccaatgaagggtttacaaactgggaattcatgactgtccactgctggggagaaaaggctgaagggcagtggaccttggaaatccaagatctgccatcccaggtccgcaacccggagaagcaagggaagttgaaagaatggagcctcatactgtatggcacagcagagcacccgtaccacaccttcagtgcccatcagtcccgctcgcggatgctggagctctcagccccagagctggagccacccaaggctgccctgtcaccctcccaggtggaagttcctgaagatgaggaagattacacagctcaatccaccccaggctctgctaatattttacagaccagtgtgtgccatccggagtgtggtgacaaaggctgtgatggccccaatgcagaccagtgcttgaactgcgtccacttcagcctggggagtgtcaagaccagcaggaagtgcgtgagtgtgtgccccttgggctactttggggacacagcagcaagacgctgtcgccggtgccacaaggggtgtgagacctgctccagcagagctgcgacgcagtgcctgtcttgccgccgcgggttctatcaccaccaggagatgaacacctgtgtgaccctctgtcctgcaggattttatgctgatgaaagtcagaaaaattgccttaaatgccacccaagctgtaaaaagtgcgtggatgaacctgagaaatgtactgtctgtaaagaaggattcagccttgcacggggcagctgcattcctgactgtgagccaggcacctactttgactcagagctgatcagatgtggggaatgccatcacacctgcggaacctgcgtggggccaggcagagaagagtgcattcactgtgcgaaaaacttccacttccacgactggaagtgtgtgccagcctgtggtgagggcttctacccagaagagatgccgggcttgccccacaaagtgtgtcgaaggtgtgacgagaactgcttgagctgtgcaggctccagcaggaactgtagcaggtgtaagacgggcttcacacagctggggacctcctgcatcaccaaccacacgtgcagcaacgctgacgagacattctgcgagatggtgaagtccaaccggctgtgcgaacggaagctcttcattcagttctgctgccgcacgtgcctcctggccgggtaagggtgcctagctgcccacagagggcaggcactcccatccatccatccgtccaccttcctccagactgtcggccagagtctgtttcaggagcggcgccctgcacctgacagctttatctccccaggagcagcatctctgagcacccaagccaggtgggtggtggctcttaaggaggtgttcctaaaatggtgatatcctctcaaatgctgcttgttggctccagtcttccgacaaactaacaggaacaaaatgaattctgggaatccacagctctggctttggagcagcttctgggaccataagtttactgaatcttcaagaccaaagcagaaaagaaaggcgcttggcatcacacatcactcttctccccgtgcttttctgcggctgtgtagtaaatctccccggcccagctggcgaaccctgggccatcctcacatgtgacaaagggccagcagtctacctgctcgttgcctgccactgagcagtctggggacggtttggtcagactataaataagataggtttgagggcataaaatgtatgaccactggggccggagtatctatttctacatagtcagctacttctgaaactgcagcagtggcttagaaagtccaattccaaagccagaccagaagattctatcccccgcagcgctctcctttgagcaagccgagctctccttgttaccgtgttctgtctgtgtcttcaggagtctcatggcctgaacgaccacctcgacctgatgcagagccttctgaggagaggcaacaggaggcattctgtggccagccaaaaggtaccccgatggccaagcaattcctctgaacaaaatgtaaagccagccatgcattgttaatcatccatcacttcccattttatggaattgctttttgtgtctgtgtatattacaagcctacatgacacagttggatttattctgccaaacctgtgtaggcattttataagctacatgttctaatttttaccgatgttaattattttgacaaatatttcatatattttcattgaaatgcacagatctgcttgatcaattcccttgaatagggaagtaacatttgccttaaattttttcgacctcgtctttctccatattgtcctgctcccctgtttgacgacagtgcatttgccttgtcacctgtgagctggagagaacccagatgttgtttattgaatctacaactctgaaagagaaatcaatgaagcaagtacaatgttaaccctaaattaataaaagagttaacatcccatggcaaaaaaaaaaaaataatttataaatttaattatatatataaaattt

SEQ ID NO: 451427 - DNA, 3238 bp, Homo sapiens
cgggaacgcgccgcggccgcctcctcctccccggctcccgcccgcggcggtgttggcggcggcggtggcggcggcggcggcgcttccccggcgcggagcggctttaaaaggcggcactccaccccccggcgcactcgcagctcgggcgccgcgcgagcctgtcgccgctatgcctccgcgcgcgccgcctgcgcccgggccccggccgccgccccgggccgccgccgccaccgacaccgccgcgggcgcggggggcgcggggggcgcggggggcgccggcgggcccgggttccggccgctcgcgccgcgtccctggcgctggctgctgctgctggcgctgcctgccgcctgctccgcgcccccgccgcgccccgtctacaccaaccactgggcggtgcaagtgctgggcggcccggccgaggcggaccgcgtggcggcggcgcacggctacctcaacttgggccagattggaaacctggaagattactaccatttttatcacagcaaaacctttaaaagatcaaccttgagtagcagaggccctcacaccttcctcagaatggacccccaggtgaaatggctccagcaacaggaagtgaaacgaagggtgaagagacaggtgcgaagtgacccgcaggccctttacttcaacgaccccatttggtccaacatgtggtacctgcattgtggcgacaagaacagtcgctgccggtcggaaatgaatgtccaggcagcgtggaagaggggctacacaggaaaaaacgtggtggtcaccatccttgatgatggcatagagagaaatcaccctgacctggccccaaattatgattcctacgccagctacgacgtgaacggcaatgattatgacccatctccacgatatgatgccagcaatgaaaataaacacggcactcgttgtgcgggagaagttgctgcttcagcaaacaattcctactgcatcgtgggcatagcgtacaatgccaaaataggaggcatccgcatgctggacggcgatgtcacagatgtggtcgaggcaaagtcgctgggcatcagacccaactacatcgacatttacagtgccagctgggggccggacgacgacggcaagacggtggacgggcccggccgactggctaagcaggctttcgagtatggcattaaaaagggccggcagggcctgggctccattttcgtctgggcatctgggaatggcgggagagagggggactactgctcgtgcgatggctacaccaacagcatctacaccatctccgtcagcagcgccaccgagaatggctacaagccctggtacctggaagagtgtgcctccaccctggccaccacctacagcagtggggccttttatgagcgaaaaatcgtcaccacggatctgcgtcagcgctgtaccgatggccacactgggacctcagtctctgcccccatggtggcgggcatcatcgccttggctctagaagcaaacagccagttaacctggagggacgtccagcacctgctagtgaagacatcccggccggcccacctgaaagcgagcgactggaaagtaaacggcgcgggtcataaagttagccatttctatggatttggtttggtggacgcagaagctctcgttgtggaggcaaagaagtggacagcagtgccatcgcagcacatgtgtgtggccgcctcggacaagagacccaggagcatccccttagtgcaggtgctgcggactacggccctgaccagcgcctgcgcggagcactcggaccagcgggtggtctacttggagcacgtggtggttcgcacctccatctcacacccacgccgaggagacctccagatctacctggtttctccctcgggaaccaagtctcaacttttggcaaagaggttgctggatctttccaatgaagggtttacaaactgggaattcatgactgtccactgctggggagaaaaggctgaagggcagtggaccttggaaatccaagatctgccatcccaggtccgcaacccggagaagcaagggaagttgaaagaatggagcctcatactgtatggcacagcagagcacccgtaccacaccttcagtgcccatcagtcccgctcgcggatgctggagctctcagccccagagctggagccacccaaggctgccctgtcaccctcccaggtggaagttcctgaagatgaggaagattacacagctcaatccaccccaggctctgctaatattttacagaccagtgtgtgccatccggagtgtggtgacaaaggctgtgatggccccaatgcagaccagtgcttgaactgcgtccacttcagcctggggagtgtcaagaccagcaggaagtgcgtgagtgtgtgccccttgggctactttggggacacagcagcaagacgctgtcgccggtgccacaaggggtgtgagacctgctccagcagagctgcgacgcagtgcctgtcttgccgccgcgggttctatcaccaccaggagatgaacacctgtgtgaccctctgtcctgcaggattttatgctgatgaaagtcagaaaaattgccttaaatgccacccaagctgtaaaaagtgcgtggatgaacctgagaaatgtactgtctgtaaagaaggattcagccttgcacggggcagctgcattcctgactgtgagccaggcacctactttgactcagagctgatcagatgtggggaatgccatcacacctgcggaacctgcgtggggccaggcagagaagagtgcattcactgtgcgaaaaacttccacttccacgactggaagtgtgtgccagcctgtggtgagggcttctacccagaagagatgccgggcttgccccacaaagtgtgtcgaaggtgtgacgagaactgcttgagctgtgcaggctccagcaggaactgtagcaggtgtaagacgggcttcacacagctggggacctcctgcatcaccaaccacacgtgcagcaacggggacatttggcaacgtctggagacattttgggttgtcacaactggaaggatgtactcacatccagtgggtggaggccaggaatgctgctaagcaccctgcaatgcacagcagcccccatgacaaagaactgtccagaccaaaatgtcaatagtgccgaggttgagaaattccggccaaaagaaatggaatcaaaaaagaaaattgtttgcaacttcatagagataccctcaatgaataaaaccacatatggtttga

SEQ ID NO: 451428 - DNA, 2503 bp, Homo sapiens
cgggaacgcgccgcggccgcctcctcctccccggctcccgcccgcggcggtgttggcggcggcggtggcggcggcggcggcgcttccccggcgcggagcggctttaaaaggcggcactccaccccccggcgcactcgcagctcgggcgccgcgcgagcctgtcgccgctatgcctccgcgcgcgccgcctgcgcccgggccccggccgccgccccgggccgccgccgccaccgacaccgccgcgggcgcggggggcgcggggggcgcggggggcgccggcgggcccgggttccggccgctcgcgccgcgtccctggcgctggctgctgctgctggcgctgcctgccgcctgctccgcgcccccgccgcgccccgtctacaccaaccactgggcggtgcaagtgctgggcggcccggccgaggcggaccgcgtggcggcggcgcacggctacctcaacttgggccagattggaaacctggaagattactaccatttttatcacagcaaaacctttaaaagatcaaccttgagtagcagaggccctcacaccttcctcagaatggacccccaggtgaaatggctccagcaacaggaagtgaaacgaagggtgaagagacaggtgcgaagtgacccgcaggccctttacttcaacgaccccatttggtccaacatgtggtacctgcattgtggcgacaagaacagtcgctgccggtcggaaatgaatgtccaggcagcgtggaagaggggctacacaggaaaaaacgtggtggtcaccatccttgatgatggcatagagagaaatcaccctgacctggccccaaattatgattcctacgccagctacgacgtgaacggcaatgattatgacccatctccacgatatgatgccagcaatgaaaataaacacggcactcgttgtgcgggagaagttgctgcttcagcaaacaattcctactgcatcgtgggcatagcgtacaatgccaaaataggaggcatccgcatgctggacggcgatgtcacagatgtggtcgaggcaaagtcgctgggcatcagacccaactacatcgacatttacagtgccagctgggggccggacgacgacggcaagacggtggacgggcccggccgactggctaagcaggctttcgagtatggcattaaaaagggccggcagggcctgggctccattttcgtctgggcatctgggaatggcgggagagagggggactactgctcgtgcgatggctacaccaacagcatctacaccatctccgtcagcagcgccaccgagaatggctacaagccctggtacctggaagagtgtgcctccaccctggccaccacctacagcagtggggccttttatgagcgaaaaatcgtcaccacggatctgcgtcagcgctgtaccgatggccacactgggacctcagtctctgcccccatggtggcgggcatcatcgccttggctctagaagcaaacagccagttaacctggagggacgtccagcacctgctagtgaagacatcccggccggcccacctgaaagcgagcgactggaaagtaaacggcgcgggtcataaagttagccatttctatggatttggtttggtggacgcagaagctctcgttgtggaggcaaagaagtggacagcagtgccatcgcagcacatgtgtgtggccgcctcggacaagagacccaggagcatccccttagtgcaggtgctgcggactacggccctgaccagcgcctgcgcggagcactcggaccagcgggtggtctacttggagcacgtggtggttcgcacctccatctcacacccacgccgaggagacctccagatctacctggtttctccctcgggaaccaagtctcaacttttggcaaagaggttgctggatctttccaatgaagggtttacaaactgggaattcatgactgtccactgctggggagaaaaggctgaagggcagtggaccttggaaatccaagatctgccatcccaggtccgcaacccggagaagcaagggaagttgaaagaatggagcctcatactgtatggcacagcagagcacccgtaccacaccttcagtgcccatcagtcccgctcgcggatgctggagctctcagccccagagctggagccacccaaggctgccctgtcaccctcccaggtggaagttcctgaagatgaggaagattacacagctcaatccaccccaggctctgctaatattttacagaccagggacatttggcaacgtctggagacattttgggttgtcacaactggaaggatgtactcacatccagtgggtggaggccaggaatgctgctaagcaccctgcaatgcacagcagcccccatgacaaagaactgtccagaccaaaatgtcaatagtgccgaggttgagaaattccggccaaaagaaatggaatcaaaaaagaaaattgtttgcaacttcatagagataccctcaatgaataaaaccacatatggtttga

SEQ ID NO: 451429 - DNA, 995 bp, Homo sapiens
  misc_feature (882)..(882): n is a, c, g, or t
  misc_feature (891)..(891): n is a, c, g, or t
aaattaaataatgactgccctgtttctgttttagtatgtaaatcctcagttcttcacctttgcactgtctgccacttagtttggttatatagtcattaacttgaatttggtctgtatagtctagactttaaatttaaagttttctacaaggggagaaaagtgttaaaatttttaaaatatgttttccaggacacttcacttccaagtcaggtaggtagttcaatctagttgttagccaaggactcaaggactgaattgttttaacataaggcttttcctgttctgggagccgcacttcattaaaattcttctaaaacttgtatgtttagagttaagcaagactttttttcttcctctccatgagttgtgaaatttaatgcacaacgctgatgtggctaacaagtttattttaagaattgtttagaaatgctgttgcttcaggttcttaaaatcactcagcactccaacttctaatcaaatttttggagacttaacagcatttgtctgtgtttgaactataaaaagcaccggatcttttccatctaattccgcaaaaattgatcatttgcaaagtcaaaactatagccatatccaaatcttttccccctcccaagagttctcagtgtctacatgtagactattccttttctgtataaagttcactctaggatttcaagtcaccacttattttacattttagtcatgcaaagattcaagtagttttgcaataagtacttatctttatttgtaataatttagtctgctgatcaaaagcattgtcttaatttttgagaactggttttagcatttacaaactaaattccagttaattaattaatagctttatatgcttcctgtaattggttttcccgtccttgatangtaggaggnaaggggcagagttagggatgccgggttagatggatggggattactgggtgggtctagggatggtggttaggaccgtttgaattacagtttgtggtggggtaaag

SEQ ID NO: 451430 - DNA, 729 bp, Homo sapiens
ccgtgttctcgcgcggtaaattttctattttccgtgggcgatttttgaccgcagcatttgcgctggtttcccccgattcgcctgtattttgatttttcctggggtcgttaatctttggtgtgtgatttgtcccccatgtgttgcgcccccccccgcggttatgggtcctctctcccacaggtgttcccccgtggacgcggttttccccgcctccccgacgggttgggttatactcccccccctttgccttctcgttattgatatacacgcctccccatattggggcccccctttgtcccagaaaactgggtgcacggctcatgcctttggccccccccggggattttttccccccccccccctttttttttttttttttttttttttttttttttttttttttttttttttttttgagaccccatctctaaataaataggtcaaacccttaaaaatatttaaattcttaaaaaattgaaaagattattcttctcaaatttagttgagctttctaagagaagcaattggctttttcccacttcaataatcattttcagtttgactcatacagttaacacaatgtgaatttcttcctcagcataacagagttatagaatgacagggctggaagtgaagtgtcctggaaaacatattttaaaaattttaacacttttctccccttgtagaaaactttaaatttaaagtctagacctatacagaccaattcag

SEQ ID NO: 451431 - DNA, 880 bp, Homo sapiens
aaaaaaaaaaaaagatataaatcacaataaataaataggtcaatacaaatgttagccaggcgtggtggcacatgcccatagtcgcagctactctggaggcagaggcaggaggatcacttgagcccatgaatttgaggcagcagtgagctatgattgtgccactgtactccagtctgggtgacagagtgagaccccatctctaaataaataggtcaaacccttaaaaatatttaaattcttaaaaaattgaaaagattattcttctcaaatttagttgagctttctaagagaagcaattggctttttcccacttcaataatcattttcagtttgactcatacagttaacacaatgtgaatttcttcctcagcataacagagttatagaatgacagggctggaagtgaccttagagagtatccagttctttcattttacaggtgaggcaactgagactcaaaggtgatgtaatttgtgcaaagattatagctaattagtagcagagccctgactgggacatagtttgaaggtgaaaaacttcaccaagctacctttcttgaaaggtccaaatgtttatgttttcaactactctttccactgtaccataactttcactacatattaaatgacactttataactaatataataggacaatcatcaatgcatatatagccagcccttcatatctgtgggttttgcatccatggattcaaccaaggaggaattgaaaacactgagaaaaaaaaaaaagaccacacaataaaaaaaaaaaatacaaaataatacaaagaaaaagccaaaattgtcatactgttgttaagcaacagtataacaactatttacatagcattaaggttggtgcaaaaatgcaaaaaaaaa

SEQ ID NO: 451432 - DNA, 1130 bp, Homo sapiens
aaaaaaaaaaaaagatataaatcacaataaataaataggtcaatacaaatgttagccaggcgtggtggcacatgcccatagtcgcagctactctggaggcagaggcaggaggatcacttgagcccatgaatttgaggcagcagtgagctatgattgtgccactgtactccagtctgggtgacagagtgagaccccatctctaaataaataggtcaaacccttaaaaatatttaaattcttaaaaaattgaaaagattattcttctcaaatttagttgagctttctaagagaagcaattggctttttcccacttcaataatcattttcagtttgactcatacagttaacacaatgtgaatttcttcctcagcataacagagttatagaatgacagggctggaagtgaccttagagagtatccagttctttcattttacaggtgaggcaactgagactcaaaggtgatgtaatttgtgcaaagattatagctaattagtagcagagccctgactgggacatagtttgaaggtgaaaaacttcaccaagctacctttcttgaaaggtccaaatgtttatgttttcaactactctttccactgtaccataactttcactacatattaaatgacactttataactaatataataggacaatcatcaatgcatatatagccagcccttcatatctgtgggttttgcatccatggattcaaccaaggaggaattgaaaacactgagaaaaaaaaaaaagaccacacaataaaaaaaaattaattacaaaaaaaaaaaaaaatataaatagaataaaaaaaaaaaagaagggggggggcgcgggatataaaaaattatccgcgggggggggccaatattatgagcgattacccaggtttttttgtagcaagggggggccccaatagagaggagaataaaaaaaaagaagagaagaggcaggtttattaacaaggttttggtgatgtgaaaaaggataatcgtggaaactttgggaaggaaccacaacttgggggtgaacatttgggcacaatctcctaagagaataagagctcggatatgtaacttgaggtgttgtgttaacaaggattatcgagaaatggtaagatattgaattagg

SEQ ID NO: 451433 - DNA, 2113 bp, Homo sapiens
aaattaaataatgactgccctgtttctgttttagtatgtaaatcctcagttcttcacctttgcactgtctgccacttagtttggttatatagtcattaacttgaatttggtctgtatagtctagactttaaatttaaagttttctacaaggggagaaaagtgttaaaatttttaaaatatgttttccaggacacttcacttccaagtcaggtaggtagttcaatctagttgttagccaaggactcaaggactgaattgttttaacataaggcttttcctgttctgggagccgcacttcattaaaattcttctaaaacttgtatgtttagagttaagcaagactttttttcttcctctccatgagttgtgaaatttaatgcacaacgctgatgtggctaacaagtttattttaagaattgtttagaaatgctgttgcttcaggttcttaaaatcactcagcactccaacttctaatcaaatttttggagacttaacagcatttgtctgtgtttgaactataaaaagcaccggatcttttccatctaattccgcaaaaattgatcatttgcaaagtcaaaactatagccatatccaaatcttttccccctcccaagagttctcagtgtctacatgtagactattccttttctgtataaagttcactctaggatttcaagtcaccacttattttacattttagtcatgcaaagattcaagtagttttgcaataagtacttatctttatttgtaataatttagtctgctgatcaaaagcattgtcttaatttttgagaactggttttagcatttacaaactaaattccagttaattaattaatagctttatattgcctttcctgctacatttggttttttcccctgtccctttgattacgggctaaggtagggtagagtgggtgtagtgagtgtatataatgtgatttggccctgtgtattatgatattttgttatttttgttgttatattatttacatttcagtagttgttttttgtgtttccattttagtggataaaatttgtattttgaactatgaatggagactaccgccccagcattagtttcacatgatataccctttaaacccgaatcattgttttatttcctgattacacaggtgttgaatggggaaaggggctagtatatcagtaggatatactatgggatgtatatatatcattgctgttagagaaatgaaataaaatggggctgggctcagtggctcacgcctgtaatcccagcactttgggaggctgaggcaggtggatcacgaggtcaggagatcgagaccatcctggctaacacggtgaaaccccgtctctactaaaaaacagaaaattagccgggcgtggtggcgggcgcctgtagtcccagctactcgggaggctgaggcaggagaatggtgtgaacccgggaggcagagcttgcagtgagccgagatctcgccactgcactccagcctgggcaacagagcaagactctgtctccaaaaaaaaaaaagaaataagaaaatgggaagcaatatttgacatagttctttttagtcaaatctacttgttaaaaaaagggtagcagtttattcatctgtgaaaggaaaataatacttatcttacaaggttgcaagagctcaaggagaccatgtatgtaaagttcctgctgtaaatatgaactcccatcctaatacccttttacctctctgtgggtttgtcttgacctggaaatttgggctaaaacttagaaaaaattcttacatgataactcagtgatgcttactcatagtttttggtgtttctcatagataagatataaatcagctgggcgcggtggctcatgcctgtaatcccagcactttgggaggccgaggcgggcagatcacctgaggtcgggaggtcgagaccagcctgaccaacatggagaaaccccgtctctactaaaaatgcaaaattagctgggcgtggtggctcatgcctgtaatcccagctacttgggaggctgaggcaggagaatcgcttgaacccaggaggcggaggttgtggtgagcgaagatcgtgccattgcactccagcctgggcaacaagagcaaaactctgtctc

SEQ ID NO: 451434 - DNA, 1980 bp, Homo sapiens
aaattaaataatgactgccctgtttctgttttagtatgtaaatcctcagttcttcacctttgcactgtctgccacttagtttggttatatagtcattaacttgaatttggtctgtatagtctagactttaaatttaaagttttctacaaggggagaaaagtgttaaaatttttaaaatatgttttccaggacacttcacttccaagtcaggtaggtagttcaatctagttgttagccaaggactcaaggactgaattgttttaacataaggcttttcctgttctgggagccgcacttcattaaaattcttctaaaacttgtatgtttagagttaagcaagactttttttcttcctctccatgagttgtgaaatttaatgcacaacgctgatgtggctaacaagtttattttaagaattgtttagaaatgctgttgcttcaggttcttaaaatcactcagcactccaacttctaatcaaatttttggagacttaacagcatttgtctgtgtttgaactataaaaagcaccggatcttttccatctaattccgcaaaaattgatcatttgcaaagtcaaaactatagccatatccaaatcttttccccctcccaagagttctcagtgtctacatgtagactattccttttctgtataaagttcactctaggatttcaagtcaccacttattttacattttagtcatgcaaagattcaagtagttttgcaataagtacttatctttatttgtaataatttagtctgctgatcaaaagcattgtcttaatttttgagaactggttttagcatttacaaactaaattccagttaattaattaatagctttatattgcctttcctgctacatttggttttttcccctgtccctttgattacgggctaaggtagggtagagtgggtgtagtgagtgtatataatgtgatttggccctgtgtattatgatattttgttatttttgttgttatattatttacatttcagtagttgttttttgtgtttccattttagtggataaaatttgtattttgaactatgaatggagactaccgccccagcattagtttcacatgatataccctttaaacccgaatcattgttttatttcctgattacacaggtgttgaatggggaaaggggctagtatatcagtaggatatactatgggatgtatatatatcattgctgttagagaaatgaaataaaatggggctgggctcagtggctcacgcctgtaatcccagcactttgggaggctgaggcaggagaatggtgtgaacccgggaggcagagcttgcagtgagccgagatctcgccactgcactccagcctgggcaacagagcaagactctgtctccaaaaaaaaaaaagaaataagaaaatgggaagcaatatttgacatagttctttttagtcaaatctacttgttaaaaaaagggtagcagtttattcatctgtgaaaggaaaataatacttatcttacaaggttgcaagagctcaaggagaccatgtatgtaaagttcctgctgtaaatatgaactcccatcctaatacccttttacctctctgtgggtttgtcttgacctggaaatttgggctaaaacttagaaaaaattcttacatgataactcagtgatgcttactcatagtttttggtgtttctcatagataagatataaatcagctgggcgcggtggctcatgcctgtaatcccagcactttgggaggccgaggcgggcagatcacctgaggtcgggaggtcgagaccagcctgaccaacatggagaaaccccgtctctactaaaaatgcaaaattagctgggcgtggtggctcatgcctgtaatcccagctacttgggaggctgaggcaggagaatcgcttgaacccaggaggcggaggttgtggtgagcgaagatcgtgccattgcactccagcctgggcaacaagagcaaaactctgtctc

SEQ ID NO: 451435 - DNA, 562 bp, Homo sapiens
aaaaaaaaaaaaagatataaatcacaataaataaataggtcaatacaaatgttagccaggcgtggtggcacatgcccatagtcgcagctactctggaggcagaggcaggaggatcacttgagcccatgaatttgaggcagcagtgagctatgattgtgccactgtactccagtctgggtgacagagtgagaccccatctctaaataaataggtcaaacccttaaaaatatttaaattcttaaaaaattgaaaagattattcttctcaaatttagttgagctttctaagagaagcaattggctttttcccacttcaataatcattttcagtttgactcatacagttaacacaatgtgaatttcttcatatctgtgggttttgcatccatggattcaaccaaggaggaattgaaaacactgagaaaaaaaaaaaagaccacacaataaaaaaaaaaaatacaaaataatacaaagaaaaagccaaaattgtcatactgttgttaagcaacagtataacaactatttacatagcattaaggttggtgcaaaaatgcaaaaaaaaa

SEQ ID NO: 451436 - DNA, 7727 bp, Homo sapiens
cgggagcggcgggagcggtggcggcggcagaggcggcggctccagcttcggctccggctcgggctcgggctccggctccggctccggctccggctccagctcgggtggcggtggcgggagcgggaccaggtggaggcggcggcggcagaggagtgggagcagcggccctagcggcttgcggggggacatgcggaccgacggcccctggataggcggaaggagtggaggccctggtgcccggcccttggtgctgagtatccagcaagagtgaccggggtgaagaagcaaagactcggttgattgtcctgggctgtggctggctgtggagctagagccctggatggcccctgagccagccccagggaggacgatggtgccccttgtgcctgcactggtgatgcttggtttggtggcaggcgcccatggtgacagcaaacctgtcttcattaaagtccctgaggaccagactgggctgtcaggaggggtagcctccttcgtgtgccaagctacaggagaacccaagccgcgcatcacatggatgaagaaggggaagaaagtcagctcccagcgcttcgaggtcattgagtttgatgatggggcagggtcagtgcttcggatccagccattgcgggtgcagcgagatgaagccatctatgagtgtacagctactaacagcctgggtgagatcaacactagtgccaagctctcagtgctcgaagaggaacagctgccccctgggttcccttccatcgacatggggcctcagctgaaggtggtggagaaggcacgcacagccaccatgctatgtgccgcaggcggaaatccagaccctgagatttcttggttcaaggacttccttcctgtagaccctgccacgagcaacggccgcatcaagcagctgcgttcaggtgccttgcagatagagagcagtgaggaatccgaccaaggcaagtacgagtgtgtggcgaccaactcggcaggcacacgttactcagcccctgcgaacctgtatgtgcgagtgcgccgcgtggctcctcgtttctccatccctcccagcagccaggaggtgatgccaggcggcagcgtgaacctgacatgcgtggcagtgggtgcacccatgccctacgtgaagtggatgatgggggccgaggagctcaccaaggaggatgagatgccagttggccgcaacgtcctggagctcagcaatgtcgtacgctctgccaactacacctgtgtggccatctcctcgctgggcatgatcgaggccacagcccaggtcacagtgaaagctcttccaaagcctccgattgatcttgtggtgacagagacaactgccaccagtgtcaccctcacctgggactctgggaactcggagcctgtaacctactatggcatccagtaccgcgcagcgggcacggagggcccctttcaggaggtggatggtgtggccaccacccgctacagcattggcggcctcagccctttctcggaatatgccttccgcgtgctggcggtgaacagcatcgggcgagggccgcccagcgaggcagtgcgggcacgcacgggagaacaggcgccctccagcccaccgcgccgcgtgcaggcacgcatgctgagcgccagcaccatgctggtgcagtgggagcctcccgaggagcccaacggcctggtgcggggataccgcgtctactatactccggactcccgccgccccccgaacgcctggcacaagcacaacaccgacgcggggctcctcacgaccgtgggcagcctgctgcctggcatcacctacagcctgcgcgtgcttgccttcaccgccgtgggcgatggccctcccagccccaccatccaggtcaagacgcagcagggagtgcctgcccagcccgcggacttccaggccgaggtggagtcggacaccaggatccagctctcgtggctgctgccccctcaggagcggatcatcatgtatgaactggtgtactgggcggcagaggacgaagaccaacagcacaaggtcaccttcgacccaacctcctcctacacactagaggacctgaagcctgacacactctaccgcttccagctggctgcacgctcggatatgggggtgggcgtcttcacccccaccattgaggcccgcacagcccagtccaccccctccgcccctccccagaaggtgatgtgtgtgagcatgggctccaccacggtccgggtaagttgggtcccgccgcctgccgacagccgcaacggcgttatcacccagtactccgtggcctacgaggcggtggacggcgaggaccgcgggcggcatgtggtggatggcatcagccgtgagcactccagctgggacctggtgggcctggagaagtggacggagtaccgggtgtgggtgcgggcacacacagacgtgggccccggccccgagagcagcccggtgctggtgcgcaccgatgaggacgtgcccagcgggcctccgcggaaggtggaggtggagccactgaactccactgctgtgcatgtctactggaagctgcctgtccccagcaagcagcatggccagatccgcggctaccaggtcacctacgtgcggctggagaatggcgagccccgtggactccccatcatccaagacgtcatgctagccgaggcccagtggcggccagaggagtccgaggactatgaaaccactatcagcggcctgaccccggagaccacctactccgttactgttgctgcctataccaccaagggggatggtgcccgcagcaagcccaaaattgtcactacaacaggtgcagtcccaggccggcccaccatgatgatcagcaccacggccatgaacactgcgctgctccagtggcacccacccaaggaactgcctggcgagctgctgggctaccggctgcagtactgccgggccgacgaggcgcggcccaacaccatagatttcggcaaggatgaccagcacttcacagtcaccggcctgcacaaggggaccacctacatcttccggcttgctgccaagaaccgggctggcttgggtgaggagttcgagaaggagatcaggacccccgaggacctgcccagcggcttcccccaaaacctgcatgtgacaggactgaccacgtctaccacagaactggcctgggacccgccagtgctggcggagaggaacgggcgcatcatcagctacaccgtggtgttccgagacatcaacagccaacaggagctgcagaacatcacgacagacacccgctttacccttactggcctcaagccagacaccacttacgacatcaaggtccgcgcatggaccagcaaaggctctggcccactcagccccagcatccagtcccggaccatgccggtggagcaagtgtttgccaagaacttccgggtggcggctgcaatgaagacgtctgtgctgctcagctgggaggttcccgactcctataagtcagctgtgccctttaagattctgtacaatgggcagagtgtggaggtggacgggcactcgatgcggaagctgatcgcagacctgcagcccaacacagagtactcgtttgtgctgatgaaccgtggcagcagcgcagggggcctgcagcacctggtgtccatccgcacagcccccgacctcctgcctcacaagccgctgcctgcctctgcctacatagaggacggccgcttcgatctctccatgccccatgtgcaagacccctcgcttgtcaggtggttctacattgttgtggtacccattgaccgtgtgggcgggagcatgctgacgccaaggtggagcacacccgaggaactggagctggacgagcttctagaagccatcgagcaaggcggagaggagcagcggcggcggcggcggcaggcagaacgtctgaagccatatgtggctgctcaactggatgtgctcccggagacctttaccttgggggacaagaagaactaccggggcttctacaaccggcccctgtctccggacttgagctaccagtgctttgtgcttgcctccttgaaggaacccatggaccagaagcgctatgcctccagcccctactcggatgagatcgtggtccaggtgacaccagcccagcagcaggaggagccggagatgctgtgggtgacgggtcccgtgctggcagtcatcctcatcatcctcattgtcatcgccatcctcttgttcaaaaggaaaaggacccactctccgtcctctaaggatgagcagtcgatcggactgaaggactccttgctggcccactcctctgaccctgtggagatgcggaggctcaactaccagaccccaggtatgcgagaccacccacccatccccatcaccgacctggcggacaacatcgagcgcctcaaagccaacgatggcctcaagttctcccaggagtatgagtccatcgaccctggacagcagttcacgtgggagaattcaaacctggaggtgaacaagcccaagaaccgctatgcgaatgtcatcgcctacgaccactctcgagtcatccttacctctatcgatggcgtccccgggagtgactacatcaatgccaactacatcgatggctaccgcaagcagaatgcctacatcgccacgcagggccccctgcccgagaccatgggcgatttctggagaatggtgtgggaacagcgcacggccactgtggtcatgatgacacggctggaggagaagtcccgggtaaaatgtgatcagtactggccagcccgtggcaccgagacctgtggccttattcaggtgaccctgttggacacagtggagctggccacatacactgtgcgcaccttcgcactccacaagagtggctccagtgagaagcgcgagctgcgtcagtttcagttcatggcctggccagaccatggagttcctgagtacccaactcccatcctggccttcctacgacgggtcaaggcctgcaaccccctagacgcagggcccatggtggtgcactgcagcgcgggcgtgggccgcaccggctgcttcatcgtgattgatgccatgttggagcggatgaagcacgagaagacggtggacatctatggccacgtgacctgcatgcgatcacagaggaactacatggtgcagacggaggaccagtacgtgttcatccatgaggcgctgctggaggctgccacgtgcggccacacagaggtgcctgcccgcaacctgtatgcccacatccagaagctgggccaagtgcctccaggggagagtgtgaccgccatggagctcgagttcaagttgctggccagctccaaggcccacacgtcccgcttcatcagcgccaacctgccctgcaacaagttcaagaaccggctggtgaacatcatgccctacgaattgacccgtgtgtgtctgcagcccatccgtggtgtggagggctctgactacatcaatgccagcttcctggatggttatagacagcagaaggcctacatagctacacaggggcctctggcagagagcaccgaggacttctggcgcatgctatgggagcacaattccaccatcatcgtcatgctgaccaagcttcgggagatgggcagggagaaatgccaccagtactggccagcagagcgctctgctcgctaccagtactttgttgttgacccgatggctgagtacaacatgccccagtatatcctgcgtgagttcaaggtcacggatgcccgggatgggcagtcaaggacaatccggcagttccagttcacagactggccagagcagggcgtgcccaagacaggcgagggattcattgacttcatcgggcaggtgcataagaccaaggagcagtttggacaggatgggcctatcacggtgcactgcagtgctggcgtgggccgcaccggggtgttcatcactctgagcatcgtcctggagcgcatgcgctatgagggcgtggtcgacatgtttcagaccgtgaagaccctgcgtacacagcgtcctgccatggtgcagacagaggaccagtatcagctgtgctaccgtgcggccctggagtacctcggcagctttgaccactatgcaacgtaactaccgctcccctctcctccgccacccccgccgtggggctccggaggggacccagctcctctgagccataccgaccatcgtccagccctcctacgcagatgctgtcactggcagagcacagcccacggggatcacagcgtttcaggaacgttgccacaccaatcagagagcctagaacatccctgggcaagtggatggcccagcaggcaggcactgtggcccttctgtccaccagacccacctggagcccgcttcaagctctctgttgcgctcccgcatttctcatgcttcttctcatggggtggggttggggcaaagcctcctttttaatacattaagtggggtagactgagggattttagcctcttccctctgatttttcctttcgcgaatccgtatctgcagaatgggccactgtaggggttggggtttattttgttttgtttttttttttcttgagttcactttggatccttattttgtatgacttctgctgaaggacagaacattgccttcctcgtgcagagctggggctgccagcctgagcggaggctcggccgtgggccgggaggcagtgctgatccggctgctcctccagcccttcagacgagatcctgtttcagctaaatgcagggaaactcaatgtttttttaagttttgttttccctttaaagcctttttttaggccacattgacagtggtgggcggggagaagatagggaacactcatccctggtcgtctatcccagtgtgtgtttaacattcacagcccagaaccacagatgtgtctgggagagcctggcaaggcattcctcatcaccatcgtgtttgcaaaggttaaaacaaaaacaaaaaaccacaaaaataaaaaacaaaaaaaacaaaaaacccaagaaaaaaaaaaagagtcagcccttggcttctgcttcaaaccctcaagaggggaagcaactccgtgtgcctggggttcccgagggagctgctggctgacctgggcccacagagcctggctttggtccccagcattgcagtatggtgtggtgtttgtaggctgtggggtctggctgtgtggccaaggtgaatagcacaggttagggtgtgtgccacaccccatgcacctcagggccaagcgggggcgtggctggcctttcaggtccaggccagtgggcctggtagcacatgtctgtcctcagagcaggggccagatgattttcctccctggtttgcagctgttttcaaagcccccgataatcgctcttttccactccaagatgccctcataaaccaatgtggcaagactactggacttctatcaatggtactctaatcagtccttattatcccagcttgctgaggggcagggagagcgcctcttcctctgggcagcgctatctagataggtaagtgggggcggggaagggtgcatagctgttttagctgagggacgtggtgccgacgtccccaaacctagctaggctaagtcaagatcaacattccagggttggtaatgttggatgatgaaacattcatttttaccttgtggatgctagtgctgtagagttcactgttgtacacagtctgttttctatttgttaagaaaaactacagcatcattgcataattcttgatggtaataaatttgaataatcagatttcttacaaa

SEQ ID NO: 451437 - DNA, 352 bp, Homo sapiens
gcggccgcctactactactaaattcgcggccgcgtcgccacagcccaggtcacagtgaaaggtgagtgtggcaggtgctgtaaccagtgccctccctgtcatctgggaggtcctggtggtgggcgaatgtgagctggctgccatgggcacaggcatggctgagggattcttgccctttcctgggtgtccctgccctggggtcctccagcccttagagggagggagggatttctgttattagccggcttaatgataatagttaaggcatattgagttgcttgctagcatgatgtctcccacgtcgagcggccgcgaatttagtagtagtagtagtagtagtagtcgcggccgc

SEQ ID NO: 451438 - DNA, 564 bp, Homo sapiens
tgaaccgggagttgttctggggtgctacccccatgggtactttgaggcccaaaagccctccctctgtcctccctgggcaaggtcccttccaggccaggccctctccaggtcagagtccttcaccatcctgtctccctttctctccctctcccgcggtcagtggcggccagaggagtccgaggactatgtaagtaacaggtgtgcgaacgcggacaagacatgggtcaagctgggctcgtgggacgctcctcctctccctcctttcctgctagcctgcactgccaagatccacagggctctagccacatcaggagaaaattggcgtttagacacaagcactgagctgagcagcgattggcatttcctctaatccttacttcttgcctgtcgagcagcaatttgaggccagtgttcatgatcgaccagggcctggcccctgccccggccagacagggatggagttaaatccaatcctgatcgttaggccttattgatccctggagtgaaaaatcacctgctttagggcccaggctgggagggctgtctggagagtcggattctggc

SEQ ID NO: 451439 - DNA, 438 bp, Homo sapiens
cccgataagcccgacagccctgagaagtacgacaggcgggacaagcagcaggcccatgcgcaggctggggtgaggggggtgtgccaggtgggcgctctggtgactggctgccccttcagcattagcccaccagggagcttcgtcgggagaggtccatggagctggagctgagagtgcggctgtcagagagacctgtgcctgtcgggctagtcggggccccgactagcccgacagaggaccagtatcagctgtgctaccgtgcggccctggagtacctcggcagctttgaccactatgcaacgtaactaccgctcccctctcctccgccacccccgccgtggggctccggaggggacccagctcctctgagccataccgaccatcgtccagccctcctacgcagatgctgtcgggctagtcgggggggtaccgagctcg

SEQ ID NO: 451440 - DNA, 7600 bp, Homo sapiens
  misc_feature (18)..(18): n is a, c, g, or t
atgtcggtactgcatttntccatggctatcaggaggcggcggcggcagaggagtgggagcagcggccctagcggcttgcggggggacatgcggaccgacggcccctggataggcggaaggagtggaggccctggtgcccggcccttggtgctgagtatccagcaagagtgaccggggtgaagaagcaaagactcggttgattgtcctgggctgtggctggctgtggagctagagccctggatggcccctgagccagccccagggaggacgatggtgccccttgtgcctgcactggtgatgcttggtttggtggcaggcgcccatggtgacagcaaacctgtcttcattaaagtccctgaggaccagactgggctgtcaggaggggtagcctccttcgtgtgccaagctacaggagaacccaagccgcgcatcacatggatgaagaaggggaagaaagtcagctcccagcgcttcgaggtcattgagtttgatgatggggcagggtcagtgcttcggatccagccattgcgggtgcagcgagatgaagccatctatgagtgtacagctactaacagcctgggtgagatcaacactagtgccaagctctcagtgctcgaagaggaacagctgccccctgggttcccttccatcgacatggggcctcagctgaaggtggtggagaaggcacgcacagccaccatgctatgtgccgcaggcggaaatccagaccctgagatttcttggttcaaggacttccttcctgtagaccctgccacgagcaacggccgcatcaagcagctgcgttcaggtgccttgcagatagagagcagtgaggaatccgaccaaggcaagtacgagtgtgtggcgaccaactcggcaggcacacgttactcagcccctgcgaacctgtatgtgcgagtgcgccgcgtggctcctcgtttctccatccctcccagcagccaggaggtgatgccaggcggcagcgtgaacctgacatgcgtggcagtgggtgcacccatgccctacgtgaagtggatgatgggggccgaggagctcaccaaggaggatgagatgccagttggccgcaacgtcctggagctcagcaatgtcgtacgctctgccaactacacctgtgtggccatctcctcgctgggcatgatcgaggccacagcccaggtcacagtgaaagctcttccaaagcctccgattgatcttgtggtgacagagacaactgccaccagtgtcaccctcacctgggactctgggaactcggagcctgtaacctactatggcatccagtaccgcgcagcgggcacggagggcccctttcaggaggtggatggtgtggccaccacccgctacagcattggcggcctcagccctttctcggaatatgccttccgcgtgctggcggtgaacagcatcgggcgagggccgcccagcgaggcagtgcgggcacgcacgggagaacaggcgccctccagcccaccgcgccgcgtgcaggcacgcatgctgagcgccagcaccatgctggtgcagtgggagcctcccgaggagcccaacggcctggtgcggggataccgcgtctactatactccggactcccgccgccccccgaacgcctggcacaagcacaacaccgacgcggggctcctcacgaccgtgggcagcctgctgcctggcatcacctacagcctgcgcgtgcttgccttcaccgccgtgggcgatggccctcccagccccaccatccaggtcaagacgcagcagggagtgcctgcccagcccgcggacttccaggccgaggtggagtcggacaccaggatccagctctcgtggctgctgccccctcaggagcggatcatcatgtatgaactggtgtactgggcggcagaggacgaagaccaacagcacaaggtcaccttcgacccaacctcctcctacacactagaggacctgaagcctgacacactctaccgcttccagctggctgcacgctcggatatgggggtgggcgtcttcacccccaccattgaggcccgcacagcccagtccaccccctccgcccctccccagaaggtgatgtgtgtgagcatgggctccaccacggtccgggtaagttgggtcccgccgcctgccgacagccgcaacggcgttatcacccagtactccgtggcctacgaggcggtggacggcgaggaccgcgggcggcatgtggtggatggcatcagccgtgagcactccagctgggacctggtgggcctggagaagtggacggagtaccgggtgtgggtgcgggcacacacagacgtgggccccggccccgagagcagcccggtgctggtgcgcaccgatgaggacgtgcccagcgggcctccgcggaaggtggaggtggagccactgaactccactgctgtgcatgtctactggaagctgcctgtccccagcaagcagcatggccagatccgcggctaccaggtcacctacgtgcggctggagaatggcgagccccgtggactccccatcatccaagacgtcatgctagccgaggcccaggaaaccactatcagcggcctgaccccggagaccacctactccgttactgttgctgcctataccaccaagggggatggtgcccgcagcaagcccaaaattgtcactacaacaggtgcagtcccaggccggcccaccatgatgatcagcaccacggccatgaacactgcgctgctccagtggcacccacccaaggaactgcctggcgagctgctgggctaccggctgcagtactgccgggccgacgaggcgcggcccaacaccatagatttcggcaaggatgaccagcacttcacagtcaccggcctgcacaaggggaccacctacatcttccggcttgctgccaagaaccgggctggcttgggtgaggagttcgagaaggagatcaggacccccgaggacctgcccagcggcttcccccaaaacctgcatgtgacaggactgaccacgtctaccacagaactggcctgggacccgccagtgctggcggagaggaacgggcgcatcatcagctacaccgtggtgttccgagacatcaacagccaacaggagctgcagaacatcacgacagacacccgctttacccttactggcctcaagccagacaccacttacgacatcaaggtccgcgcatggaccagcaaaggctctggcccactcagccccagcatccagtcccggaccatgccggtggagcaagtgtttgccaagaacttccgggtggcggctgcaatgaagacgtctgtgctgctcagctgggaggttcccgactcctataagtcagctgtgccctttaagattctgtacaatgggcagagtgtggaggtggacgggcactcgatgcggaagctgatcgcagacctgcagcccaacacagagtactcgtttgtgctgatgaaccgtggcagcagcgcagggggcctgcagcacctggtgtccatccgcacagcccccgacctcctgcctcacaagccgctgcctgcctctgcctacatagaggacggccgcttcgatctctccatgccccatgtgcaagacccctcgcttgtcaggtggttctacattgttgtggtacccattgaccgtgtgggcgggagcatgctgacgccaaggtggagcacacccgaggaactggagctggacgagcttctagaagccatcgagcaaggcggagaggagcagcggcggcggcggcggcaggcagaacgtctgaagccatatgtggctgctcaactggatgtgctcccggagacctttaccttgggggacaagaagaactaccggggcttctacaaccggcccctgtctccggacttgagctaccagtgctttgtgcttgcctccttgaaggaacccatggaccagaagcgctatgcctccagcccctactcggatgagatcgtggtccaggtgacaccagcccagcagcaggaggagccggagatgctgtgggtgacgggtcccgtgctggcagtcatcctcatcatcctcattgtcatcgccatcctcttgttcaaaaggaaaaggacccactctccgtcctctaaggatgagcagtcgatcggactgaaggactccttgctggcccactcctctgaccctgtggagatgcggaggctcaactaccagaccccaggtatgcgagaccacccacccatccccatcaccgacctggcggacaacatcgagcgcctcaaagccaacgatggcctcaagttctcccaggagtatgagtccatcgaccctggacagcagttcacgtgggagaattcaaacctggaggtgaacaagcccaagaaccgctatgcgaatgtcatcgcctacgaccactctcgagtcatccttacctctatcgatggcgtccccgggagtgactacatcaatgccaactacatcgatggctaccgcaagcagaatgcctacatcgccacgcagggccccctgcccgagaccatgggcgatttctggagaatggtgtgggaacagcgcacggccactgtggtcatgatgacacggctggaggagaagtcccgggtaaaatgtgatcagtactggccagcccgtggcaccgagacctgtggccttattcaggtgaccctgttggacacagtggagctggccacatacactgtgcgcaccttcgcactccacaagagtggctccagtgagaagcgcgagctgcgtcagtttcagttcatggcctggccagaccatggagttcctgagtacccaactcccatcctggccttcctacgacgggtcaaggcctgcaaccccctagacgcagggcccatggtggtgcactgcagcgcgggcgtgggccgcaccggctgcttcatcgtgattgatgccatgttggagcggatgaagcacgagaagacggtggacatctatggccacgtgacctgcatgcgatcacagaggaactacatggtgcagacggaggaccagtacgtgttcatccatgaggcgctgctggaggctgccacgtgcggccacacagaggtgcctgcccgcaacctgtatgcccacatccagaagctgggccaagtgcctccaggggagagtgtgaccgccatggagctcgagttcaagttgctggccagctccaaggcccacacgtcccgcttcatcagcgccaacctgccctgcaacaagttcaagaaccggctggtgaacatcatgccctacgaattgacccgtgtgtgtctgcagcccatccgtggtgtggagggctctgactacatcaatgccagcttcctggatggttatagacagcagaaggcctacatagctacacaggggcctctggcagagagcaccgaggacttctggcgcatgctatgggagcacaattccaccatcatcgtcatgctgaccaagcttcgggagatgggcagggagaaatgccaccagtactggccagcagagcgctctgctcgctaccagtactttgttgttgacccgatggctgagtacaacatgccccagtatatcctgcgtgagttcaaggtcacggatgcccgggatgggcagtcaaggacaatccggcagttccagttcacagactggccagagcagggcgtgcccaagacaggcgagggattcattgacttcatcgggcaggtgcataagaccaaggagcagtttggacaggatgggcctatcacggtgcactgcagtgctggcgtgggccgcaccggggtgttcatcactctgagcatcgtcctggagcgcatgcgctatgagggcgtggtcgacatgtttcagaccgtgaagaccctgcgtacacagcgtcctgccatggtgcagacagaggaccagtatcagctgtgctaccgtgcggccctggagtacctcggcagctttgaccactatgcaacgtaactaccgctcccctctcctccgccacccccgccgtggggctccggaggggacccagctcctctgagccataccgaccatcgtccagccctcctacgcagatgctgtcactggcagagcacagcccacggggatcacagcgtttcaggaacgttgccacaccaatcagagagcctagaacatccctgggcaagtggatggcccagcaggcaggcactgtggcccttctgtccaccagacccacctggagcccgcttcaagctctctgttgcgctcccgcatttctcatgcttcttctcatggggtggggttggggcaaagcctcctttttaatacattaagtggggtagactgagggattttagcctcttccctctgatttttcctttcgcgaatccgtatctgcagaatgggccactgtaggggttggggtttattttgttttgtttttttttttcttgagttcactttggatccttattttgtatgacttctgctgaaggacagaacattgccttcctcgtgcagagctggggctgccagcctgagcggaggctcggccgtgggccgggaggcagtgctgatccggctgctcctccagcccttcagacgagatcctgtttcagctaaatgcagggaaactcaatgtttttttaagttttgttttccctttaaagcctttttttaggccacattgacagtggtgggcggggagaagatagggaacactcatccctggtcgtctatcccagtgtgtgtttaacattcacagcccagaaccacagatgtgtctgggagagcctggcaaggcattcctcatcaccatcgtgtttgcaaaggttaaaacaaaaacaaaaaaccacaaaaataaaaaacaaaaaaaacaaaaaacccaagaaaaaaaaaaagagtcagcccttggcttctgcttcaaaccctcaagaggggaagcaactccgtgtgcctggggttcccgagggagctgctggctgacctgggcccacagagcctggctttggtccccagcattgcagtatggtgtggtgtttgtaggctgtggggtctggctgtgtggccaaggtgaatagcacaggttagggtgtgtgccacaccccatgcacctcagggccaagcgggggcgtggctggcctttcaggtccaggccagtgggcctggtagcacatgtctgtcctcagagcaggggccagatgattttcctccctggtttgcagctgttttcaaagcccccgataatcgctcttttccactccaagatgccctcataaaccaatgtggcaagactactggacttctatcaatggtactctaatcagtccttattatcccagcttgctgaggggcagggagagcgcctcttcctctgggcagcgctatctagataggtaagtgggggcggggaagggtgcatagctgttttagctgagggacgtggtgccgacgtccccaaacctagctaggctaagtcaagatcaacattccagggttggtaatgttggatgatgaaacattcatttttaccttgtggatgctagtgctgtagagttcactgttgtacacagtctgttttctatttgttaagaaaaactacagcatcattgcataattcttgatggtaataaatttgaataatcagatttcttacaaa

SEQ ID NO: 451441 - DNA, 7704 bp, Homo sapiens
  misc_feature (18)..(18): n is a, c, g, or t
atgtcggtactgcatttntccatggctatcaggaggcggcggcggcagaggagtgggagcagcggccctagcggcttgcggggggacatgcggaccgacggcccctggataggcggaaggagtggaggccctggtgcccggcccttggtgctgagtatccagcaagagtgaccggggtgaagaagcaaagactcggttgattgtcctgggctgtggctggctgtggagctagagccctggatggcccctgagccagccccagggaggacgatggtgccccttgtgcctgcactggtgatgcttggtttggtggcaggcgcccatggtgacagcaaacctgtcttcattaaagtccctgaggaccagactgggctgtcaggaggggtagcctccttcgtgtgccaagctacaggagaacccaagccgcgcatcacatggatgaagaaggggaagaaagtcagctcccagcgcttcgaggtcattgagtttgatgatggggcagggtcagtgcttcggatccagccattgcgggtgcagcgagatgaagccatctatgagtgtacagctactaacagcctgggtgagatcaacactagtgccaagctctcagtgctcgaagaggaacagctgccccctgggttcccttccatcgacatggggcctcagctgaaggtggtggagaaggcacgcacagccaccatgctatgtgccgcaggcggaaatccagaccctgagatttcttggttcaaggacttccttcctgtagaccctgccacgagcaacggccgcatcaagcagctgcgttcaggtgccttgcagatagagagcagtgaggaatccgaccaaggcaagtacgagtgtgtggcgaccaactcggcaggcacacgttactcagcccctgcgaacctgtatgtgcgagtgcgccgcgtggctcctcgtttctccatccctcccagcagccaggaggtgatgccaggcggcagcgtgaacctgacatgcgtggcagtgggtgcacccatgccctacgtgaagtggatgatgggggccgaggagctcaccaaggaggatgagatgccagttggccgcaacgtcctggagctcagcaatgtcgtacgctctgccaactacacctgtgtggccatctcctcgctgggcatgatcgaggccacagcccaggtcacagtgaaagctcttccaaagcctccgattgatcttgtggtgacagagacaactgccaccagtgtcaccctcacctgggactctgggaactcggagcctgtaacctactatggcatccagtaccgcgcagcgggcacggagggcccctttcaggaggtggatggtgtggccaccacccgctacagcattggcggcctcagccctttctcggaatatgccttccgcgtgctggcggtgaacagcatcgggcgagggccgcccagcgaggcagtgcgggcacgcacgggagaacaggcgccctccagcccaccgcgccgcgtgcaggcacgcatgctgagcgccagcaccatgctggtgcagtgggagcctcccgaggagcccaacggcctggtgcggggataccgcgtctactatactccggactcccgccgccccccgaacgcctggcacaagcacaacaccgacgcggggctcctcacgaccgtgggcagcctgctgcctggcatcacctacagcctgcgcgtgcttgccttcaccgccgtgggcgatggccctcccagccccaccatccaggtcaagacgcagcagggagtgcctgcccagcccgcggacttccaggccgaggtggagtcggacaccaggatccagctctcgtggctgctgccccctcaggagcggatcatcatgtatgaactggtgtactgggcggcagaggacgaagaccaacagcacaaggtcaccttcgacccaacctcctcctacacactagaggacctgaagcctgacacactctaccgcttccagctggctgcacgctcggatatgggggtgggcgtcttcacccccaccattgaggcccgcacagcccagtccaccccctccgcccctccccagaaggtgatgtgtgtgagcatgggctccaccacggtccgggtaagttgggtcccgccgcctgccgacagccgcaacggcgttatcacccagtactccgtggcctacgaggcggtggacggcgaggaccgcgggcggcatgtggtggatggcatcagccgtgagcactccagctgggacctggtgggcctggagaagtggacggagtaccgggtgtgggtgcgggcacacacagacgtgggccccggccccgagagcagcccggtgctggtgcgcaccgatgaggacgtgcccagcgggcctccgcggaaggtggaggtggagccactgaactccactgctgtgcatgtctactggaagctgcctgtccccagcaagcagcatggccagatccgcggctaccaggtcacctacgtgcggctggagaatggcgagccccgtggactccccatcatccaagacgtcatgctagccgaggcccagtggcggccagaggagtccgaggactatgaaaccactatcagcggcctgaccccggagaccacctactccgttactgttgctgcctataccaccaagggggatggtgcccgcagcaagcccaaaattgtcactacaacaggtgcaggtgagtgaggggtcaggacggacctgagggtggggcagcaggagggcagcgccagagcccagcccgtggtccttcagtcccaggccggcccaccatgatgatcagcaccacggccatgaacactgcgctgctccagtggcacccacccaaggaactgcctggcgagctgctgggctaccggctgcagtactgccgggccgacgaggcgcggcccaacaccatagatttcggcaaggatgaccagcacttcacagtcaccggcctgcacaaggggaccacctacatcttccggcttgctgccaagaaccgggctggcttgggtgaggagttcgagaaggagatcaggacccccgaggacctgcccagcggcttcccccaaaacctgcatgtgacaggactgaccacgtctaccacagaactggcctgggacccgccagtgctggcggagaggaacgggcgcatcatcagctacaccgtggtgttccgagacatcaacagccaacaggagctgcagaacatcacgacagacacccgctttacccttactggcctcaagccagacaccacttacgacatcaaggtccgcgcatggaccagcaaaggctctggcccactcagccccagcatccagtcccggaccatgccggtggagcaagtgtttgccaagaacttccgggtggcggctgcaatgaagacgtctgtgctgctcagctgggaggttcccgactcctataagtcagctgtgccctttaagattctgtacaatgggcagagtgtggaggtggacgggcactcgatgcggaagctgatcgcagacctgcagcccaacacagagtactcgtttgtgctgatgaaccgtggcagcagcgcagggggcctgcagcacctggtgtccatccgcacagcccccgacctcctgcctcacaagccgctgcctgcctctgcctacatagaggacggccgcttcgatctctccatgccccatgtgcaagacccctcgcttgtcaggtggttctacattgttgtggtacccattgaccgtgtgggcgggagcatgctgacgccaaggtggagcacacccgaggaactggagctggacgagcttctagaagccatcgagcaaggcggagaggagcagcggcggcggcggcggcaggcagaacgtctgaagccatatgtggctgctcaactggatgtgctcccggagacctttaccttgggggacaagaagaactaccggggcttctacaaccggcccctgtctccggacttgagctaccagtgctttgtgcttgcctccttgaaggaacccatggaccagaagcgctatgcctccagcccctactcggatgagatcgtggtccaggtgacaccagcccagcagcaggaggagccggagatgctgtgggtgacgggtcccgtgctggcagtcatcctcatcatcctcattgtcatcgccatcctcttgttcaaaaggaaaaggacccactctccgtcctctaaggatgagcagtcgatcggactgaaggactccttgctggcccactcctctgaccctgtggagatgcggaggctcaactaccagaccccaggtatgcgagaccacccacccatccccatcaccgacctggcggacaacatcgagcgcctcaaagccaacgatggcctcaagttctcccaggagtatgagtccatcgaccctggacagcagttcacgtgggagaattcaaacctggaggtgaacaagcccaagaaccgctatgcgaatgtcatcgcctacgaccactctcgagtcatccttacctctatcgatggcgtccccgggagtgactacatcaatgccaactacatcgatggctaccgcaagcagaatgcctacatcgccacgcagggccccctgcccgagaccatgggcgatttctggagaatggtgtgggaacagcgcacggccactgtggtcatgatgacacggctggaggagaagtcccgggtaaaatgtgatcagtactggccagcccgtggcaccgagacctgtggccttattcaggtgaccctgttggacacagtggagctggccacatacactgtgcgcaccttcgcactccacaagagtggctccagtgagaagcgcgagctgcgtcagtttcagttcatggcctggccagaccatggagttcctgagtacccaactcccatcctggccttcctacgacgggtcaaggcctgcaaccccctagacgcagggcccatggtggtgcactgcagcgcgggcgtgggccgcaccggctgcttcatcgtgattgatgccatgttggagcggatgaagcacgagaagacggtggacatctatggccacgtgacctgcatgcgatcacagaggaactacatggtgcagacggaggaccagtacgtgttcatccatgaggcgctgctggaggctgccacgtgcggccacacagaggtgcctgcccgcaacctgtatgcccacatccagaagctgggccaagtgcctccaggggagagtgtgaccgccatggagctcgagttcaagttgctggccagctccaaggcccacacgtcccgcttcatcagcgccaacctgccctgcaacaagttcaagaaccggctggtgaacatcatgccctacgaattgacccgtgtgtgtctgcagcccatccgtggtgtggagggctctgactacatcaatgccagcttcctggatggttatagacagcagaaggcctacatagctacacaggggcctctggcagagagcaccgaggacttctggcgcatgctatgggagcacaattccaccatcatcgtcatgctgaccaagcttcgggagatgggcagggagaaatgccaccagtactggccagcagagcgctctgctcgctaccagtactttgttgttgacccgatggctgagtacaacatgccccagtatatcctgcgtgagttcaaggtcacggatgcccgggatgggcagtcaaggacaatccggcagttccagttcacagactggccagagcagggcgtgcccaagacaggcgagggattcattgacttcatcgggcaggtgcataagaccaaggagcagtttggacaggatgggcctatcacggtgcactgcagtgctggcgtgggccgcaccggggtgttcatcactctgagcatcgtcctggagcgcatgcgctatgagggcgtggtcgacatgtttcagaccgtgaagaccctgcgtacacagcgtcctgccatggtgcagacagaggaccagtatcagctgtgctaccgtgcggccctggagtacctcggcagctttgaccactatgcaacgtaactaccgctcccctctcctccgccacccccgccgtggggctccggaggggacccagctcctctgagccataccgaccatcgtccagccctcctacgcagatgctgtcactggcagagcacagcccacggggatcacagcgtttcaggaacgttgccacaccaatcagagagcctagaacatccctgggcaagtggatggcccagcaggcaggcactgtggcccttctgtccaccagacccacctggagcccgcttcaagctctctgttgcgctcccgcatttctcatgcttcttctcatggggtggggttggggcaaagcctcctttttaatacattaagtggggtagactgagggattttagcctcttccctctgatttttcctttcgcgaatccgtatctgcagaatgggccactgtaggggttggggtttattttgttttgtttttttttttcttgagttcactttggatccttattttgtatgacttctgctgaaggacagaacattgccttcctcgtgcagagctggggctgccagcctgagcggaggctcggccgtgggccgggaggcagtgctgatccggctgctcctccagcccttcagacgagatcctgtttcagctaaatgcagggaaactcaatgtttttttaagttttgttttccctttaaagcctttttttaggccacattgacagtggtgggcggggagaagatagggaacactcatccctggtcgtctatcccagtgtgtgtttaacattcacagcccagaaccacagatgtgtctgggagagcctggcaaggcattcctcatcaccatcgtgtttgcaaaggttaaaacaaaaacaaaaaaccacaaaaataaaaaacaaaaaaaacaaaaaacccaagaaaaaaaaaaagagtcagcccttggcttctgcttcaaaccctcaagaggggaagcaactccgtgtgcctggggttcccgagggagctgctggctgacctgggcccacagagcctggctttggtccccagcattgcagtatggtgtggtgtttgtaggctgtggggtctggctgtgtggccaaggtgaatagcacaggttagggtgtgtgccacaccccatgcacctcagggccaagcgggggcgtggctggcctttcaggtccaggccagtgggcctggtagcacatgtctgtcctcagagcaggggccagatgattttcctccctggtttgcagctgttttcaaagcccccgataatcgctcttttccactccaagatgccctcataaaccaatgtggcaagactactggacttctatcaatggtactctaatcagtccttattatcccagcttgctgaggggcagggagagcgcctcttcctctgggcagcgctatctagataggtaagtgggggcggggaagggtgcatagctgttttagctgagggacgtggtgccgacgtccccaaacctagctaggctaagtcaagatcaacattccagggttggtaatgttggatgatgaaacattcatttttaccttgtggatgctagtgctgtagagttcactgttgtacacagtctgttttctatttgttaagaaaaactacagcatcattgcataattcttgatggtaataaatttgaataatcagatttcttacaaa

SEQ ID NO: 451442 - DNA, 9327 bp, Homo sapiens
  misc_feature (817)..(817): n is a, c, g, or t
  misc_feature (2594)..(2594): n is a, c, g, or t
cgtatataaacttggtcatgtggcttggttttaaaacagttcccttgactgtaattggcaggtgatagcatctacagcatggaaacctgcacctagtaggtgcttaagcatagcttcccttcccatgaagaggaggagacagggcacccactggccgagaggacaggagagatttagttcattaaggctgctcctctgtgctgcccccaccccgcttctgtggcaggcctggacctgatctgcaaacagacttgcctgcctgtgcctgtccctgaggcccatctccagagcagagggagggcatgcaccgctgggctgggtggtggtcctggctgagcctcctgctctcaccttggaccatttgaggtgcgtgctcagagagtcctttgttgccatgagacacttgccagccatgtcccgggatccacctgttctgccacaagaactgtgtctgtgacatgctgtcatcattggtagagactcctggcactagaacagatgacagaaacccacttataccagcgtaagcaaaacaaggaagtcctgtgttacaaatctgaaaagtgtagtagatttggtgctgggcagggctagatccaggtacttaaacaggttggccaggcatttgtctgtctgtttctgagctctcctctcctatgtcgacatctttgttctcaagcagcttttcctgtgtgttgggagaagccatccccagctgctctaagcttagctacctcagtagagagagaaggtcgcttttctaatagtttctgcggaagtccaaaggctgtttctccatagtcagatctgggtcacncaccccatgtatgaagaatgcaggtagaagtggtttccttaaagacaatgggaatgctcattgatttgaggagaaagcagaaccctgaatgtctacaagatactctcatgccctaggtgaacctggggacacagatccagcccaccagcacctgtcaggcctggtctctggggctgccagggtttgggttctgtctggagcaccagagtaaggcaggctgtggaaggagttgaagcaagtgctaaattaggtagggtctcttgggctgggcagaggagtcactgggagccatgcaggagcttgttaaacagggagtggcatcagatttgtgccagctgtttgtggagggcccgtgagcaggaattggggcagtggacaacaaggcaggaggactgacgcagaacacattgcagcaactcagggaaggatgatgatggcttggactttggtggtggcagttgcctgtgtgtatggagagaaatacatggatttggaagatatgttatgccacgctgttgacaggacctggtgacttgctgaatgtctgatctctgggtctaagttttgacccctgtatggtgaggtcagacgttggaccgggaggtctctgaagttgcttctagctctagttctgtgatttggggctgtgtgagcagcatagtctggtgcttatagtggagatgctccttatgtggtgctgtggggtctttgcatgcctgggccccccagcgagggtcctcagagaccagtgctctcagcagtgctcttgggtactgactagcctgctgcctgccgcctttggccctgcgtgtgagagtgcccgtgtaggacacaccctggcctctgctcaccagctgcatggcccatctgcatgccagacatgcctgcccacggctgggtttcatcacctcccttccctctgcatgctcctgtgtctgtgtcaagcttccaacttcgggggcgggtggttctaggctgtaccctggactgagaagctcagaacagcttctggtcaggggagtccaaggctggaggtcgtggccaggcacagccacagccacccctccccttgagacccttgtttgttggcgcaggaagccgtctgttcggcgccctcatcatgttactgccatcgtcatgcccatcctgcccgcagaccatgtccctggcctgccctgacccctgcccctccccagtcctcctgagggcagcccttttgcttgggttcccaggttgtgccctgagcatggctgagaccctggcaggcggccctgctgcttgccttatttcttcccctcaggccatggcctggaggtggaggcagtgactccacggcaggtggctgtgtccctctggactggccttctgctctgcccagccatgctctgaggaccctccaccctagggcctgctttctctccttggtgctccagccaggagcaggcagagataggccctggagaacaccctgggttgtggtcctgaccaggcctggaccttgtactgagtccctgtgtgaccctgggcagacaggaccttcctgacaggcctcagtttcctaggctataaaatgggagcttggttgcaagatctctcattgagtaagtcatcgtgctccagacagtccctgagtgtgggggccacttctaggctggaagtgggtggggtgggagtggatgatgagctggggtctggcggtgccacccctcctgtctctgagcatgggtttggctctgaccagaggggcttcctgaatgaggggcccctgcccttccangcagtcgtgtgtcctgcccggcctgtgagtgcctctctccctcctcctgcagtgcgccgcgtggctcctcgtttctccatccctcccagcagccaggaggtgatgccaggcggcagcgtgaacctgacatgcgtggcagtgggtgcacccatgccctacgtgaagtggatgatgggggccgaggagctcaccaaggaggatgagatgccagttggccgcaacgtcctggagctcagcaatgtcgtacgctctgccaactacacctgtgtggccatctcctcgctgggcatgatcgaggccacagcccaggtcacagtgaaagctcttccaaagcctccgattgatcttgtggtgacagagacaactgccaccagtgtcaccctcacctgggactctgggaactcggagcctgtaacctactatggcatccagtaccgcgcagcgggcacggagggcccctttcaggaggtggatggtgtggccaccacccgctacagcattggcggcctcagccctttctcggaatatgccttccgcgtgctggcggtgaacagcatcgggcgagggccgcccagcgaggcagtgcgggcacgcacgggagaacaggcgccctccagcccaccgcgccgcgtgcaggcacgcatgctgagcgccagcaccatgctggtgcagtgggagcctcccgaggagcccaacggcctggtgcggggataccgcgtctactatactccggactcccgccgccccccgaacgcctggcacaagcacaacaccgacgcggggctcctcacgaccgtgggcagcctgctgcctggcatcacctacagcctgcgcgtgcttgccttcaccgccgtgggcgatggccctcccagccccaccatccaggtcaagacgcagcagggagtgcctgcccagcccgcggacttccaggccgaggtggagtcggacaccaggatccagctctcgtggctgctgccccctcaggagcggatcatcatgtatgaactggtgtactgggcggcagaggacgaagaccaacagcacaaggtcaccttcgacccaacctcctcctacacactagaggacctgaagcctgacacactctaccgcttccagctggctgcacgctcggatatgggggtgggcgtcttcacccccaccattgaggcccgcacagcccagtccaccccctccgcccctccccagaaggtgatgtgtgtgagcatgggctccaccacggtccgggtaagttgggtcccgccgcctgccgacagccgcaacggcgttatcacccagtactccgtggcctacgaggcggtggacggcgaggaccgcgggcggcatgtggtggatggcatcagccgtgagcactccagctgggacctggtgggcctggagaagtggacggagtaccgggtgtgggtgcgggcacacacagacgtgggccccggccccgagagcagcccggtgctggtgcgcaccgatgaggacgtgcccagcgggcctccgcggaaggtggaggtggagccactgaactccactgctgtgcatgtctactggaagctgcctgtccccagcaagcagcatggccagatccgcggctaccaggtcacctacgtgcggctggagaatggcgagccccgtggactccccatcatccaagacgtcatgctagccgaggcccaggaaaccactatcagcggcctgaccccggagaccacctactccgttactgttgctgcctataccaccaagggggatggtgcccgcagcaagcccaaaattgtcactacaacaggtgcagtcccaggccggcccaccatgatgatcagcaccacggccatgaacactgcgctgctccagtggcacccacccaaggaactgcctggcgagctgctgggctaccggctgcagtactgccgggccgacgaggcgcggcccaacaccatagatttcggcaaggatgaccagcacttcacagtcaccggcctgcacaaggggaccacctacatcttccggcttgctgccaagaaccgggctggcttgggtgaggagttcgagaaggagatcaggacccccgaggacctgcccagcggcttcccccaaaacctgcatgtgacaggactgaccacgtctaccacagaactggcctgggacccgccagtgctggcggagaggaacgggcgcatcatcagctacaccgtggtgttccgagacatcaacagccaacaggagctgcagaacatcacgacagacacccgctttacccttactggcctcaagccagacaccacttacgacatcaaggtccgcgcatggaccagcaaaggctctggcccactcagccccagcatccagtcccggaccatgccggtggagcaagtgtttgccaagaacttccgggtggcggctgcaatgaagacgtctgtgctgctcagctgggaggttcccgactcctataagtcagctgtgccctttaagattctgtacaatgggcagagtgtggaggtggacgggcactcgatgcggaagctgatcgcagacctgcagcccaacacagagtactcgtttgtgctgatgaaccgtggcagcagcgcagggggcctgcagcacctggtgtccatccgcacagcccccgacctcctgcctcacaagccgctgcctgcctctgcctacatagaggacggccgcttcgatctctccatgccccatgtgcaagacccctcgcttgtcaggtggttctacattgttgtggtacccattgaccgtgtgggcgggagcatgctgacgccaaggtggagcacacccgaggaactggagctggacgagcttctagaagccatcgagcaaggcggagaggagcagcggcggcggcggcggcaggcagaacgtctgaagccatatgtggctgctcaactggatgtgctcccggagacctttaccttgggggacaagaagaactaccggggcttctacaaccggcccctgtctccggacttgagctaccagtgctttgtgcttgcctccttgaaggaacccatggaccagaagcgctatgcctccagcccctactcggatgagatcgtggtccaggtgacaccagcccagcagcaggaggagccggagatgctgtgggtgacgggtcccgtgctggcagtcatcctcatcatcctcattgtcatcgccatcctcttgttcaaaaggaaaaggacccactctccgtcctctaaggatgagcagtcgatcggactgaaggactccttgctggcccactcctctgaccctgtggagatgcggaggctcaactaccagaccccaggtatgcgagaccacccacccatccccatcaccgacctggcggacaacatcgagcgcctcaaagccaacgatggcctcaagttctcccaggagtatgagtccatcgaccctggacagcagttcacgtgggagaattcaaacctggaggtgaacaagcccaagaaccgctatgcgaatgtcatcgcctacgaccactctcgagtcatccttacctctatcgatggcgtccccgggagtgactacatcaatgccaactacatcgatggctaccgcaagcagaatgcctacatcgccacgcagggccccctgcccgagaccatgggcgatttctggagaatggtgtgggaacagcgcacggccactgtggtcatgatgacacggctggaggagaagtcccgggtaaaatgtgatcagtactggccagcccgtggcaccgagacctgtggccttattcaggtgaccctgttggacacagtggagctggccacatacactgtgcgcaccttcgcactccacaagagtggctccagtgagaagcgcgagctgcgtcagtttcagttcatggcctggccagaccatggagttcctgagtacccaactcccatcctggccttcctacgacgggtcaaggcctgcaaccccctagacgcagggcccatggtggtgcactgcagcgcgggcgtgggccgcaccggctgcttcatcgtgattgatgccatgttggagcggatgaagcacgagaagacggtggacatctatggccacgtgacctgcatgcgatcacagaggaactacatggtgcagacggaggaccagtacgtgttcatccatgaggcgctgctggaggctgccacgtgcggccacacagaggtgcctgcccgcaacctgtatgcccacatccagaagctgggccaagtgcctccaggggagagtgtgaccgccatggagctcgagttcaagttgctggccagctccaaggcccacacgtcccgcttcatcagcgccaacctgccctgcaacaagttcaagaaccggctggtgaacatcatgccctacgaattgacccgtgtgtgtctgcagcccatccgtggtgtggagggctctgactacatcaatgccagcttcctggatggttatagacagcagaaggcctacatagctacacaggggcctctggcagagagcaccgaggacttctggcgcatgctatgggagcacaattccaccatcatcgtcatgctgaccaagcttcgggagatgggcagggagaaatgccaccagtactggccagcagagcgctctgctcgctaccagtactttgttgttgacccgatggctgagtacaacatgccccagtatatcctgcgtgagttcaaggtcacggatgcccgggatgggcagtcaaggacaatccggcagttccagttcacagactggccagagcagggcgtgcccaagacaggcgagggattcattgacttcatcgggcaggtgcataagaccaaggagcagtttggacaggatgggcctatcacggtgcactgcagtgctggcgtgggccgcaccggggtgttcatcactctgagcatcgtcctggagcgcatgcgctatgagggcgtggtcgacatgtttcagaccgtgaagaccctgcgtacacagcgtcctgccatggtgcagacagaggaccagtatcagctgtgctaccgtgcggccctggagtacctcggcagctttgaccactatgcaacgtaactaccgctcccctctcctccgccacccccgccgtggggctccggaggggacccagctcctctgagccataccgaccatcgtccagccctcctacgcagatgctgtcactggcagagcacagcccacggggatcacagcgtttcaggaacgttgccacaccaatcagagagcctagaacatccctgggcaagtggatggcccagcaggcaggcactgtggcccttctgtccaccagacccacctggagcccgcttcaagctctctgttgcgctcccgcatttctcatgcttcttctcatggggtggggttggggcaaagcctcctttttaatacattaagtggggtagactgagggattttagcctcttccctctgatttttcctttcgcgaatccgtatctgcagaatgggccactgtaggggttggggtttattttgttttgtttttttttttcttgagttcactttggatccttattttgtatgacttctgctgaaggacagaacattgccttcctcgtgcagagctggggctgccagcctgagcggaggctcggccgtgggccgggaggcagtgctgatccggctgctcctccagcccttcagacgagatcctgtttcagctaaatgcagggaaactcaatgtttttttaagttttgttttccctttaaagcctttttttaggccacattgacagtggtgggcggggagaagatagggaacactcatccctggtcgtctatcccagtgtgtgtttaacattcacagcccagaaccacagatgtgtctgggagagcctggcaaggcattcctcatcaccatcgtgtttgcaaaggttaaaacaaaaacaaaaaaccacaaaaataaaaaacaaaaaaaacaaaaaacccaagaaaaaaaaaaagagtcagcccttggcttctgcttcaaaccctcaagaggggaagcaactccgtgtgcctggggttcccgagggagctgctggctgacctgggcccacagagcctggctttggtccccagcattgcagtatggtgtggtgtttgtaggctgtggggtctggctgtgtggccaaggtgaatagcacaggttagggtgtgtgccacaccccatgcacctcagggccaagcgggggcgtggctggcctttcaggtccaggccagtgggcctggtagcacatgtctgtcctcagagcaggggccagatgattttcctccctggtttgcagctgttttcaaagcccccgataatcgctcttttccactccaagatgccctcataaaccaatgtggcaagactactggacttctatcaatggtactctaatcagtccttattatcccagcttgctgaggggcagggagagcgcctcttcctctgggcagcgctatctagataggtaagtgggggcggggaagggtgcatagctgttttagctgagggacgtggtgccgacgtccccaaacctagctaggctaagtcaagatcaacattccagggttggtaatgttggatgatgaaacattcatttttaccttgtggatgctagtgctgtagagttcactgttgtacacagtctgttttctatttgttaagaaaaactacagcatcattgcataattcttgatggtaataaatttgaataatcagatttcttacaaa

SEQ ID NO: 451443 - DNA, 5581 bp, Homo sapiens
cgggagcggcgggagcggtggcggcggcagaggcggcggctccagcttcggctccggctcgggctcgggctccggctccggctccggctccgggtaagttgggtcccgccgcctgccgacagccgcaacggcgttatcacccagtactccgtggcctacgaggcggtggacggcgaggaccgcgggcggcatgtggtggatggcatcagccgtgagcactccagctgggacctggtgggcctggagaagtggacggagtaccgggtgtgggtgcgggcacacacagacgtgggccccggccccgagagcagcccggtgctggtgcgcaccgatgaggacgtgcccagcgggcctccgcggaaggtggaggtggagccactgaactccactgctgtgcatgtctactggaagctgcctgtccccagcaagcagcatggccagatccgcggctaccaggtcacctacgtgcggctggagaatggcgagccccgtggactccccatcatccaagacgtcatgctagccgaggcccaggaaaccactatcagcggcctgaccccggagaccacctactccgttactgttgctgcctataccaccaagggggatggtgcccgcagcaagcccaaaattgtcactacaacaggtgcagtcccaggccggcccaccatgatgatcagcaccacggccatgaacactgcgctgctccagtggcacccacccaaggaactgcctggcgagctgctgggctaccggctgcagtactgccgggccgacgaggcgcggcccaacaccatagatttcggcaaggatgaccagcacttcacagtcaccggcctgcacaaggggaccacctacatcttccggcttgctgccaagaaccgggctggcttgggtgaggagttcgagaaggagatcaggacccccgaggacctgcccagcggcttcccccaaaacctgcatgtgacaggactgaccacgtctaccacagaactggcctgggacccgccagtgctggcggagaggaacgggcgcatcatcagctacaccgtggtgttccgagacatcaacagccaacaggagctgcagaacatcacgacagacacccgctttacccttactggcctcaagccagacaccacttacgacatcaaggtccgcgcatggaccagcaaaggctctggcccactcagccccagcatccagtcccggaccatgccggtggagcaagtgtttgccaagaacttccgggtggcggctgcaatgaagacgtctgtgctgctcagctgggaggttcccgactcctataagtcagctgtgccctttaagattctgtacaatgggcagagtgtggaggtggacgggcactcgatgcggaagctgatcgcagacctgcagcccaacacagagtactcgtttgtgctgatgaaccgtggcagcagcgcagggggcctgcagcacctggtgtccatccgcacagcccccgacctcctgcctcacaagccgctgcctgcctctgcctacatagaggacggccgcttcgatctctccatgccccatgtgcaagacccctcgcttgtcaggtggttctacattgttgtggtacccattgaccgtgtgggcgggagcatgctgacgccaaggtggagcacacccgaggaactggagctggacgagcttctagaagccatcgagcaaggcggagaggagcagcggcggcggcggcggcaggcagaacgtctgaagccatatgtggctgctcaactggatgtgctcccggagacctttaccttgggggacaagaagaactaccggggcttctacaaccggcccctgtctccggacttgagctaccagtgctttgtgcttgcctccttgaaggaacccatggaccagaagcgctatgcctccagcccctactcggatgagatcgtggtccaggtgacaccagcccagcagcaggaggagccggagatgctgtgggtgacgggtcccgtgctggcagtcatcctcatcatcctcattgtcatcgccatcctcttgttcaaaaggaaaaggacccactctccgtcctctaaggatgagcagtcgatcggactgaaggactccttgctggcccactcctctgaccctgtggagatgcggaggctcaactaccagaccccaggtatgcgagaccacccacccatccccatcaccgacctggcggacaacatcgagcgcctcaaagccaacgatggcctcaagttctcccaggagtatgagtccatcgaccctggacagcagttcacgtgggagaattcaaacctggaggtgaacaagcccaagaaccgctatgcgaatgtcatcgcctacgaccactctcgagtcatccttacctctatcgatggcgtccccgggagtgactacatcaatgccaactacatcgatggctaccgcaagcagaatgcctacatcgccacgcagggccccctgcccgagaccatgggcgatttctggagaatggtgtgggaacagcgcacggccactgtggtcatgatgacacggctggaggagaagtcccgggtaaaatgtgatcagtactggccagcccgtggcaccgagacctgtggccttattcaggtgaccctgttggacacagtggagctggccacatacactgtgcgcaccttcgcactccacaagagtggctccagtgagaagcgcgagctgcgtcagtttcagttcatggcctggccagaccatggagttcctgagtacccaactcccatcctggccttcctacgacgggtcaaggcctgcaaccccctagacgcagggcccatggtggtgcactgcagcgcgggcgtgggccgcaccggctgcttcatcgtgattgatgccatgttggagcggatgaagcacgagaagacggtggacatctatggccacgtgacctgcatgcgatcacagaggaactacatggtgcagacggaggaccagtacgtgttcatccatgaggcgctgctggaggctgccacgtgcggccacacagaggtgcctgcccgcaacctgtatgcccacatccagaagctgggccaagtgcctccaggggagagtgtgaccgccatggagctcgagttcaagttgctggccagctccaaggcccacacgtcccgcttcatcagcgccaacctgccctgcaacaagttcaagaaccggctggtgaacatcatgccctacgaattgacccgtgtgtgtctgcagcccatccgtggtgtggagggctctgactacatcaatgccagcttcctggatggttatagacagcagaaggcctacatagctacacaggggcctctggcagagagcaccgaggacttctggcgcatgctatgggagcacaattccaccatcatcgtcatgctgaccaagcttcgggagatgggcagggagaaatgccaccagtactggccagcagagcgctctgctcgctaccagtactttgttgttgacccgatggctgagtacaacatgccccagtatatcctgcgtgagttcaaggtcacggatgcccgggatgggcagtcaaggacaatccggcagttccagttcacagactggccagagcagggcgtgcccaagacaggcgagggattcattgacttcatcgggcaggtgcataagaccaaggagcagtttggacaggatgggcctatcacggtgcactgcagtgctggcgtgggccgcaccggggtgttcatcactctgagcatcgtcctggagcgcatgcgctatgagggcgtggtcgacatgtttcagaccgtgaagaccctgcgtacacagcgtcctgccatggtgcagacagaggaccagtatcagctgtgctaccgtgcggccctggagtacctcggcagctttgaccactatgcaacgtaactaccgctcccctctcctccgccacccccgccgtggggctccggaggggacccagctcctctgagccataccgaccatcgtccagccctcctacgcagatgctgtcactggcagagcacagcccacggggatcacagcgtttcaggaacgttgccacaccaatcagagagcctagaacatccctgggcaagtggatggcccagcaggcaggcactgtggcccttctgtccaccagacccacctggagcccgcttcaagctctctgttgcgctcccgcatttctcatgcttcttctcatggggtggggttggggcaaagcctcctttttaatacattaagtggggtagactgagggattttagcctcttccctctgatttttcctttcgcgaatccgtatctgcagaatgggccactgtaggggttggggtttattttgttttgtttttttttttcttgagttcactttggatccttattttgtatgacttctgctgaaggacagaacattgccttcctcgtgcagagctggggctgccagcctgagcggaggctcggccgtgggccgggaggcagtgctgatccggctgctcctccagcccttcagacgagatcctgtttcagctaaatgcagggaaactcaatgtttttttaagttttgttttccctttaaagcctttttttaggccacattgacagtggtgggcggggagaagatagggaacactcatccctggtcgtctatcccagtgtgtgtttaacattcacagcccagaaccacagatgtgtctgggagagcctggcaaggcattcctcatcaccatcgtgtttgcaaaggttaaaacaaaaacaaaaaaccacaaaaataaaaaacaaaaaaaacaaaaaacccaagaaaaaaaaaaagagtcagcccttggcttctgcttcaaaccctcaagaggggaagcaactccgtgtgcctggggttcccgagggagctgctggctgacctgggcccacagagcctggctttggtccccagcattgcagtatggtgtggtgtttgtaggctgtggggtctggctgtgtggccaaggtgaatagcacaggttagggtgtgtgccacaccccatgcacctcagggccaagcgggggcgtggctggcctttcaggtccaggccagtgggcctggtagcacatgtctgtcctcagagcaggggccagatgattttcctccctggtttgcagctgttttcaaagcccccgataatcgctcttttccactccaagatgccctcataaaccaatgtggcaagactactggacttctatcaatggtactctaatcagtccttattatcccagcttgctgaggggcagggagagcgcctcttcctctgggcagcgctatctagataggtaagtgggggcggggaagggtgcatagctgttttagctgagggacgtggtgccgacgtccccaaacctagctaggctaagtcaagatcaacattccagggttggtaatgttggatgatgaaacattcatttttaccttgtggatgctagtgctgtagagttcactgttgtacacagtctgttttctatttgttaagaaaaactacagcatcattgcataattcttgatggtaataaatttgaataatcagatttcttacaaa

SEQ ID NO: 451444 - DNA, 3970 bp, Homo sapiens
  misc_feature (33)..(33): n is a, c, g, or t
  misc_feature (35)..(35): n is a, c, g, or t
  misc_feature (43)..(43): n is a, c, g, or t
cggctgatcttgatggatccctataggcgctangntggagcanccgaggaactggagctggacgagcttctagaagccatcgagcaaggcggagaggagcagcggcggcggcggcggcaggcagaacgtctgaagccatatgtggctgctcaactggatgtgctcccggagacctttaccttgggggacaagaagaactaccggggcttctacaaccggcccctgtctccggacttgagctaccagtgctttgtgcttgcctccttgaaggaacccatggaccagaagcgctatgcctccagcccctactcggatgagatcgtggtccaggtgacaccagcccagcagcaggaggagccggagatgctgtgggtgacgggtcccgtgctggcagtcatcctcatcatcctcattgtcatcgccatcctcttgttcaaaaggaaaaggacccactctccgtcctctaaggatgagcagtcgatcggactgaaggactccttgctggcccactcctctgaccctgtggagatgcggaggctcaactaccagaccccaggtatgcgagaccacccacccatccccatcaccgacctggcggacaacatcgagcgcctcaaagccaacgatggcctcaagttctcccaggagtatgagtccatcgaccctggacagcagttcacgtgggagaattcaaacctggaggtgaacaagcccaagaaccgctatgcgaatgtcatcgcctacgaccactctcgagtcatccttacctctatcgatggcgtccccgggagtgactacatcaatgccaactacatcgatggctaccgcaagcagaatgcctacatcgccacgcagggccccctgcccgagaccatgggcgatttctggagaatggtgtgggaacagcgcacggccactgtggtcatgatgacacggctggaggagaagtcccgggtaaaatgtgatcagtactggccagcccgtggcaccgagacctgtggccttattcaggtgaccctgttggacacagtggagctggccacatacactgtgcgcaccttcgcactccacaagagtggctccagtgagaagcgcgagctgcgtcagtttcagttcatggcctggccagaccatggagttcctgagtacccaactcccatcctggccttcctacgacgggtcaaggcctgcaaccccctagacgcagggcccatggtggtgcactgcagcgcgggcgtgggccgcaccggctgcttcatcgtgattgatgccatgttggagcggatgaagcacgagaagacggtggacatctatggccacgtgacctgcatgcgatcacagaggaactacatggtgcagacggaggaccagtacgtgttcatccatgaggcgctgctggaggctgccacgtgcggccacacagaggtgcctgcccgcaacctgtatgcccacatccagaagctgggccaagtgcctccaggggagagtgtgaccgccatggagctcgagttcaagttgctggccagctccaaggcccacacgtcccgcttcatcagcgccaacctgccctgcaacaagttcaagaaccggctggtgaacatcatgccctacgaattgacccgtgtgtgtctgcagcccatccgtggtgtggagggctctgactacatcaatgccagcttcctggatggttatagacagcagaaggcctacatagctacacaggggcctctggcagagagcaccgaggacttctggcgcatgctatgggagcacaattccaccatcatcgtcatgctgaccaagcttcgggagatgggcagggagaaatgccaccagtactggccagcagagcgctctgctcgctaccagtactttgttgttgacccgatggctgagtacaacatgccccagtatatcctgcgtgagttcaaggtcacggatgcccgggatgggcagtcaaggacaatccggcagttccagttcacagactggccagagcagggcgtgcccaagacaggcgagggattcattgacttcatcgggcaggtgcataagaccaaggagcagtttggacaggatgggcctatcacggtgcactgcagtgctggcgtgggccgcaccggggtgttcatcactctgagcatcgtcctggagcgcatgcgctatgagggcgtggtcgacatgtttcagaccgtgaagaccctgcgtacacagcgtcctgccatggtgcagacagaggaccagtatcagctgtgctaccgtgcggccctggagtacctcggcagctttgaccactatgcaacgtaactaccgctcccctctcctccgccacccccgccgtggggctccggaggggacccagctcctctgagccataccgaccatcgtccagccctcctacgcagatgctgtcactggcagagcacagcccacggggatcacagcgtttcaggaacgttgccacaccaatcagagagcctagaacatccctgggcaagtggatggcccagcaggcaggcactgtggcccttctgtccaccagacccacctggagcccgcttcaagctctctgttgcgctcccgcatttctcatgcttcttctcatggggtggggttggggcaaagcctcctttttaatacattaagtggggtagactgagggattttagcctcttccctctgatttttcctttcgcgaatccgtatctgcagaatgggccactgtaggggttggggtttattttgttttgtttttttttttcttgagttcactttggatccttattttgtatgacttctgctgaaggacagaacattgccttcctcgtgcagagctggggctgccagcctgagcggaggctcggccgtgggccgggaggcagtgctgatccggctgctcctccagcccttcagacgagatcctgtttcagctaaatgcagggaaactcaatgtttttttaagttttgttttccctttaaagcctttttttaggccacattgacagtggtgggcggggagaagatagggaacactcatccctggtcgtctatcccagtgtgtgtttaacattcacagcccagaaccacagatgtgtctgggagagcctggcaaggcattcctcatcaccatcgtgtttgcaaaggttaaaacaaaaacaaaaaaccacaaaaataaaaaacaaaaaaaacaaaaaacccaagaaaaaaaaaaagagtcagcccttggcttctgcttcaaaccctcaagaggggaagcaactccgtgtgcctggggttcccgagggagctgctggctgacctgggcccacagagcctggctttggtccccagcattgcagtatggtgtggtgtttgtaggctgtggggtctggctgtgtggccaaggtgaatagcacaggttagggtgtgtgccacaccccatgcacctcagggccaagcgggggcgtggctggcctttcaggtccaggccagtgggcctggtagcacatgtctgtcctcagagcaggggccagatgattttcctccctggtttgcagctgttttcaaagcccccgataatcgctcttttccactccaagatgccctcataaaccaatgtggcaagactactggacttctatcaatggtactctaatcagtccttattatcccagcttgctgaggggcagggagagcgcctcttcctctgggcagcgctatctagataggtaagtgggggcggggaagggtgcatagctgttttagctgagggacgtggtgccgacgtccccaaacctagctaggctaagtcaagatcaacattccagggttggtaatgttggatgatgaaacattcatttttaccttgtggatgctagtgctgtagagttcactgttgtacacagtctgttttctatttgttaagaaaaactacagcatcattgcataattcttgatggtaataaatttgaataatcagatttcttacaaa

SEQ ID NO: 451445 - DNA, 3580 bp, Homo sapiens
cctccgccatccctgtcgctacatgtgctgctgtctccatgccaccagttccaagtgctccatggtcacacatgttcacatgtgcacatacatgcgttggggctttctctgccacactgctcaagcctcacactaatgctgcctgtgtatgccctacctcccctaggtatgcgagaccacccacccatccccatcaccgacctggcggacaacatcgagcgcctcaaagccaacgatggcctcaagttctcccaggagtatgagtccatcgaccctggacagcagttcacgtgggagaattcaaacctggaggtgaacaagcccaagaaccgctatgcgaatgtcatcgcctacgaccactctcgagtcatccttacctctatcgatggcgtccccgggagtgactacatcaatgccaactacatcgatggctaccgcaagcagaatgcctacatcgccacgcagggccccctgcccgagaccatgggcgatttctggagaatggtgtgggaacagcgcacggccactgtggtcatgatgacacggctggaggagaagtcccgggtaaaatgtgatcagtactggccagcccgtggcaccgagacctgtggccttattcaggtgaccctgttggacacagtggagctggccacatacactgtgcgcaccttcgcactccacaagagtggctccagtgagaagcgcgagctgcgtcagtttcagttcatggcctggccagaccatggagttcctgagtacccaactcccatcctggccttcctacgacgggtcaaggcctgcaaccccctagacgcagggcccatggtggtgcactgcagcgcgggcgtgggccgcaccggctgcttcatcgtgattgatgccatgttggagcggatgaagcacgagaagacggtggacatctatggccacgtgacctgcatgcgatcacagaggaactacatggtgcagacggaggaccagtacgtgttcatccatgaggcgctgctggaggctgccacgtgcggccacacagaggtgcctgcccgcaacctgtatgcccacatccagaagctgggccaagtgcctccaggggagagtgtgaccgccatggagctcgagttcaagttgctggccagctccaaggcccacacgtcccgcttcatcagcgccaacctgccctgcaacaagttcaagaaccggctggtgaacatcatgccctacgaattgacccgtgtgtgtctgcagcccatccgtggtgtggagggctctgactacatcaatgccagcttcctggatggttatagacagcagaaggcctacatagctacacaggggcctctggcagagagcaccgaggacttctggcgcatgctatgggagcacaattccaccatcatcgtcatgctgaccaagcttcgggagatgggcagggagaaatgccaccagtactggccagcagagcgctctgctcgctaccagtactttgttgttgacccgatggctgagtacaacatgccccagtatatcctgcgtgagttcaaggtcacggatgcccgggatgggcagtcaaggacaatccggcagttccagttcacagactggccagagcagggcgtgcccaagacaggcgagggattcattgacttcatcgggcaggtgcataagaccaaggagcagtttggacaggatgggcctatcacggtgcactgcagtgctggcgtgggccgcaccggggtgttcatcactctgagcatcgtcctggagcgcatgcgctatgagggcgtggtcgacatgtttcagaccgtgaagaccctgcgtacacagcgtcctgccatggtgcagacagaggaccagtatcagctgtgctaccgtgcggccctggagtacctcggcagctttgaccactatgcaacgtaactaccgctcccctctcctccgccacccccgccgtggggctccggaggggacccagctcctctgagccataccgaccatcgtccagccctcctacgcagatgctgtcactggcagagcacagcccacggggatcacagcgtttcaggaacgttgccacaccaatcagagagcctagaacatccctgggcaagtggatggcccagcaggcaggcactgtggcccttctgtccaccagacccacctggagcccgcttcaagctctctgttgcgctcccgcatttctcatgcttcttctcatggggtggggttggggcaaagcctcctttttaatacattaagtggggtagactgagggattttagcctcttccctctgatttttcctttcgcgaatccgtatctgcagaatgggccactgtaggggttggggtttattttgttttgtttttttttttcttgagttcactttggatccttattttgtatgacttctgctgaaggacagaacattgccttcctcgtgcagagctggggctgccagcctgagcggaggctcggccgtgggccgggaggcagtgctgatccggctgctcctccagcccttcagacgagatcctgtttcagctaaatgcagggaaactcaatgtttttttaagttttgttttccctttaaagcctttttttaggccacattgacagtggtgggcggggagaagatagggaacactcatccctggtcgtctatcccagtgtgtgtttaacattcacagcccagaaccacagatgtgtctgggagagcctggcaaggcattcctcatcaccatcgtgtttgcaaaggttaaaacaaaaacaaaaaaccacaaaaataaaaaacaaaaaaaacaaaaaacccaagaaaaaaaaaaagagtcagcccttggcttctgcttcaaaccctcaagaggggaagcaactccgtgtgcctggggttcccgagggagctgctggctgacctgggcccacagagcctggctttggtccccagcattgcagtatggtgtggtgtttgtaggctgtggggtctggctgtgtggccaaggtgaatagcacaggttagggtgtgtgccacaccccatgcacctcagggccaagcgggggcgtggctggcctttcaggtccaggccagtgggcctggtagcacatgtctgtcctcagagcaggggccagatgattttcctccctggtttgcagctgttttcaaagcccccgataatcgctcttttccactccaagatgccctcataaaccaatgtggcaagactactggacttctatcaatggtactctaatcagtccttattatcccagcttgctgaggggcagggagagcgcctcttcctctgggcagcgctatctagataggtaagtgggggcggggaagggtgcatagctgttttagctgagggacgtggtgccgacgtccccaaacctagctaggctaagtcaagatcaacattccagggttggtaatgttggatgatgaaacattcatttttaccttgtggatgctagtgctgtagagttcactgttgtacacagtctgttttctatttgttaagaaaaactacagcatcattgcataattcttgatggtaataaatttgaataatcagatttcttacaaa

SEQ ID NO: 451446 - DNA, 7574 bp, Homo sapiens
  misc_feature (18)..(18): n is a, c, g, or t
atgtcggtactgcatttntccatggctatcaggaggcggcggcggcagaggagtgggagcagcggccctagcggcttgcggggggacatgcggaccgacggcccctggataggcggaaggagtggaggccctggtgcccggcccttggtgctgagtatccagcaagagtgaccggggtgaagaagcaaagactcggttgattgtcctgggctgtggctggctgtggagctagagccctggatggcccctgagccagccccagggaggacgatggtgccccttgtgcctgcactggtgatgcttggtttggtggcaggcgcccatggtgacagcaaacctgtcttcattaaagtccctgaggaccagactgggctgtcaggaggggtagcctccttcgtgtgccaagctacaggagaacccaagccgcgcatcacatggatgaagaaggggaagaaagtcagctcccagcgcttcgaggtcattgagtttgatgatggggcagggtcagtgcttcggatccagccattgcgggtgcagcgagatgaagccatctatgagtgtacagctactaacagcctgggtgagatcaacactagtgccaagctctcagtgctcgaagaggaacagctgccccctgggttcccttccatcgacatggggcctcagctgaaggtggtggagaaggcacgcacagccaccatgctatgtgccgcaggcggaaatccagaccctgagatttcttggttcaaggacttccttcctgtagaccctgccacgagcaacggccgcatcaagcagctgcgttcaggtgccttgcagatagagagcagtgaggaatccgaccaaggcaagtacgagtgtgtggcgaccaactcggcaggcacacgttactcagcccctgcgaacctgtatgtgcgagtgcgccgcgtggctcctcgtttctccatccctcccagcagccaggaggtgatgccaggcggcagcgtgaacctgacatgcgtggcagtgggtgcacccatgccctacgtgaagtggatgatgggggccgaggagctcaccaaggaggatgagatgccagttggccgcaacgtcctggagctcagcaatgtcgtacgctctgccaactacacctgtgtggccatctcctcgctgggcatgatcgaggccacagcccaggtcacagtgaaagctcttccaaagcctccgattgatcttgtggtgacagagacaactgccaccagtgtcaccctcacctgggactctgggaactcggagcctgtaacctactatggcatccagtaccgcgcagcgggcacggagggcccctttcaggaggtggatggtgtggccaccacccgctacagcattggcggcctcagccctttctcggaatatgccttccgcgtgctggcggtgaacagcatcgggcgagggccgcccagcgaggcagtgcgggcacgcacgggagaacaggcgccctccagcccaccgcgccgcgtgcaggcacgcatgctgagcgccagcaccatgctggtgcagtgggagcctcccgaggagcccaacggcctggtgcggggataccgcgtctactatactccggactcccgccgccccccgaacgcctggcacaagcacaacaccgacgcggggctcctcacgaccgtgggcagcctgctgcctggcatcacctacagcctgcgcgtgcttgccttcaccgccgtgggcgatggccctcccagccccaccatccaggtcaagacgcagcagggagtgcctgcccagcccgcggacttccaggccgaggtggagtcggacaccaggatccagctctcgtggctgctgccccctcaggagcggatcatcatgtatgaactggtgtactgggcggcagaggacgaagaccaacagcacaaggtcaccttcgacccaacctcctcctacacactagaggacctgaagcctgacacactctaccgcttccagctggctgcacgctcggatatgggggtgggcgtcttcacccccaccattgaggcccgcacagcccagtccaccccctccgcccctccccagaaggtgatgtgtgtgagcatgggctccaccacggtccgggtaagttgggtcccgccgcctgccgacagccgcaacggcgttatcacccagtactccgtggcctacgaggcggtggacggcgaggaccgcgggcggcatgtggtggatggcatcagccgtgagcactccagctgggacctggtgggcctggagaagtggacggagtaccgggtgtgggtgcgggcacacacagacgtgggccccggccccgagagcagcccggtgctggtgcgcaccgatgaggacgtgcccagcgggcctccgcggaaggtggaggtggagccactgaactccactgctgtgcatgtctactggaagctgcctgtccccagcaagcagcatggccagatccgcggctaccaggtcacctacgtgcggctggagaatggcgagccccgtggactccccatcatccaagacgtcatgctagccgaggcccaggaaaccactatcagcggcctgaccccggagaccacctactccgttactgttgctgcctataccaccaagggggatggtgcccgcagcaagcccaaaattgtcactacaacaggtgcagtcccaggccggcccaccatgatgatcagcaccacggccatgaacactgcgctgctccagtggcacccacccaaggaactgcctggcgagctgctgggctaccggctgcagtactgccgggccgacgaggcgcggcccaacaccatagatttcggcaaggatgaccagcacttcacagtcaccggcctgcacaaggggaccacctacatcttccggcttgctgccaagaaccgggctggcttgggtgaggagttcgagaaggagatcaggacccccgaggacctgcccagcggcttcccccaaaacctgcatgtgacaggactgaccacgtctaccacagaactggcctgggacccgccagtgctggcggagaggaacgggcgcatcatcagctacaccgtggtgttccgagacatcaacagccaacaggagctgcagaacatcacgacagacacccgctttacccttactggcctcaagccagacaccacttacgacatcaaggtccgcgcatggaccagcaaaggctctggcccactcagccccagcatccagtcccggaccatgccggtggagcaagtgtttgccaagaacttccgggtggcggctgcaatgaagacgtctgtgctgctcagctgggaggttcccgactcctataagtcagctgtgccctttaagattctgtacaatgggcagagtgtggaggtggacgggcactcgatgcggaagctgatcgcagacctgcagcccaacacagagtactcgtttgtgctgatgaaccgtggcagcagcgcagggggcctgcagcacctggtgtccatccgcacagcccccgacctcctgcctcacaagccgctgcctgcctctgcctacatagaggacggccgcttcgatctctccatgccccatgtgcaagacccctcgcttgtcaggtggttctacattgttgtggtacccattgaccgtgtgggcgggagcatgctgacgccaaggtggagcacacccgaggaactggagctggacgagcttctagaagccatcgagcaaggcggagaggagcagcggcggcggcggcggcaggcagaacgtctgaagccatatgtggctgctcaactggatgtgctcccggagacctttaccttgggggacaagaagaactaccggggcttctacaaccggcccctgtctccggacttgagctaccagtgctttgtgcttgcctccttgaaggaacccatggaccagaagcgctatgcctccagcccctactcggatgagatcgtggtccaggtgacaccagcccagcagcaggaggagccggagatgctgtgggtgacgggtcccgtgctggcagtcatcctcatcatcctcattgtcatcgccatcctcttgttcaaaaggaaaaggacccactctccgtcctctaaggatgagcagtcgatcggactgaaggactccttgctggcccactcctctgaccctgtggagatgcggaggctcaactaccagaccccaggtatgcgagaccacccacccatccccatcaccgacctggcggacaacatcgagcgcctcaaagccaacgatggcctcaagttctcccaggagtatgagtccatcgaccctggacagcagttcacgtgggagaattcaaacctggaggtgaacaagcccaagaaccgctatgcgaatgtcatcgcctacgaccactctcgagtcatccttacctctatcgatggcgtccccgggagtgactacatcaatgccaactacatcgatggctaccgcaagcagaatgcctacatcgccacgcagggccccctgcccgagaccatgggcgatttctggagaatggtgtgggaacagcgcacggccactgtggtcatgatgacacggctggaggagaagtcccgggtaaaatgtgatcagtactggccagcccgtggcaccgagacctgtggccttattcaggtgaccctgttggacacagtggagctggccacatacactgtgcgcaccttcgcactccacaagagtggctccagtgagaagcgcgagctgcgtcagtttcagttcatggcctggccagaccatggagttcctgagtacccaactcccatcctggccttcctacgacgggtcaaggcctgcaaccccctagacgcagggcccatggtggtgcactgcagcgcgggcgtgggccgcaccggctgcttcatcgtgattgatgccatgttggagcggatgaagcacgagaagacggtggacatctatggccacgtgacctgcatgcgatcacagaggaactacatggtgcagacggaggaccagtacgtgttcatccatgaggcgctgctggaggctgccacgtgcggccacacagaggtgcctgcccgcaacctgtatgcccacatccagaagctgggccaagtgcctccaggggagagtgtgaccgccatggagctcgagttcaagttgctggccagctccaaggcccacacgtcccgcttcatcagcgccaacctgccctgcaacaagttcaagaaccggctggtgaacatcatgccctacgaattgacccgtgtgtgtctgcagcccatccgtggtgtggagggctctgactacatcaatgccagcttcctggatggttatagacagcagaaggcctacatagctacacaggggcctctggcagagagcaccgaggacttctggcgcatgctatgggagcacaattccaccatcatcgtcatgctgaccaagcttcgggagatgggcagggagaaatgccaccagtactggccagcagagcgctctgctcgctaccagtactttgttgttgacccgatggctgagtacaacatgccccagtatatcctgcgtgagttcaaggtcacggatgcccgggatgggcagtcaaggacaatccggcagttccagttcacagactggccagagcagggcgtgcccaagacaggcgagggattcattgacttcatcgggcaggtgcataagaccaaggagcagtttggacaggatgggcctatcacggtgcactgcagtgctggcgtgggccgcaccggggtgttcatcactctgagcatcgtcctggagcgcatgcgctatgagggcgtggtcgacatgtttcagaccgtgaagaccctgcgtacacagcgtcctgccatggtgcagacagaggaccagtatcagctgtgctaccgtgcggccctggagtacctcggcagctttgaccactatgcaacgtaactaccgctcccctctcctccgccacccccgccgtggggctccggaggggacccagctcctctgagccataccgaccatcgtccagccctcctacgcagatgctgtcactggcagagcacagcccacggggatcacagcgtttcaggaacgttgccacaccaatcagagagcctagaacatccctgggcaagtggatggcccagcaggcaggcactgtggcccttctgtccaccagacccacctggagcccgcttcaagctctctgttgcgctcccgcatttctcatgcttcttctcatggggtggggttggggcaaagcctcctttttaatacattaagtggggtagactgagggattttagcctcttccctctgatttttcctttcgcgaatccgtatctgcagaatgggccactgtaggggttggggtttattttgttttgtttttttttttcttgagttcactttggatccttattttgtatgacttctgctgaaggacagaacattgccttcctcgtgcagagctggggctgccagcctgagcggaggctcggccgtgggccgggaggcagtgctgatccggctgctcctccagcccttcagacgagatcctgtttcagctaaatgcagggaaactcaatgtttttttaagttttgttttccctttaaagcctttttttaggccacattgacagtggtgggcggggagaagatagggaacactcatccctggtcgtctatcccagtgtgtgtttaacattcacagcccagaaccacagatgtgtctgggagagcctggcaaggcattcctcatcaccatcgtgtttgcaaaggttaaaacaaaaacaaaaaaccacaaaaataaaaaacaaaaaaaacaaaaaacccaagaaaaaaaaaaagagtcagcccttggcttctgcttcaaaccctcaagaggggaagcaactccgtgtgcctggggttcccgagggagctgctggctgacctgggcccacagagcctggctttggtccccagcattgcagtatggtgtggtgtttgtaggctgtggggtctggctgtgtggccaaggtgaatagcacaggttagggtgtgtgccacaccccatgcacctcagggccaagcgggggcgtggctggcctttcaggtccaggccagtgggcctggtagcacatgtctgtcctcagagcaggggccagatgattttcctccctggtttgcagctgttttcaaagcccccgataatcgctcttttccactccaagatgccctcataaaccaatgtggcaagactactggacttctatcaatggtactctaatcagtccttattatcccagcttgctgaggggcagggagagcgcctcttcctctgggcagcgctatctagataggtaagtgggggcggggaagggtgcatagctgttttagctgagggacgtggtgccgacgtccccaaacctagctaggctaagtcaagatcaacattccagggttggtaatgttggatgatgaaacattcatttttaccttgtggatgctagtgctgtagagttcactgttgtacacagtctgttttctatttgttaagaaaaactacagcatcatcatttaggtaagggatcctcagg

SEQ ID NO: 451447 - DNA, 7628 bp, Homo sapiens
  misc_feature (18)..(18): n is a, c, g, or t
atgtcggtactgcatttntccatggctatcaggaggcggcggcggcagaggagtgggagcagcggccctagcggcttgcggggggacatgcggaccgacggcccctggataggcggaaggagtggaggccctggtgcccggcccttggtgctgagtatccagcaagagtgaccggggtgaagaagcaaagactcggttgattgtcctgggctgtggctggctgtggagctagagccctggatggcccctgagccagccccagggaggacgatggtgccccttgtgcctgcactggtgatgcttggtttggtggcaggcgcccatggtgacagcaaacctgtcttcattaaagtccctgaggaccagactgggctgtcaggaggggtagcctccttcgtgtgccaagctacaggagaacccaagccgcgcatcacatggatgaagaaggggaagaaagtcagctcccagcgcttcgaggtcattgagtttgatgatggggcagggtcagtgcttcggatccagccattgcgggtgcagcgagatgaagccatctatgagtgtacagctactaacagcctgggtgagatcaacactagtgccaagctctcagtgctcgaagaggaacagctgccccctgggttcccttccatcgacatggggcctcagctgaaggtggtggagaaggcacgcacagccaccatgctatgtgccgcaggcggaaatccagaccctgagatttcttggttcaaggacttccttcctgtagaccctgccacgagcaacggccgcatcaagcagctgcgttcaggtgccttgcagatagagagcagtgaggaatccgaccaaggcaagtacgagtgtgtggcgaccaactcggcaggcacacgttactcagcccctgcgaacctgtatgtgcgagtgcgccgcgtggctcctcgtttctccatccctcccagcagccaggaggtgatgccaggcggcagcgtgaacctgacatgcgtggcagtgggtgcacccatgccctacgtgaagtggatgatgggggccgaggagctcaccaaggaggatgagatgccagttggccgcaacgtcctggagctcagcaatgtcgtacgctctgccaactacacctgtgtggccatctcctcgctgggcatgatcgaggccacagcccaggtcacagtgaaagctcttccaaagcctccgattgatcttgtggtgacagagacaactgccaccagtgtcaccctcacctgggactctgggaactcggagcctgtaacctactatggcatccagtaccgcgcagcgggcacggagggcccctttcaggaggtggatggtgtggccaccacccgctacagcattggcggcctcagccctttctcggaatatgccttccgcgtgctggcggtgaacagcatcgggcgagggccgcccagcgaggcagtgcgggcacgcacgggagaacaggcgccctccagcccaccgcgccgcgtgcaggcacgcatgctgagcgccagcaccatgctggtgcagtgggagcctcccgaggagcccaacggcctggtgcggggataccgcgtctactatactccggactcccgccgccccccgaacgcctggcacaagcacaacaccgacgcggggctcctcacgaccgtgggcagcctgctgcctggcatcacctacagcctgcgcgtgcttgccttcaccgccgtgggcgatggccctcccagccccaccatccaggtcaagacgcagcagggagtgcctgcccagcccgcggacttccaggccgaggtggagtcggacaccaggatccagctctcgtggctgctgccccctcaggagcggatcatcatgtatgaactggtgtactgggcggcagaggacgaagaccaacagcacaaggtcaccttcgacccaacctcctcctacacactagaggacctgaagcctgacacactctaccgcttccagctggctgcacgctcggatatgggggtgggcgtcttcacccccaccattgaggcccgcacagcccagtccaccccctccgcccctccccagaaggtgatgtgtgtgagcatgggctccaccacggtccgggtaagttgggtcccgccgcctgccgacagccgcaacggcgttatcacccagtactccgtggcctacgaggcggtggacggcgaggaccgcgggcggcatgtggtggatggcatcagccgtgagcactccagctgggacctggtgggcctggagaagtggacggagtaccgggtgtgggtgcgggcacacacagacgtgggccccggccccgagagcagcccggtgctggtgcgcaccgatgaggacgtgcccagcgggcctccgcggaaggtggaggtggagccactgaactccactgctgtgcatgtctactggaagctgcctgtccccagcaagcagcatggccagatccgcggctaccaggtcacctacgtgcggctggagaatggcgagccccgtggactccccatcatccaagacgtcatgctagccgaggcccaggaaaccactatcagcggcctgaccccggagaccacctactccgttactgttgctgcctataccaccaagggggatggtgcccgcagcaagcccaaaattgtcactacaacaggtgcagtcccaggccggcccaccatgatgatcagcaccacggccatgaacactgcgctgctccagtggcacccacccaaggaactgcctggcgagctgctgggctaccggctgcagtactgccgggccgacgaggcgcggcccaacaccatagatttcggcaaggatgaccagcacttcacagtcaccggcctgcacaaggggaccacctacatcttccggcttgctgccaagaaccgggctggcttgggtgaggagttcgagaaggagatcaggacccccgaggacctgcccagcggcttcccccaaaacctgcatgtgacaggactgaccacgtctaccacagaactggcctgggacccgccagtgctggcggagaggaacgggcgcatcatcagctacaccgtggtgttccgagacatcaacagccaacaggagctgcagaacatcacgacagacacccgctttacccttactggcctcaagccagacaccacttacgacatcaaggtccgcgcatggaccagcaaaggctctggcccactcagccccagcatccagtcccggaccatgccggtggagcaagtgtttgccaagaacttccgggtggcggctgcaatgaagacgtctgtgctgctcagctgggaggttcccgactcctataagtcagctgtgccctttaagattctgtacaatgggcagagtgtggaggtggacgggcactcgatgcggaagctgatcgcagacctgcagcccaacacagagtactcgtttgtgctgatgaaccgtggcagcagcgcagggggcctgcagcacctggtgtccatccgcacagcccccgacctcctgcctcacaagccgctgcctgcctctgcctacatagaggacggccgcttcgatctctccatgccccatgtgcaagacccctcgcttgtcaggtggttctacattgttgtggtacccattgaccgtgtgggcgggagcatgctgacgccaaggtggagcacacccgaggaactggagctggacgagcttctagaagccatcgagcaaggcggagaggagcagcggcggcggcggcggcaggcagaacgtctgaagccatatgtggctgctcaactggatgtgctcccggagacctttaccttgggggacaagaagaactaccggggcttctacaaccggcccctgtctccggacttgagctaccagtgctttgtgcttgcctccttgaaggaacccatggaccagaagcgctatgcctccagcccctactcggatgagatcgtggtccaggtgacaccagcccagcagcaggaggagccggagatgctgtgggtgacgggtcccgtgctggcagtcatcctcatcatcctcattgtcatcgccatcctcttgttcaaaaggaaaaggacccactctccgtcctctaaggatgagcagtcgatcggactgaaggactccttgctggcccactcctctgaccctgtggagatgcggaggctcaactaccagaccccaggtatgcgagaccacccacccatccccatcaccgacctggcggacaacatcgagcgcctcaaagccaacgatggcctcaagttctcccaggagtatgagtccatcgaccctggacagcagttcacgtgggagaattcaaacctggaggtgaacaagcccaagaaccgctatgcgaatgtcatcgcctacgaccactctcgagtcatccttacctctatcgatggcgtccccgggagtgactacatcaatgccaactacatcgatggctaccgcaagcagaatgcctacatcgccacgcagggccccctgcccgagaccatgggcgatttctggagaatggtgtgggaacagcgcacggccactgtggtcatgatgacacggctggaggagaagtcccgggtaaaatgtgatcagtactggccagcccgtggcaccgagacctgtggccttattcaggtgaccctgttggacacagtggagctggccacatacactgtgcgcaccttcgcactccacaagagtggctccagtgagaagcgcgagctgcgtcagtttcagttcatggcctggccagaccatggagttcctgagtacccaactcccatcctggccttcctacgacgggtcaaggcctgcaaccccctagacgcagggcccatggtggtgcactgcagcgcgggcgtgggccgcaccggctgcttcatcgtgattgatgccatgttggagcggatgaagcacgagaagacggtggacatctatggccacgtgacctgcatgcgatcacagaggaactacatggtgcagacggaggaccagtacgtgttcatccatgaggcgctgctggaggctgccacgtgcggccacacagaggtgcctgcccgcaacctgtatgcccacatccagaagctgggccaagtgcctccaggggagagtgtgaccgccatggagctcgagttcaagttgctggccagctccaaggcccacacgtcccgcttcatcagcgccaacctgccctgcaacaagttcaagaaccggctggtgaacatcatgccctacgaattgacccgtgtgtgtctgcagcccatccgtggtgtggagggctctgactacatcaatgccagcttcctggatggttatagacagcagaaggcctacatagctacacaggggcctctggcagagagcaccgaggacttctggcgcatgctatgggagcacaattccaccatcatcgtcatgctgaccaagcttcgggagatgggcagggagaaatgccaccagtactggccagcagagcgctctgctcgctaccagtactttgttgttgacccgatggctgagtacaacatgccccagtatatcctgcgtgagttcaaggtcacggatgcccgggatgggcagtcaaggacaatccggcagttccagttcacagactggccagagcagggcgtgcccaagacaggcgagggattcattgacttcatcgggcaggtgcataagaccaaggagcagtttggacaggatgggcctatcacggtgcactgcagtgctggcgtgggccgcaccggggtgttcatcactctgagcatcgtcctggagcgcatgcgctatgagggcgtggtcgacatgtttcagaccgtgaagaccctgcgtacacagcgtcctgccatggtgcagacagaggaccagtatcagctgtgctaccgtgcggccctggagtacctcggcagctttgaccactatgcaacgtaactaccgctcccctctcctccgccacccccgccgtggggctccggaggggacccagctcctctgagccataccgaccatcgtccagccctcctacgcagatgctgtcactggcagagcacagcccacggggatcacagcgtttcaggaacgttgccacaccaatcagagagcctagaacatccctgggcaagtggatggcccagcaggcaggcactgtggcccttctgtccaccagacccacctggagcccgcttcaagctctctgttgcgctcccgcatttctcatgcttcttctcatggggtggggttggggcaaagcctcctttttaatacattaagtggggtagactgagggattttagcctcttccctctgatttttcctttcgcgaatccgtatctgcagaatgggccactgtaggggttggggtttattttgttttgtttttttttttcttgagttcactttggatccttattttgtatgacttctgctgaaggacagaacattgccttcctcgtgcagagctggggctgccagcctgagcggaggctcggccgtgggccgggaggcagtgctgatccggctgctcctccagcccttcagacgagatcctgtttcagctaaatgcagggaaactcaatgtttttttaagttttgttttccctttaaagcctttttttaggccacattgacagtggtgggcggggagaagatagggaacactcatccctggtcgtctatcccagtgtgtgtttaacattcacagcccagaaccacagatgtgtctgggagagcctggcaaggcattcctcatcaccatcgtgtttgcaaaggttaaaacaaaaacaaaaaaccacaaaaataaaaaacaaaaaaaacaaaaaacccaagaaaaaaaaaaagagtcagcccttggcttctgcttcaaaccctcaagaggggaagcaactccgtgtgcctggggttcccgagggagctgctggctgacctgggcccacagagcctggctttggtccccagcattgcagtatggtgtggtgtttgtaggctgtggggtctggctgtgtggccaaggtgaatagcacaggttagggtgtgtgccacaccccatgcacctcagggccaagcgggggcgtggctggcctttcaggtccaggccagtgggcctggtagcacatgtctgtcctcagagcaggggccagatgattttcctccctggtttgcagctgttttcaaagcccccgataatcgctcttttccactccaagatgccctcataaaccaatgtggcaagactactggacttctatcaatggtactctaatcagtccttattatcccagcttgctgaggggcagggagagcgcctcttcctctgggcagcgctatctagataggtaagtgggggcggggaagggtgcatagctgttttagctgagggacgtggtgccgacgtccccaaacctagctaggctaagtcaagatcaacattccagggttggtaatgtaagaaatctgattattcaaatttattaccatcaagaattatgcaatgatgctgtagtttttcttaacaaatagaagacagactgtgtacaacagtgaactctacagcactagcatccacaaggtagaaatgaatgtttcatcatccaacattaccaaccctggtcgacgcggccggaatt

SEQ ID NO: 451448 - DNA, 7508 bp, Homo sapiens
  misc_feature (18)..(18): n is a, c, g, or t
atgtcggtactgcatttntccatggctatcaggaggcggcggcggcagaggagtgggagcagcggccctagcggcttgcggggggacatgcggaccgacggcccctggataggcggaaggagtggaggccctggtgcccggcccttggtgctgagtatccagcaagagtgaccggggtgaagaagcaaagactcggttgattgtcctgggctgtggctggctgtggagctagagccctggatggcccctgagccagccccagggaggacgatggtgccccttgtgcctgcactggtgatgcttggtttggtggcaggcgcccatggtgacagcaaacctgtcttcattaaagtccctgaggaccagactgggctgtcaggaggggtagcctccttcgtgtgccaagctacaggagaacccaagccgcgcatcacatggatgaagaaggggaagaaagtcagctcccagcgcttcgaggtcattgagtttgatgatggggcagggtcagtgcttcggatccagccattgcgggtgcagcgagatgaagccatctatgagtgtacagctactaacagcctgggtgagatcaacactagtgccaagctctcagtgctcgaagaggaacagctgccccctgggttcccttccatcgacatggggcctcagctgaaggtggtggagaaggcacgcacagccaccatgctatgtgccgcaggcggaaatccagaccctgagatttcttggttcaaggacttccttcctgtagaccctgccacgagcaacggccgcatcaagcagctgcgttcaggtgccttgcagatagagagcagtgaggaatccgaccaaggcaagtacgagtgtgtggcgaccaactcggcaggcacacgttactcagcccctgcgaacctgtatgtgcgagtgcgccgcgtggctcctcgtttctccatccctcccagcagccaggaggtgatgccaggcggcagcgtgaacctgacatgcgtggcagtgggtgcacccatgccctacgtgaagtggatgatgggggccgaggagctcaccaaggaggatgagatgccagttggccgcaacgtcctggagctcagcaatgtcgtacgctctgccaactacacctgtgtggccatctcctcgctgggcatgatcgaggccacagcccaggtcacagtgaaagctcttccaaagcctccgattgatcttgtggtgacagagacaactgccaccagtgtcaccctcacctgggactctgggaactcggagcctgtaacctactatggcatccagtaccgcgcagcgggcacggagggcccctttcaggaggtggatggtgtggccaccacccgctacagcattggcggcctcagccctttctcggaatatgccttccgcgtgctggcggtgaacagcatcgggcgagggccgcccagcgaggcagtgcgggcacgcacgggagaacaggcgccctccagcccaccgcgccgcgtgcaggcacgcatgctgagcgccagcaccatgctggtgcagtgggagcctcccgaggagcccaacggcctggtgcggggataccgcgtctactatactccggactcccgccgccccccgaacgcctggcacaagcacaacaccgacgcggggctcctcacgaccgtgggcagcctgctgcctggcatcacctacagcctgcgcgtgcttgccttcaccgccgtgggcgatggccctcccagccccaccatccaggtcaagacgcagcagggagtgcctgcccagcccgcggacttccaggccgaggtggagtcggacaccaggatccagctctcgtggctgctgccccctcaggagcggatcatcatgtatgaactggtgtactgggcggcagaggacgaagaccaacagcacaaggtcaccttcgacccaacctcctcctacacactagaggacctgaagcctgacacactctaccgcttccagctggctgcacgctcggatatgggggtgggcgtcttcacccccaccattgaggcccgcacagcccagtccaccccctccgcccctccccagaaggtgatgtgtgtgagcatgggctccaccacggtccgggtaagttgggtcccgccgcctgccgacagccgcaacggcgttatcacccagtactccgtggcctacgaggcggtggacggcgaggaccgcgggcggcatgtggtggatggcatcagccgtgagcactccagctgggacctggtgggcctggagaagtggacggagtaccgggtgtgggtgcgggcacacacagacgtgggccccggccccgagagcagcccggtgctggtgcgcaccgatgaggacgtgcccagcgggcctccgcggaaggtggaggtggagccactgaactccactgctgtgcatgtctactggaagctgcctgtccccagcaagcagcatggccagatccgcggctaccaggtcacctacgtgcggctggagaatggcgagccccgtggactccccatcatccaagacgtcatgctagccgaggcccaggaaaccactatcagcggcctgaccccggagaccacctactccgttactgttgctgcctataccaccaagggggatggtgcccgcagcaagcccaaaattgtcactacaacaggtgcagtcccaggccggcccaccatgatgatcagcaccacggccatgaacactgcgctgctccagtggcacccacccaaggaactgcctggcgagctgctgggctaccggctgcagtactgccgggccgacgaggcgcggcccaacaccatagatttcggcaaggatgaccagcacttcacagtcaccggcctgcacaaggggaccacctacatcttccggcttgctgccaagaaccgggctggcttgggtgaggagttcgagaaggagatcaggacccccgaggacctgcccagcggcttcccccaaaacctgcatgtgacaggactgaccacgtctaccacagaactggcctgggacccgccagtgctggcggagaggaacgggcgcatcatcagctacaccgtggtgttccgagacatcaacagccaacaggagctgcagaacatcacgacagacacccgctttacccttactggcctcaagccagacaccacttacgacatcaaggtccgcgcatggaccagcaaaggctctggcccactcagccccagcatccagtcccggaccatgccggtggagcaagtgtttgccaagaacttccgggtggcggctgcaatgaagacgtctgtgctgctcagctgggaggttcccgactcctataagtcagctgtgccctttaagattctgtacaatgggcagagtgtggaggtggacgggcactcgatgcggaagctgatcgcagacctgcagcccaacacagagtactcgtttgtgctgatgaaccgtggcagcagcgcagggggcctgcagcacctggtgtccatccgcacagcccccgacctcctgcctcacaagccgctgcctgcctctgcctacatagaggacggccgcttcgatctctccatgccccatgtgcaagacccctcgcttgtcaggtggttctacattgttgtggtacccattgaccgtgtgggcgggagcatgctgacgccaaggtggagcacacccgaggaactggagctggacgagcttctagaagccatcgagcaaggcggagaggagcagcggcggcggcggcggcaggcagaacgtctgaagccatatgtggctgctcaactggatgtgctcccggagacctttaccttgggggacaagaagaactaccggggcttctacaaccggcccctgtctccggacttgagctaccagtgctttgtgcttgcctccttgaaggaacccatggaccagaagcgctatgcctccagcccctactcggatgagatcgtggtccaggtgacaccagcccagcagcaggaggagccggagatgctgtgggtgacgggtcccgtgctggcagtcatcctcatcatcctcattgtcatcgccatcctcttgttcaaaaggaaaaggacccactctccgtcctctaaggatgagcagtcgatcggactgaaggactccttgctggcccactcctctgaccctgtggagatgcggaggctcaactaccagaccccaggtatgcgagaccacccacccatccccatcaccgacctggcggacaacatcgagcgcctcaaagccaacgatggcctcaagttctcccaggagtatgagtccatcgaccctggacagcagttcacgtgggagaattcaaacctggaggtgaacaagcccaagaaccgctatgcgaatgtcatcgcctacgaccactctcgagtcatccttacctctatcgatggcgtccccgggagtgactacatcaatgccaactacatcgatggctaccgcaagcagaatgcctacatcgccacgcagggccccctgcccgagaccatgggcgatttctggagaatggtgtgggaacagcgcacggccactgtggtcatgatgacacggctggaggagaagtcccgggtaaaatgtgatcagtactggccagcccgtggcaccgagacctgtggccttattcaggtgaccctgttggacacagtggagctggccacatacactgtgcgcaccttcgcactccacaagagtggctccagtgagaagcgcgagctgcgtcagtttcagttcatggcctggccagaccatggagttcctgagtacccaactcccatcctggccttcctacgacgggtcaaggcctgcaaccccctagacgcagggcccatggtggtgcactgcagcgcgggcgtgggccgcaccggctgcttcatcgtgattgatgccatgttggagcggatgaagcacgagaagacggtggacatctatggccacgtgacctgcatgcgatcacagaggaactacatggtgcagacggaggaccagtacgtgttcatccatgaggcgctgctggaggctgccacgtgcggccacacagaggtgcctgcccgcaacctgtatgcccacatccagaagctgggccaagtgcctccaggggagagtgtgaccgccatggagctcgagttcaagttgctggccagctccaaggcccacacgtcccgcttcatcagcgccaacctgccctgcaacaagttcaagaaccggctggtgaacatcatgccctacgaattgacccgtgtgtgtctgcagcccatccgtggtgtggagggctctgactacatcaatgccagcttcctggatggttatagacagcagaaggcctacatagctacacaggggcctctggcagagagcaccgaggacttctggcgcatgctatgggagcacaattccaccatcatcgtcatgctgaccaagcttcgggagatgggcagggagaaatgccaccagtactggccagcagagcgctctgctcgctaccagtactttgttgttgacccgatggctgagtacaacatgccccagtatatcctgcgtgagttcaaggtcacggatgcccgggatgggcagtcaaggacaatccggcagttccagttcacagactggccagagcagggcgtgcccaagacaggcgagggattcattgacttcatcgggcaggtgcataagaccaaggagcagtttggacaggatgggcctatcacggtgcactgcagtgctggcgtgggccgcaccggggtgttcatcactctgagcatcgtcctggagcgcatgcgctatgagggcgtggtcgacatgtttcagaccgtgaagaccctgcgtacacagcgtcctgccatggtgcagacagaggaccagtatcagctgtgctaccgtgcggccctggagtacctcggcagctttgaccactatgcaacgtaactaccgctcccctctcctccgccacccccgccgtggggctccggaggggacccagctcctctgagccataccgaccatcgtccagccctcctacgcagatgctgtcactggcagagcacagcccacggggatcacagcgtttcaggaacgttgccacaccaatcagagagcctagaacatccctgggcaagtggatggcccagcaggcaggcactgtggcccttctgtccaccagacccacctggagcccgcttcaagctctctgttgcgctcccgcatttctcatgcttcttctcatggggtggggttggggcaaagcctcctttttaatacattaagtggggtagactgagggattttagcctcttccctctgatttttcctttcgcgaatccgtatctgcagaatgggccactgtaggggttggggtttattttgttttgtttttttttttcttgagttcactttggatccttattttgtatgacttctgctgaaggacagaacattgccttcctcgtgcagagctggggctgccagcctgagcggaggctcggccgtgggccgggaggcagtgctgatccggctgctcctccagcccttcagacgagatcctgtttcagctaaatgcagggaaactcaatgtttttttaagttttgttttccctttaaagcctttttttaggccacattgacagtggtgggcggggagaagatagggaacactcatccctggtcgtctatcccagtgtgtgtttaacattcacagcccagaaccacagatgtgtctgggagagcctggcaaggcattcctcatcaccatcgtgtttgcaaaggttaaaacaaaaacaaaaaaccacaaaaataaaaaacaaaaaaaacaaaaaacccaagaaaaaaaaaaagagtcagcccttggcttctgcttcaaaccctcaagaggggaagcaactccgtgtgcctggggttcccgagggagctgctggctgacctgggcccacagagcctggctttggtccccagcattgcagtatggtgtggtgtttgtaggctgtggggtctggctgtgtggccaaggtgaatagcacaggttagggtgtgtgccacaccccatgcacctcagggccaagcgggggcgtggctggcctttcaggtccaggccagtgggcctggtagcacatgtctgtcctcagagcaggggccagatgattttcctccctggtttgcagctgttttcaaagcccccgataatcgctcttttccactccaagatgccctcataaaccaatgtggcaagactactggacttctatcaatggtactctaatcagtccttattatcccagcttgctgaggggcagggagagcgcctcttcctcagaaccgacaaaccaaaaacaaataaacaacaacacatacacaaaaaacacgaaacacaaacaaaacaaacaacaacgacaaaaaaaaacaaacacacaaaacaaacgaattatatcctccccagacagcacacagaaaaaacaccaaaaaacaacatgtggatgctagtgctgtagagttcactgttgtac

SEQ ID NO: 451449 - DNA, 7238 bp, Homo sapiens
  misc_feature (18)..(18): n is a, c, g, or t
atgtcggtactgcatttntccatggctatcaggaggcggcggcggcagaggagtgggagcagcggccctagcggcttgcggggggacatgcggaccgacggcccctggataggcggaaggagtggaggccctggtgcccggcccttggtgctgagtatccagcaagagtgaccggggtgaagaagcaaagactcggttgattgtcctgggctgtggctggctgtggagctagagccctggatggcccctgagccagccccagggaggacgatggtgccccttgtgcctgcactggtgatgcttggtttggtggcaggcgcccatggtgacagcaaacctgtcttcattaaagtccctgaggaccagactgggctgtcaggaggggtagcctccttcgtgtgccaagctacaggagaacccaagccgcgcatcacatggatgaagaaggggaagaaagtcagctcccagcgcttcgaggtcattgagtttgatgatggggcagggtcagtgcttcggatccagccattgcgggtgcagcgagatgaagccatctatgagtgtacagctactaacagcctgggtgagatcaacactagtgccaagctctcagtgctcgaagaggaacagctgccccctgggttcccttccatcgacatggggcctcagctgaaggtggtggagaaggcacgcacagccaccatgctatgtgccgcaggcggaaatccagaccctgagatttcttggttcaaggacttccttcctgtagaccctgccacgagcaacggccgcatcaagcagctgcgttcaggtgccttgcagatagagagcagtgaggaatccgaccaaggcaagtacgagtgtgtggcgaccaactcggcaggcacacgttactcagcccctgcgaacctgtatgtgcgagtgcgccgcgtggctcctcgtttctccatccctcccagcagccaggaggtgatgccaggcggcagcgtgaacctgacatgcgtggcagtgggtgcacccatgccctacgtgaagtggatgatgggggccgaggagctcaccaaggaggatgagatgccagttggccgcaacgtcctggagctcagcaatgtcgtacgctctgccaactacacctgtgtggccatctcctcgctgggcatgatcgaggccacagcccaggtcacagtgaaagctcttccaaagcctccgattgatcttgtggtgacagagacaactgccaccagtgtcaccctcacctgggactctgggaactcggagcctgtaacctactatggcatccagtaccgcgcagcgggcacggagggcccctttcaggaggtggatggtgtggccaccacccgctacagcattggcggcctcagccctttctcggaatatgccttccgcgtgctggcggtgaacagcatcgggcgagggccgcccagcgaggcagtgcgggcacgcacgggagaacaggcgccctccagcccaccgcgccgcgtgcaggcacgcatgctgagcgccagcaccatgctggtgcagtgggagcctcccgaggagcccaacggcctggtgcggggataccgcgtctactatactccggactcccgccgccccccgaacgcctggcacaagcacaacaccgacgcggggctcctcacgaccgtgggcagcctgctgcctggcatcacctacagcctgcgcgtgcttgccttcaccgccgtgggcgatggccctcccagccccaccatccaggtcaagacgcagcagggagtgcctgcccagcccgcggacttccaggccgaggtggagtcggacaccaggatccagctctcgtggctgctgccccctcaggagcggatcatcatgtatgaactggtgtactgggcggcagaggacgaagaccaacagcacaaggtcaccttcgacccaacctcctcctacacactagaggacctgaagcctgacacactctaccgcttccagctggctgcacgctcggatatgggggtgggcgtcttcacccccaccattgaggcccgcacagcccagtccaccccctccgcccctccccagaaggtgatgtgtgtgagcatgggctccaccacggtccgggtaagttgggtcccgccgcctgccgacagccgcaacggcgttatcacccagtactccgtggcctacgaggcggtggacggcgaggaccgcgggcggcatgtggtggatggcatcagccgtgagcactccagctgggacctggtgggcctggagaagtggacggagtaccgggtgtgggtgcgggcacacacagacgtgggccccggccccgagagcagcccggtgctggtgcgcaccgatgaggacgtgcccagcgggcctccgcggaaggtggaggtggagccactgaactccactgctgtgcatgtctactggaagctgcctgtccccagcaagcagcatggccagatccgcggctaccaggtcacctacgtgcggctggagaatggcgagccccgtggactccccatcatccaagacgtcatgctagccgaggcccaggaaaccactatcagcggcctgaccccggagaccacctactccgttactgttgctgcctataccaccaagggggatggtgcccgcagcaagcccaaaattgtcactacaacaggtgcagtcccaggccggcccaccatgatgatcagcaccacggccatgaacactgcgctgctccagtggcacccacccaaggaactgcctggcgagctgctgggctaccggctgcagtactgccgggccgacgaggcgcggcccaacaccatagatttcggcaaggatgaccagcacttcacagtcaccggcctgcacaaggggaccacctacatcttccggcttgctgccaagaaccgggctggcttgggtgaggagttcgagaaggagatcaggacccccgaggacctgcccagcggcttcccccaaaacctgcatgtgacaggactgaccacgtctaccacagaactggcctgggacccgccagtgctggcggagaggaacgggcgcatcatcagctacaccgtggtgttccgagacatcaacagccaacaggagctgcagaacatcacgacagacacccgctttacccttactggcctcaagccagacaccacttacgacatcaaggtccgcgcatggaccagcaaaggctctggcccactcagccccagcatccagtcccggaccatgccggtggagcaagtgtttgccaagaacttccgggtggcggctgcaatgaagacgtctgtgctgctcagctgggaggttcccgactcctataagtcagctgtgccctttaagattctgtacaatgggcagagtgtggaggtggacgggcactcgatgcggaagctgatcgcagacctgcagcccaacacagagtactcgtttgtgctgatgaaccgtggcagcagcgcagggggcctgcagcacctggtgtccatccgcacagcccccgacctcctgcctcacaagccgctgcctgcctctgcctacatagaggacggccgcttcgatctctccatgccccatgtgcaagacccctcgcttgtcaggtggttctacattgttgtggtacccattgaccgtgtgggcgggagcatgctgacgccaaggtggagcacacccgaggaactggagctggacgagcttctagaagccatcgagcaaggcggagaggagcagcggcggcggcggcggcaggcagaacgtctgaagccatatgtggctgctcaactggatgtgctcccggagacctttaccttgggggacaagaagaactaccggggcttctacaaccggcccctgtctccggacttgagctaccagtgctttgtgcttgcctccttgaaggaacccatggaccagaagcgctatgcctccagcccctactcggatgagatcgtggtccaggtgacaccagcccagcagcaggaggagccggagatgctgtgggtgacgggtcccgtgctggcagtcatcctcatcatcctcattgtcatcgccatcctcttgttcaaaaggaaaaggacccactctccgtcctctaaggatgagcagtcgatcggactgaaggactccttgctggcccactcctctgaccctgtggagatgcggaggctcaactaccagaccccaggtatgcgagaccacccacccatccccatcaccgacctggcggacaacatcgagcgcctcaaagccaacgatggcctcaagttctcccaggagtatgagtccatcgaccctggacagcagttcacgtgggagaattcaaacctggaggtgaacaagcccaagaaccgctatgcgaatgtcatcgcctacgaccactctcgagtcatccttacctctatcgatggcgtccccgggagtgactacatcaatgccaactacatcgatggctaccgcaagcagaatgcctacatcgccacgcagggccccctgcccgagaccatgggcgatttctggagaatggtgtgggaacagcgcacggccactgtggtcatgatgacacggctggaggagaagtcccgggtaaaatgtgatcagtactggccagcccgtggcaccgagacctgtggccttattcaggtgaccctgttggacacagtggagctggccacatacactgtgcgcaccttcgcactccacaagagtggctccagtgagaagcgcgagctgcgtcagtttcagttcatggcctggccagaccatggagttcctgagtacccaactcccatcctggccttcctacgacgggtcaaggcctgcaaccccctagacgcagggcccatggtggtgcactgcagcgcgggcgtgggccgcaccggctgcttcatcgtgattgatgccatgttggagcggatgaagcacgagaagacggtggacatctatggccacgtgacctgcatgcgatcacagaggaactacatggtgcagacggaggaccagtacgtgttcatccatgaggcgctgctggaggctgccacgtgcggccacacagaggtgcctgcccgcaacctgtatgcccacatccagaagctgggccaagtgcctccaggggagagtgtgaccgccatggagctcgagttcaagttgctggccagctccaaggcccacacgtcccgcttcatcagcgccaacctgccctgcaacaagttcaagaaccggctggtgaacatcatgccctacgaattgacccgtgtgtgtctgcagcccatccgtggtgtggagggctctgactacatcaatgccagcttcctggatggttatagacagcagaaggcctacatagctacacaggggcctctggcagagagcaccgaggacttctggcgcatgctatgggagcacaattccaccatcatcgtcatgctgaccaagcttcgggagatgggcagggagaaatgccaccagtactggccagcagagcgctctgctcgctaccagtactttgttgttgacccgatggctgagtacaacatgccccagtatatcctgcgtgagttcaaggtcacggatgcccgggatgggcagtcaaggacaatccggcagttccagttcacagactggccagagcagggcgtgcccaagacaggcgagggattcattgacttcatcgggcaggtgcataagaccaaggagcagtttggacaggatgggcctatcacggtgcactgcagtgctggcgtgggccgcaccggggtgttcatcactctgagcatcgtcctggagcgcatgcgctatgagggcgtggtcgacatgtttcagaccgtgaagaccctgcgtacacagcgtcctgccatggtgcagacagaggaccagtatcagctgtgctaccgtgcggccctggagtacctcggcagctttgaccactatgcaacgtaactaccgctcccctctcctccgccacccccgccgtggggctccggaggggacccagctcctctgagccataccgaccatcgtccagccctcctacgcagatgctgtcactggcagagcacagcccacggggatcacagcgtttcaggaacgttgccacaccaatcagagagcctagaacatccctgggcaagtggatggcccagcaggcaggcactgtggcccttctgtccaccagacccacctggagcccgcttcaagctctctgttgcgctcccgcatttctcatgcttcttctcatggggtggggttggggcaaagcctcctttttaatacattaagtggggtagactgagggattttagcctcttccctctgatttttcctttcgcgaatccgtatctgcagaatgggccactgtaggggttggggtttattttgttttgtttttttttttcttgagttcactttggatccttattttgtatgacttctgctgaaggacagaacattgccttcctcgtgcagagctggggctgccagcctgagcggaggctcggccgtgggccgggaggcagtgctgatccggctgctcctccagcccttcagacgagatcctgtttcagctaaatgcagggaaactcaatgtttttttaagttttgttttccctttaaagcctttttttaggccacattgacagtggtgggcggggagaagatagggaacactcatccctggtcgtctatcccagtgtgtgtttaacattcacagcccagaaccacagatgtgtctgggagagcctggcaaggcattcctcatcaccatcgtgtttgcaaaggttaaaacaaaaacaaaaaaccacaaaaataaaaaacaaaaaaaacaaaaaacccaagaaaaaaaaaaagagtcagcccttggcttctgcttcaaaccctcaagaggggaagcaactccgtgtgcctggggttcccgagggagctgctggctgacctgggcccacagagcctggctttggtccccagcattgcagtatggtgtggtgtttgtaggctgtggggtctggctgtgtggccaaggtgaatagcacaggttagggtgtgtgccacaccccatgcacctcagggccaagcgggggcgtggctggcctttcaggtccaggccagtgggcctggtagcacatgtctgtcctcagagcaggggccagatgattttcctccctggtttgcagctgttttcaaagcccccgataatcgctcttttccaacaaagcaaccctggtacagagctcgatcactgccat

SEQ ID NO: 451450 - DNA, 6328 bp, Homo sapiens
  misc_feature (18)..(18): n is a, c, g, or t
atgtcggtactgcatttntccatggctatcaggaggcggcggcggcagaggagtgggagcagcggccctagcggcttgcggggggacatgcggaccgacggcccctggataggcggaaggagtggaggccctggtgcccggcccttggtgctgagtatccagcaagagtgaccggggtgaagaagcaaagactcggttgattgtcctgggctgtggctggctgtggagctagagccctggatggcccctgagccagccccagggaggacgatggtgccccttgtgcctgcactggtgatgcttggtttggtggcaggcgcccatggtgacagcaaacctgtcttcattaaagtccctgaggaccagactgggctgtcaggaggggtagcctccttcgtgtgccaagctacaggagaacccaagccgcgcatcacatggatgaagaaggggaagaaagtcagctcccagcgcttcgaggtcattgagtttgatgatggggcagggtcagtgcttcggatccagccattgcgggtgcagcgagatgaagccatctatgagtgtacagctactaacagcctgggtgagatcaacactagtgccaagctctcagtgctcgaagaggaacagctgccccctgggttcccttccatcgacatggggcctcagctgaaggtggtggagaaggcacgcacagccaccatgctatgtgccgcaggcggaaatccagaccctgagatttcttggttcaaggacttccttcctgtagaccctgccacgagcaacggccgcatcaagcagctgcgttcaggtgccttgcagatagagagcagtgaggaatccgaccaaggcaagtacgagtgtgtggcgaccaactcggcaggcacacgttactcagcccctgcgaacctgtatgtgcgagtgcgccgcgtggctcctcgtttctccatccctcccagcagccaggaggtgatgccaggcggcagcgtgaacctgacatgcgtggcagtgggtgcacccatgccctacgtgaagtggatgatgggggccgaggagctcaccaaggaggatgagatgccagttggccgcaacgtcctggagctcagcaatgtcgtacgctctgccaactacacctgtgtggccatctcctcgctgggcatgatcgaggccacagcccaggtcacagtgaaagctcttccaaagcctccgattgatcttgtggtgacagagacaactgccaccagtgtcaccctcacctgggactctgggaactcggagcctgtaacctactatggcatccagtaccgcgcagcgggcacggagggcccctttcaggaggtggatggtgtggccaccacccgctacagcattggcggcctcagccctttctcggaatatgccttccgcgtgctggcggtgaacagcatcgggcgagggccgcccagcgaggcagtgcgggcacgcacgggagaacaggcgccctccagcccaccgcgccgcgtgcaggcacgcatgctgagcgccagcaccatgctggtgcagtgggagcctcccgaggagcccaacggcctggtgcggggataccgcgtctactatactccggactcccgccgccccccgaacgcctggcacaagcacaacaccgacgcggggctcctcacgaccgtgggcagcctgctgcctggcatcacctacagcctgcgcgtgcttgccttcaccgccgtgggcgatggccctcccagccccaccatccaggtcaagacgcagcagggagtgcctgcccagcccgcggacttccaggccgaggtggagtcggacaccaggatccagctctcgtggctgctgccccctcaggagcggatcatcatgtatgaactggtgtactgggcggcagaggacgaagaccaacagcacaaggtcaccttcgacccaacctcctcctacacactagaggacctgaagcctgacacactctaccgcttccagctggctgcacgctcggatatgggggtgggcgtcttcacccccaccattgaggcccgcacagcccagtccaccccctccgcccctccccagaaggtgatgtgtgtgagcatgggctccaccacggtccgggtaagttgggtcccgccgcctgccgacagccgcaacggcgttatcacccagtactccgtggcctacgaggcggtggacggcgaggaccgcgggcggcatgtggtggatggcatcagccgtgagcactccagctgggacctggtgggcctggagaagtggacggagtaccgggtgtgggtgcgggcacacacagacgtgggccccggccccgagagcagcccggtgctggtgcgcaccgatgaggacgtgcccagcgggcctccgcggaaggtggaggtggagccactgaactccactgctgtgcatgtctactggaagctgcctgtccccagcaagcagcatggccagatccgcggctaccaggtcacctacgtgcggctggagaatggcgagccccgtggactccccatcatccaagacgtcatgctagccgaggcccaggaaaccactatcagcggcctgaccccggagaccacctactccgttactgttgctgcctataccaccaagggggatggtgcccgcagcaagcccaaaattgtcactacaacaggtgcagtcccaggccggcccaccatgatgatcagcaccacggccatgaacactgcgctgctccagtggcacccacccaaggaactgcctggcgagctgctgggctaccggctgcagtactgccgggccgacgaggcgcggcccaacaccatagatttcggcaaggatgaccagcacttcacagtcaccggcctgcacaaggggaccacctacatcttccggcttgctgccaagaaccgggctggcttgggtgaggagttcgagaaggagatcaggacccccgaggacctgcccagcggcttcccccaaaacctgcatgtgacaggactgaccacgtctaccacagaactggcctgggacccgccagtgctggcggagaggaacgggcgcatcatcagctacaccgtggtgttccgagacatcaacagccaacaggagctgcagaacatcacgacagacacccgctttacccttactggcctcaagccagacaccacttacgacatcaaggtccgcgcatggaccagcaaaggctctggcccactcagccccagcatccagtcccggaccatgccggtggagcaagtgtttgccaagaacttccgggtggcggctgcaatgaagacgtctgtgctgctcagctgggaggttcccgactcctataagtcagctgtgccctttaagattctgtacaatgggcagagtgtggaggtggacgggcactcgatgcggaagctgatcgcagacctgcagcccaacacagagtactcgtttgtgctgatgaaccgtggcagcagcgcagggggcctgcagcacctggtgtccatccgcacagcccccgacctcctgcctcacaagccgctgcctgcctctgcctacatagaggacggccgcttcgatctctccatgccccatgtgcaagacccctcgcttgtcaggtggttctacattgttgtggtacccattgaccgtgtgggcgggagcatgctgacgccaaggtggagcacacccgaggaactggagctggacgagcttctagaagccatcgagcaaggcggagaggagcagcggcggcggcggcggcaggcagaacgtctgaagccatatgtggctgctcaactggatgtgctcccggagacctttaccttgggggacaagaagaactaccggggcttctacaaccggcccctgtctccggacttgagctaccagtgctttgtgcttgcctccttgaaggaacccatggaccagaagcgctatgcctccagcccctactcggatgagatcgtggtccaggtgacaccagcccagcagcaggaggagccggagatgctgtgggtgacgggtcccgtgctggcagtcatcctcatcatcctcattgtcatcgccatcctcttgttcaaaaggaaaaggacccactctccgtcctctaaggatgagcagtcgatcggactgaaggactccttgctggcccactcctctgaccctgtggagatgcggaggctcaactaccagaccccaggtatgcgagaccacccacccatccccatcaccgacctggcggacaacatcgagcgcctcaaagccaacgatggcctcaagttctcccaggagtatgagtccatcgaccctggacagcagttcacgtgggagaattcaaacctggaggtgaacaagcccaagaaccgctatgcgaatgtcatcgcctacgaccactctcgagtcatccttacctctatcgatggcgtccccgggagtgactacatcaatgccaactacatcgatggctaccgcaagcagaatgcctacatcgccacgcagggccccctgcccgagaccatgggcgatttctggagaatggtgtgggaacagcgcacggccactgtggtcatgatgacacggctggaggagaagtcccgggtaaaatgtgatcagtactggccagcccgtggcaccgagacctgtggccttattcaggtgaccctgttggacacagtggagctggccacatacactgtgcgcaccttcgcactccacaagagtggctccagtgagaagcgcgagctgcgtcagtttcagttcatggcctggccagaccatggagttcctgagtacccaactcccatcctggccttcctacgacgggtcaaggcctgcaaccccctagacgcagggcccatggtggtgcactgcagcgcgggcgtgggccgcaccggctgcttcatcgtgattgatgccatgttggagcggatgaagcacgagaagacggtggacatctatggccacgtgacctgcatgcgatcacagaggaactacatggtgcagacggaggaccagtacgtgttcatccatgaggcgctgctggaggctgccacgtgcggccacacagaggtgcctgcccgcaacctgtatgcccacatccagaagctgggccaagtgcctccaggggagagtgtgaccgccatggagctcgagttcaagttgctggccagctccaaggcccacacgtcccgcttcatcagcgccaacctgccctgcaacaagttcaagaaccggctggtgaacatcatgccctacgaattgacccgtgtgtgtctgcagcccatccgtggtgtggagggctctgactacatcaatgccagcttcctggatggttatagacagcagaaggcctacatagctacacaggggcctctggcagagagcaccgaggacttctggcgcatgctatgggagcacaattccaccatcatcgtcatgctgaccaagcttcgggagatgggcagggagaaatgccaccagtactggccagcagagcgctctgctcgctaccagtactttgttgttgacccgatggctgagtacaacatgccccagtatatcctgcgtgagttcaaggtcacggatgcccgggatgggcagtcaaggacaatccggcagttccagttcacagactggccagagcagggcgtgcccaagacaggcgagggattcattgacttcatcgggcaggtgcataagaccaaggagcagtttggacaggatgggcctatcacggtgcactgcagtgctggcgtgggccgcaccggggtgttcatcactctgagcatcgtcctggagcgcatgcgctatgagggcgtggctggcctttcaggtccaggccagtgggcctggtagcacatgtctgtcctcagagcaggggccagatgattttcctccctggtttgcagctgttttcaaagcccccgataatcgctcttttccactccaagatgccctcataaaccaatgtggcaagactactggacttctatcaatggtactctaatcagtccttattatcccagcttgctgaggggcagggagagcgcctcttcctctgggcagcgctatctagataggtaagtgggggcggggaagggtgcatagctgttttagctgagggacgtggtgccgacgtccccaaacctagctaggctaagtcaagatcaacattccagggttggtaatgttggatgatgaaacattcatttttaccttgtggatgctagtgctgtagagttcactgttgtacacagtctgttttctatttgttaagaaaaactacagcatcattgcataattcttgatggtaataaatttgaataatcagatttcttacaaa

SEQ ID NO: 451451 - DNA, 6403 bp, Homo sapiens
  misc_feature (18)..(18): n is a, c, g, or t
atgtcggtactgcatttntccatggctatcaggaggcggcggcggcagaggagtgggagcagcggccctagcggcttgcggggggacatgcggaccgacggcccctggataggcggaaggagtggaggccctggtgcccggcccttggtgctgagtatccagcaagagtgaccggggtgaagaagcaaagactcggttgattgtcctgggctgtggctggctgtggagctagagccctggatggcccctgagccagccccagggaggacgatggtgccccttgtgcctgcactggtgatgcttggtttggtggcaggcgcccatggtgacagcaaacctgtcttcattaaagtccctgaggaccagactgggctgtcaggaggggtagcctccttcgtgtgccaagctacaggagaacccaagccgcgcatcacatggatgaagaaggggaagaaagtcagctcccagcgcttcgaggtcattgagtttgatgatggggcagggtcagtgcttcggatccagccattgcgggtgcagcgagatgaagccatctatgagtgtacagctactaacagcctgggtgagatcaacactagtgccaagctctcagtgctcgaagaggaacagctgccccctgggttcccttccatcgacatggggcctcagctgaaggtggtggagaaggcacgcacagccaccatgctatgtgccgcaggcggaaatccagaccctgagatttcttggttcaaggacttccttcctgtagaccctgccacgagcaacggccgcatcaagcagctgcgttcaggtgccttgcagatagagagcagtgaggaatccgaccaaggcaagtacgagtgtgtggcgaccaactcggcaggcacacgttactcagcccctgcgaacctgtatgtgcgagtgcgccgcgtggctcctcgtttctccatccctcccagcagccaggaggtgatgccaggcggcagcgtgaacctgacatgcgtggcagtgggtgcacccatgccctacgtgaagtggatgatgggggccgaggagctcaccaaggaggatgagatgccagttggccgcaacgtcctggagctcagcaatgtcgtacgctctgccaactacacctgtgtggccatctcctcgctgggcatgatcgaggccacagcccaggtcacagtgaaagctcttccaaagcctccgattgatcttgtggtgacagagacaactgccaccagtgtcaccctcacctgggactctgggaactcggagcctgtaacctactatggcatccagtaccgcgcagcgggcacggagggcccctttcaggaggtggatggtgtggccaccacccgctacagcattggcggcctcagccctttctcggaatatgccttccgcgtgctggcggtgaacagcatcgggcgagggccgcccagcgaggcagtgcgggcacgcacgggagaacaggcgccctccagcccaccgcgccgcgtgcaggcacgcatgctgagcgccagcaccatgctggtgcagtgggagcctcccgaggagcccaacggcctggtgcggggataccgcgtctactatactccggactcccgccgccccccgaacgcctggcacaagcacaacaccgacgcggggctcctcacgaccgtgggcagcctgctgcctggcatcacctacagcctgcgcgtgcttgccttcaccgccgtgggcgatggccctcccagccccaccatccaggtcaagacgcagcagggagtgcctgcccagcccgcggacttccaggccgaggtggagtcggacaccaggatccagctctcgtggctgctgccccctcaggagcggatcatcatgtatgaactggtgtactgggcggcagaggacgaagaccaacagcacaaggtcaccttcgacccaacctcctcctacacactagaggacctgaagcctgacacactctaccgcttccagctggctgcacgctcggatatgggggtgggcgtcttcacccccaccattgaggcccgcacagcccagtccaccccctccgcccctccccagaaggtgatgtgtgtgagcatgggctccaccacggtccgggtaagttgggtcccgccgcctgccgacagccgcaacggcgttatcacccagtactccgtggcctacgaggcggtggacggcgaggaccgcgggcggcatgtggtggatggcatcagccgtgagcactccagctgggacctggtgggcctggagaagtggacggagtaccgggtgtgggtgcgggcacacacagacgtgggccccggccccgagagcagcccggtgctggtgcgcaccgatgaggacgtgcccagcgggcctccgcggaaggtggaggtggagccactgaactccactgctgtgcatgtctactggaagctgcctgtccccagcaagcagcatggccagatccgcggctaccaggtcacctacgtgcggctggagaatggcgagccccgtggactccccatcatccaagacgtcatgctagccgaggcccaggaaaccactatcagcggcctgaccccggagaccacctactccgttactgttgctgcctataccaccaagggggatggtgcccgcagcaagcccaaaattgtcactacaacaggtgcagtcccaggccggcccaccatgatgatcagcaccacggccatgaacactgcgctgctccagtggcacccacccaaggaactgcctggcgagctgctgggctaccggctgcagtactgccgggccgacgaggcgcggcccaacaccatagatttcggcaaggatgaccagcacttcacagtcaccggcctgcacaaggggaccacctacatcttccggcttgctgccaagaaccgggctggcttgggtgaggagttcgagaaggagatcaggacccccgaggacctgcccagcggcttcccccaaaacctgcatgtgacaggactgaccacgtctaccacagaactggcctgggacccgccagtgctggcggagaggaacgggcgcatcatcagctacaccgtggtgttccgagacatcaacagccaacaggagctgcagaacatcacgacagacacccgctttacccttactggcctcaagccagacaccacttacgacatcaaggtccgcgcatggaccagcaaaggctctggcccactcagccccagcatccagtcccggaccatgccggtggagcaagtgtttgccaagaacttccgggtggcggctgcaatgaagacgtctgtgctgctcagctgggaggttcccgactcctataagtcagctgtgccctttaagattctgtacaatgggcagagtgtggaggtggacgggcactcgatgcggaagctgatcgcagacctgcagcccaacacagagtactcgtttgtgctgatgaaccgtggcagcagcgcagggggcctgcagcacctggtgtccatccgcacagcccccgacctcctgcctcacaagccgctgcctgcctctgcctacatagaggacggccgcttcgatctctccatgccccatgtgcaagacccctcgcttgtcaggtggttctacattgttgtggtacccattgaccgtgtgggcgggagcatgctgacgccaaggtggagcacacccgaggaactggagctggacgagcttctagaagccatcgagcaaggcggagaggagcagcggcggcggcggcggcaggcagaacgtctgaagccatatgtggctgctcaactggatgtgctcccggagacctttaccttgggggacaagaagaactaccggggcttctacaaccggcccctgtctccggacttgagctaccagtgctttgtgcttgcctccttgaaggaacccatggaccagaagcgctatgcctccagcccctactcggatgagatcgtggtccaggtgacaccagcccagcagcaggaggagccggagatgctgtgggtgacgggtcccgtgctggcagtcatcctcatcatcctcattgtcatcgccatcctcttgttcaaaaggaaaaggacccactctccgtcctctaaggatgagcagtcgatcggactgaaggactccttgctggcccactcctctgaccctgtggagatgcggaggctcaactaccagaccccaggtatgcgagaccacccacccatccccatcaccgacctggcggacaacatcgagcgcctcaaagccaacgatggcctcaagttctcccaggagtatgagtccatcgaccctggacagcagttcacgtgggagaattcaaacctggaggtgaacaagcccaagaaccgctatgcgaatgtcatcgcctacgaccactctcgagtcatccttacctctatcgatggcgtccccgggagtgactacatcaatgccaactacatcgatggctaccgcaagcagaatgcctacatcgccacgcagggccccctgcccgagaccatgggcgatttctggagaatggtgtgggaacagcgcacggccactgtggtcatgatgacacggctggaggagaagtcccgggtaaaatgtgatcagtactggccagcccgtggcaccgagacctgtggccttattcaggtgaccctgttggacacagtggagctggccacatacactgtgcgcaccttcgcactccacaagagtggctccagtgagaagcgcgagctgcgtcagtttcagttcatggcctggccagaccatggagttcctgagtacccaactcccatcctggccttcctacgacgggtcaaggcctgcaaccccctagacgcagggcccatggtggtgcactgcagcgcgggcgtgggccgcaccggctgcttcatcgtgattgatgccatgttggagcggatgaagcacgagaagacggtggacatctatggccacgtgacctgcatgcgatcacagaggaactacatggtgcagacggaggaccagtacgtgttcatccatgaggcgctgctggaggctgccacgtgcggccacacagaggtgcctgcccgcaacctgtatgcccacatccagaagctgggccaagtgcctccaggggagagtgtgaccgccatggagctcgagttcaagttgctggccagctccaaggcccacacgtcccgcttcatcagcgccaacctgccctgcaacaagttcaagaaccggctggtgaacatcatgccctacgaattgacccgtgtgtgtctgcagcccatccgtggtgtggagggctctgactacatcaatgccagcttcctggatggttatagacagcagaaggcctacatagctacacaggggcctctggcagagagcaccgaggacttctggcgcatgctatgggagcacaattccaccatcatcgtcatgctgaccaagcttcgggagatgggcagggagaaatgccaccagtactggccagcagagcgctctgctcgctaccagtactttgttgttgacccgatggctgagtacaacatgccccagtatatcctgcgtgagttcaaggtcacggatgcccgggatgggcagtcaaggacaatccggcagttccagttcacagactggccagagcagggcgtgcccaagacaggcgagggattcattgacttcatcgggcaggtgcataagaccaaggagcagtttggacaggatgggcctatcacggtgcactgcagtgctggcgtgggccgcaccggggtgttcatcactctgagcatcgtcctggagcgcatgcgctatgagggcgtggtcgacatgtttcagaccgtgaagaccctgcgtacacagcgtcctgccatggtgcagacagaggaccagtatcagctgtgctaccgtgcggccctggagtacctcggcagctttgaccactatgcaacgtaactaccgctcccctctcctccgccacccccgccgtggggctccggaggggacccagctcctctgagccataccgaccatcgtccagccctcctacgcagatgctgtcactggcagagcacagcccacggggatcacagcgtttcaggaacgttgccacaccaatcagagagcctagaacatccctgggcaagtggatggcccagcaggcaggcactgtggcccttctgtccaccagacccacctggagcccgcttcaagctctctgttgcgctcccgcatttctcatgcttcttctcatggggtggggttggggcaaagcctcctttttaatacattaagtggggtagactgagggattttagcctcttccctctgatttttcctttcgcgaatccgtatctgcagaatgggccactgtaggggttggggtttcaagaatttaagaattaaaaaacggattggttta

SEQ ID NO: 451452 - DNA, 965 bp, Homo sapiens
atcaccatcgtgtttgcaaaggtgatgaggaatgccttgccaggctctcccagacacatctgtggttctgggctgtgaatgttaaacacacactgggatagacgaccagcattcctcatcaccatcgtgtttgcaaaggttaaaacaaaaacaaaaaaccacaaaaataaaaaacaaaaaaaacaaaaaacccaagaaaaaaaaaaagagtcagcccttggcttctgcttcaaaccctcaagaggggaagcaactccgtgtgcctggggttcccgagggagctgctggctgacctgggcccacagagcctggctttggtccccagcattgcagtatggtgtggtgtttgtaggctgtggggtctggctgtgtggccaaggtgaatagcacaggttagggtgtgtgccacaccccatgcacctcagggccaagcgggggcgtggctggcctttcaggtccaggccagtgggcctggtagcacatgtctgtcctcagagcaggggccagatgattttcctccctggtttgcagctgttttcaaagcccccgataatcgctcttttccactccaagatgccctcataaaccaatgtggcaagactactggacttctatcaatggtactctaatcagtccttattatcccagcttgctgaggggcagggagagcgcctcttcctctgggcagcgctatctagataggtaagtgggggcggggaagggtgcatagctgttttagctgagggacgtggtgccgacgtccccaaacctagctaggctaagtcaagatcaacattccagggttggtaatgttggatgatgaaacattcatttttaccttgtggatgctagtgctgtagagttcactgttgtacacagtctgttttctatttgttaagaaaaactacagcatcattgcataattcttgatggtaataaatttgaataatcagatttcttacaaa

SEQ ID NO: 451453 - DNA, 821 bp, Homo sapiens
cgaaacccttgcggtactatatctattgcgccagttttcaatttctatcgcctatactttatttgggtagggtttgatgacgtcttcaaaccctcaagaggggaagcaactccgtgtgcctggggttcccgagggagctgctggctgacctgggcccacagagcctggctttggtccccagcattgcagtatggtgtggtgtttgtaggctgtggggtctggctgtgtggccaaggtgaatagcacaggttagggtgtgtgccacaccccatgcacctcagggccaagcgggggcgtggctggcctttcaggtccaggccagtgggcctggtagcacatgtctgtcctcagagcaggggccagatgattttcctccctggtttgcagctgttttcaaagcccccgataatcgctcttttccactccaagatgccctcataaaccaatgtggcaagactactggacttctatcaatggtactctaatcagtccttattatcccagcttgctgaggggcagggagagcgcctcttcctctgggcagcgctatctagataggtaagtgggggcggggaagggtgcatagctgttttagctgagggacgtggtgccgacgtccccaaacctagctaggctaagtcaagatcaacattccagggttggtaatgttggatgatgaaacattcatttttaccttgtggatgctagtgctgtagagttcactgttgtacacagtctgttttctatttgttaagaaaaactacagcatcattgcataattcttgatggtaataaatttgaataatcagatttcttacaaa

SEQ ID NO: 451454 - DNA, 682 bp, Homo sapiens
gcggccgcctactactactaaattcgcggccgcgtcccccagcattgcagtatggtgtggtgtttgtaggctgtggggtctggctgtgtggccaaggtgaatagcacaggttagggtgtgtgccacaccccatgcacctcagggccaagcgggggcgtggctggcctttcaggtccaggccagtgggcctggtagcacatgtctgtcctcagagcaggggccagatgattttcctccctggtttgcagctgttttcaaagcccccgataatcgctcttttccactccaagatgccctcataaaccaatgtggcaagactactggacttctatcaatggtactctaatcagtccttattatcccagcttgctgaggggcagggagagcgcctcttcctctgggcagcgctatctagataggtaagtgggggcggggaagggtgcatagctgttttagctgagggacgtggtgccgacgtccccaaacctagctaggctaagtcaagatcaacattccagggttggtaatgttggatgatgaaacattcatttttaccttgtggatgctagtgctgtagagttcactgttgtacacagtctgttttctatttgttaagaaaaactacagcatcattgcataattcttgatggtaataaatttgaataatcagatttcttacaaa

SEQ ID NO: 451455 - DNA, 5610 bp, Homo sapiens
  misc_feature (18)..(18): n is a, c, g, or t
  misc_feature (5452)..(5453): n is a, c, g, or t
  misc_feature (5456)..(5456): n is a, c, g, or t
atgtcggtactgcatttntccatggctatcaggaggcggcggcggcagaggagtgggagcagcggccctagcggcttgcggggggacatgcggaccgacggcccctggataggcggaaggagtggaggccctggtgcccggcccttggtgctgagtatccagcaagagtgaccggggtgaagaagcaaagactcggttgattgtcctgggctgtggctggctgtggagctagagccctggatggcccctgagccagccccagggaggacgatggtgccccttgtgcctgcactggtgatgcttggtttggtggcaggcgcccatggtgacagcaaacctgtcttcattaaagtccctgaggaccagactgggctgtcaggaggggtagcctccttcgtgtgccaagctacaggagaacccaagccgcgcatcacatggatgaagaaggggaagaaagtcagctcccagcgcttcgaggtcattgagtttgatgatggggcagggtcagtgcttcggatccagccattgcgggtgcagcgagatgaagccatctatgagtgtacagctactaacagcctgggtgagatcaacactagtgccaagctctcagtgctcgaagaggaacagctgccccctgggttcccttccatcgacatggggcctcagctgaaggtggtggagaaggcacgcacagccaccatgctatgtgccgcaggcggaaatccagaccctgagatttcttggttcaaggacttccttcctgtagaccctgccacgagcaacggccgcatcaagcagctgcgttcaggtgccttgcagatagagagcagtgaggaatccgaccaaggcaagtacgagtgtgtggcgaccaactcggcaggcacacgttactcagcccctgcgaacctgtatgtgcgagtgcgccgcgtggctcctcgtttctccatccctcccagcagccaggaggtgatgccaggcggcagcgtgaacctgacatgcgtggcagtgggtgcacccatgccctacgtgaagtggatgatgggggccgaggagctcaccaaggaggatgagatgccagttggccgcaacgtcctggagctcagcaatgtcgtacgctctgccaactacacctgtgtggccatctcctcgctgggcatgatcgaggccacagcccaggtcacagtgaaagctcttccaaagcctccgattgatcttgtggtgacagagacaactgccaccagtgtcaccctcacctgggactctgggaactcggagcctgtaacctactatggcatccagtaccgcgcagcgggcacggagggcccctttcaggaggtggatggtgtggccaccacccgctacagcattggcggcctcagccctttctcggaatatgccttccgcgtgctggcggtgaacagcatcgggcgagggccgcccagcgaggcagtgcgggcacgcacgggagaacaggcgccctccagcccaccgcgccgcgtgcaggcacgcatgctgagcgccagcaccatgctggtgcagtgggagcctcccgaggagcccaacggcctggtgcggggataccgcgtctactatactccggactcccgccgccccccgaacgcctggcacaagcacaacaccgacgcggggctcctcacgaccgtgggcagcctgctgcctggcatcacctacagcctgcgcgtgcttgccttcaccgccgtgggcgatggccctcccagccccaccatccaggtcaagacgcagcagggagtgcctgcccagcccgcggacttccaggccgaggtggagtcggacaccaggatccagctctcgtggctgctgccccctcaggagcggatcatcatgtatgaactggtgtactgggcggcagaggacgaagaccaacagcacaaggtcaccttcgacccaacctcctcctacacactagaggacctgaagcctgacacactctaccgcttccagctggctgcacgctcggatatgggggtgggcgtcttcacccccaccattgaggcccgcacagcccagtccaccccctccgcccctccccagaaggtgatgtgtgtgagcatgggctccaccacggtccgggtaagttgggtcccgccgcctgccgacagccgcaacggcgttatcacccagtactccgtggcctacgaggcggtggacggcgaggaccgcgggcggcatgtggtggatggcatcagccgtgagcactccagctgggacctggtgggcctggagaagtggacggagtaccgggtgtgggtgcgggcacacacagacgtgggccccggccccgagagcagcccggtgctggtgcgcaccgatgaggacgtgcccagcgggcctccgcggaaggtggaggtggagccactgaactccactgctgtgcatgtctactggaagctgcctgtccccagcaagcagcatggccagatccgcggctaccaggtcacctacgtgcggctggagaatggcgagccccgtggactccccatcatccaagacgtcatgctagccgaggcccaggaaaccactatcagcggcctgaccccggagaccacctactccgttactgttgctgcctataccaccaagggggatggtgcccgcagcaagcccaaaattgtcactacaacaggtgcagtcccaggccggcccaccatgatgatcagcaccacggccatgaacactgcgctgctccagtggcacccacccaaggaactgcctggcgagctgctgggctaccggctgcagtactgccgggccgacgaggcgcggcccaacaccatagatttcggcaaggatgaccagcacttcacagtcaccggcctgcacaaggggaccacctacatcttccggcttgctgccaagaaccgggctggcttgggtgaggagttcgagaaggagatcaggacccccgaggacctgcccagcggcttcccccaaaacctgcatgtgacaggactgaccacgtctaccacagaactggcctgggacccgccagtgctggcggagaggaacgggcgcatcatcagctacaccgtggtgttccgagacatcaacagccaacaggagctgcagaacatcacgacagacacccgctttacccttactggcctcaagccagacaccacttacgacatcaaggtccgcgcatggaccagcaaaggctctggcccactcagccccagcatccagtcccggaccatgccggtggagcaagtgtttgccaagaacttccgggtggcggctgcaatgaagacgtctgtgctgctcagctgggaggttcccgactcctataagtcagctgtgccctttaagattctgtacaatgggcagagtgtggaggtggacgggcactcgatgcggaagctgatcgcagacctgcagcccaacacagagtactcgtttgtgctgatgaaccgtggcagcagcgcagggggcctgcagcacctggtgtccatccgcacagcccccgacctcctgcctcacaagccgctgcctgcctctgcctacatagaggacggccgcttcgatctctccatgccccatgtgcaagacccctcgcttgtcaggtggttctacattgttgtggtacccattgaccgtgtgggcgggagcatgctgacgccaaggtggagcacacccgaggaactggagctggacgagcttctagaagccatcgagcaaggcggagaggagcagcggcggcggcggcggcaggcagaacgtctgaagccatatgtggctgctcaactggatgtgctcccggagacctttaccttgggggacaagaagaactaccggggcttctacaaccggcccctgtctccggacttgagctaccagtgctttgtgcttgcctccttgaaggaacccatggaccagaagcgctatgcctccagcccctactcggatgagatcgtggtccaggtgacaccagcccagcagcaggaggagccggagatgctgtgggtgacgggtcccgtgctggcagtcatcctcatcatcctcattgtcatcgccatcctcttgttcaaaaggaaaaggacccactctccgtcctctaaggatgagcagtcgatcggactgaaggactccttgctggcccactcctctgaccctgtggagatgcggaggctcaactaccagaccccaggtatgcgagaccacccacccatccccatcaccgacctggcggacaacatcgagcgcctcaaagccaacgatggcctcaagttctcccaggagtatgagtccatcgaccctggacagcagttcacgtgggagaattcaaacctggaggtgaacaagcccaagaaccgctatgcgaatgtcatcgcctacgaccactctcgagtcatccttacctctatcgatggcgtccccgggagtgactacatcaatgccaactacatcgatggctaccgcaagcagaatgcctacatcgccacgcagggccccctgcccgagaccatgggcgatttctggagaatggtgtgggaacagcgcacggccactgtggtcatgatgacacggctggaggagaagtcccgggtaaaatgtgatcagtactggccagcccgtggcaccgagacctgtggccttattcaggtgaccctgttggacacagtggagctggccacatacactgtgcgcaccttcgcactccacaagagtggctccagtgagaagcgcgagctgcgtcagtttcagttcatggcctggccagaccatggagttcctgagtacccaactcccatcctggccttcctacgacgggtcaaggcctgcaaccccctagacgcagggcccatggtggtgcactgcagcgcgggcgtgggccgcaccggctgcttcatcgtgattgatgccatgttggagcggatgaagcacgagaagacggtggacatctatggccacgtgacctgcatgcgatcacagaggaactacatggtgcagacggaggaccagtacgtgttcatccatgaggcgctgctggaggctgccacgtgcggccacacagaggtgcctgcccgcaacctgtatgcccacatccagaagctgggccaagtgcctccaggggagagtgtgaccgccatggagctcgagttcaagttgctggccagctccaaggcccacacgtcccgcttcatcagcgccaacctgccctgcaacaagttcaagaaccggctggtgaacatcatgccctacgaattgacccgtgtgtgtctgcagcccatccgtggtgtggagggctctgactacatcaatgccagcttcctggatggttatagacagcagaaggcctacatagctacacaggggcctctggcagagagcaccgaggacttctggcgcatgctatgggagcacaattccaccatcatcgtcatgctgaccaagcttcgggagatgggcaggnnaangccccgtactggcagggagcggtcggtcgtacgtacttgtcgttgccgtggtggtcacttggccgtatccggtggttcgccgatccggtggcggaggaaacgggtccgtcacatggccgcggggtgccacgggggccggtcggcgggaccaggg

SEQ ID NO: 451456 - DNA, 4246 bp, Homo sapiens
  misc_feature (18)..(18): n is a, c, g, or t
atgtcggtactgcatttntccatggctatcaggaggcggcggcggcagaggagtgggagcagcggccctagcggcttgcggggggacatgcggaccgacggcccctggataggcggaaggagtggaggccctggtgcccggcccttggtgctgagtatccagcaagagtgaccggggtgaagaagcaaagactcggttgattgtcctgggctgtggctggctgtggagctagagccctggatggcccctgagccagccccagggaggacgatggtgccccttgtgcctgcactggtgatgcttggtttggtggcaggcgcccatggtgacagcaaacctgtcttcattaaagtccctgaggaccagactgggctgtcaggaggggtagcctccttcgtgtgccaagctacaggagaacccaagccgcgcatcacatggatgaagaaggggaagaaagtcagctcccagcgcttcgaggtcattgagtttgatgatggggcagggtcagtgcttcggatccagccattgcgggtgcagcgagatgaagccatctatgagtgtacagctactaacagcctgggtgagatcaacactagtgccaagctctcagtgctcgaagaggaacagctgccccctgggttcccttccatcgacatggggcctcagctgaaggtggtggagaaggcacgcacagccaccatgctatgtgccgcaggcggaaatccagaccctgagatttcttggttcaaggacttccttcctgtagaccctgccacgagcaacggccgcatcaagcagctgcgttcaggtgccttgcagatagagagcagtgaggaatccgaccaaggcaagtacgagtgtgtggcgaccaactcggcaggcacacgttactcagcccctgcgaacctgtatgtgcgagtgcgccgcgtggctcctcgtttctccatccctcccagcagccaggaggtgatgccaggcggcagcgtgaacctgacatgcgtggcagtgggtgcacccatgccctacgtgaagtggatgatgggggccgaggagctcaccaaggaggatgagatgccagttggccgcaacgtcctggagctcagcaatgtcgtacgctctgccaactacacctgtgtggccatctcctcgctgggcatgatcgaggccacagcccaggtcacagtgaaagctcttccaaagcctccgattgatcttgtggtgacagagacaactgccaccagtgtcaccctcacctgggactctgggaactcggagcctgtaacctactatggcatccagtaccgcgcagcgggcacggagggcccctttcaggaggtggatggtgtggccaccacccgctacagcattggcggcctcagccctttctcggaatatgccttccgcgtgctggcggtgaacagcatcgggcgagggccgcccagcgaggcagtgcgggcacgcacgggagaacaggcgccctccagcccaccgcgccgcgtgcaggcacgcatgctgagcgccagcaccatgctggtgcagtgggagcctcccgaggagcccaacggcctggtgcggggataccgcgtctactatactccggactcccgccgccccccgaacgcctggcacaagcacaacaccgacgcggggctcctcacgaccgtgggcagcctgctgcctggcatcacctacagcctgcgcgtgcttgccttcaccgccgtgggcgatggccctcccagccccaccatccaggtcaagacgcagcagggagtgcctgcccagcccgcggacttccaggccgaggtggagtcggacaccaggatccagctctcgtggctgctgccccctcaggagcggatcatcatgtatgaactggtgtactgggcggcagaggacgaagaccaacagcacaaggtcaccttcgacccaacctcctcctacacactagaggacctgaagcctgacacactctaccgcttccagctggctgcacgctcggatatgggggtgggcgtcttcacccccaccattgaggcccgcacagcccagtccaccccctccgcccctccccagaaggtgatgtgtgtgagcatgggctccaccacggtccgggtaagttgggtcccgccgcctgccgacagccgcaacggcgttatcacccagtactccgtggcctacgaggcggtggacggcgaggaccgcgggcggcatgtggtggatggcatcagccgtgagcactccagctgggacctggtgggcctggagaagtggacggagtaccgggtgtgggtgcgggcacacacagacgtgggccccggccccgagagcagcccggtgctggtgcgcaccgatgaggacgtgcccagcgggcctccgcggaaggtggaggtggagccactgaactccactgctgtgcatgtctactggaagctgcctgtccccagcaagcagcatggccagatccgcggctaccaggtcacctacgtgcggctggagaatggcgagccccgtggactccccatcatccaagacgtcatgctagccgaggcccaggaaaccactatcagcggcctgaccccggagaccacctactccgttactgttgctgcctataccaccaagggggatggtgcccgcagcaagcccaaaattgtcactacaacaggtgcagtcccaggccggcccaccatgatgatcagcaccacggccatgaacactgcgctgctccagtggcacccacccaaggaactgcctggcgagctgctgggctaccggctgcagtactgccgggccgacgaggcgcggcccaacaccatagatttcggcaaggatgaccagcacttcacagtcaccggcctgcacaaggggaccacctacatcttccggcttgctgccaagaaccgggctggcttgggtgaggagttcgagaaggagatcaggacccccgaggacctgcccagcggcttcccccaaaacctgcatgtgacaggactgaccacgtctaccacagaactggcctgggacccgccagtgctggcggagaggaacgggcgcatcatcagctacaccgtggtgttccgagacatcaacagccaacaggagctgcagaacatcacgacagacacccgctttacccttactggcctcaagccagacaccacttacgacatcaaggtccgcgcatggaccagcaaaggctctggcccactcagccccagcatccagtcccggaccatgccggtggagcaagtgtttgccaagaacttccgggtggcggctgcaatgaagacgtctgtgctgctcagctgggaggttcccgactcctataagtcagctgtgccctttaagattctgtacaatgggcagagtgtggaggtggacgggcactcgatgcggaagctgatcgcagacctgcagcccaacacagagtactcgtttgtgctgatgaaccgtggcagcagcgcagggggcctgcagcacctggtgtccatccgcacagcccccgacctcctgcctcacaagccgctgcctgcctctgcctacatagaggacggccgcttcgatctctccatgccccatgtgcaagacccctcgcttgtcaggtggttctacattgttgtggtacccattgaccgtgtgggcgggagcatgctgacgccaaggtggagcacacccgaggaactggagctggacgagcttctagaagccatcgagcaaggcggagaggagcagcggcggcggcggcggcaggcagaacgtctgaagccatatgtggctgctcaactggatgtgctcccggagacctttaccttgggggacaagaagaactaccggggcttctacaaccggcccctgtctccggacttgagctaccagtgctttgtgcttgcctccttgaaggaacccatggaccagaagcgctatgcctccagcccctactcggatgagatcgtggtccaggtgacaccagcccagcagcaggaggagccggagatgctgtgggtgacgggtcccgtgctggcagtcatcctcatcatcctcattgtcatcgccatcctcttgttcaaaaggaaaaggacccactctccgtcctctaaggatgagcagtcgatcggactgaaggactccttgctggcccactcctctgaccctgtggagatgcggaggctcaactaccagaccccagtacgcgagaccacccactaatccccctatccgctatccaatgggtaaccttagagtcacc

SEQ ID NO: 451457 - DNA, 3741 bp, Homo sapiens
  misc_feature (18)..(18): n is a, c, g, or t
atgtcggtactgcatttntccatggctatcaggaggcggcggcggcagaggagtgggagcagcggccctagcggcttgcggggggacatgcggaccgacggcccctggataggcggaaggagtggaggccctggtgcccggcccttggtgctgagtatccagcaagagtgaccggggtgaagaagcaaagactcggttgattgtcctgggctgtggctggctgtggagctagagccctggatggcccctgagccagccccagggaggacgatggtgccccttgtgcctgcactggtgatgcttggtttggtggcaggcgcccatggtgacagcaaacctgtcttcattaaagtccctgaggaccagactgggctgtcaggaggggtagcctccttcgtgtgccaagctacaggagaacccaagccgcgcatcacatggatgaagaaggggaagaaagtcagctcccagcgcttcgaggtcattgagtttgatgatggggcagggtcagtgcttcggatccagccattgcgggtgcagcgagatgaagccatctatgagtgtacagctactaacagcctgggtgagatcaacactagtgccaagctctcagtgctcgaagaggaacagctgccccctgggttcccttccatcgacatggggcctcagctgaaggtggtggagaaggcacgcacagccaccatgctatgtgccgcaggcggaaatccagaccctgagatttcttggttcaaggacttccttcctgtagaccctgccacgagcaacggccgcatcaagcagctgcgttcaggtgccttgcagatagagagcagtgaggaatccgaccaaggcaagtacgagtgtgtggcgaccaactcggcaggcacacgttactcagcccctgcgaacctgtatgtgcgagtgcgccgcgtggctcctcgtttctccatccctcccagcagccaggaggtgatgccaggcggcagcgtgaacctgacatgcgtggcagtgggtgcacccatgccctacgtgaagtggatgatgggggccgaggagctcaccaaggaggatgagatgccagttggccgcaacgtcctggagctcagcaatgtcgtacgctctgccaactacacctgtgtggccatctcctcgctgggcatgatcgaggccacagcccaggtcacagtgaaagctcttccaaagcctccgattgatcttgtggtgacagagacaactgccaccagtgtcaccctcacctgggactctgggaactcggagcctgtaacctactatggcatccagtaccgcgcagcgggcacggagggcccctttcaggaggtggatggtgtggccaccacccgctacagcattggcggcctcagccctttctcggaatatgccttccgcgtgctggcggtgaacagcatcgggcgagggccgcccagcgaggcagtgcgggcacgcacgggagaacaggcgccctccagcccaccgcgccgcgtgcaggcacgcatgctgagcgccagcaccatgctggtgcagtgggagcctcccgaggagcccaacggcctggtgcggggataccgcgtctactatactccggactcccgccgccccccgaacgcctggcacaagcacaacaccgacgcggggctcctcacgaccgtgggcagcctgctgcctggcatcacctacagcctgcgcgtgcttgccttcaccgccgtgggcgatggccctcccagccccaccatccaggtcaagacgcagcagggagtgcctgcccagcccgcggacttccaggccgaggtggagtcggacaccaggatccagctctcgtggctgctgccccctcaggagcggatcatcatgtatgaactggtgtactgggcggcagaggacgaagaccaacagcacaaggtcaccttcgacccaacctcctcctacacactagaggacctgaagcctgacacactctaccgcttccagctggctgcacgctcggatatgggggtgggcgtcttcacccccaccattgaggcccgcacagcccagtccaccccctccgcccctccccagaaggtgatgtgtgtgagcatgggctccaccacggtccgggtaagttgggtcccgccgcctgccgacagccgcaacggcgttatcacccagtactccgtggcctacgaggcggtggacggcgaggaccgcgggcggcatgtggtggatggcatcagccgtgagcactccagctgggacctggtgggcctggagaagtggacggagtaccgggtgtgggtgcgggcacacacagacgtgggccccggccccgagagcagcccggtgctggtgcgcaccgatgaggacgtgcccagcgggcctccgcggaaggtggaggtggagccactgaactccactgctgtgcatgtctactggaagctgcctgtccccagcaagcagcatggccagatccgcggctaccaggtcacctacgtgcggctggagaatggcgagccccgtggactccccatcatccaagacgtcatgctagccgaggcccagtggcggccagaggagtccgaggactatgaaaccactatcagcggcctgaccccggagaccacctactccgttactgttgctgcctataccaccaagggggatggtgcccgcagcaagcccaaaattgtcactacaacaggtgcagtcccaggccggcccaccatgatgatcagcaccacggccatgaacactgcgctgctccagtggcacccacccaaggaactgcctggcgagctgctgggctaccggctgcagtactgccgggccgacgaggcgcggcccaacaccatagatttcggcaaggatgaccagcacttcacagtcaccggcctgcacaaggggaccacctacatcttccggcttgctgccaagaaccgggctggcttgggtgaggagttcgagaaggagatcaggacccccgaggacctgcccagcggcttcccccaaaacctgcatgtgacaggactgaccacgtctaccacagaactggcctgggacccgccagtgctggcggagaggaacgggcgcatcatcagctacaccgtggtgttccgagacatcaacagccaacaggagctgcagaacatcacgacagacacccgctttacccttactggcctcaagccagacaccacttacgacatcaaggtccgcgcatggaccagcaaaggctctggcccactcagccccagcatccagtcccggaccatgccggtggagcaaggtgtgtgctgtggacatggcatcccttcccgagtgtggctgcatctgggggtctctgctctccttgagccactgacctctggcgactgtgatccaccagcctctggtgtgtgacctccaatctctcatgactgtgaccactaacctctagtgaatgggcaccacattcttgatgcctgacctctgctgtccttaacctactgacctctgctgtatgaccttctgatctcttgtgaccttgacccactgatctcttttgactgtgtcactattcttgggtgtgcaacctcctgatctttggtgtgtgacactaatctcttggggccatgacccaccgacctctagtgaacatgctccaccacgctctggtgtgtggccacatgcttctcatgaccgaaacccactgaccctctgatcactctggcctggtgtcatctgaccccatcattgggatacctcatagga

SEQ ID NO: 451458 - DNA, 2957 bp, Homo sapiens
  misc_feature (18)..(18): n is a, c, g, or t
atgtcggtactgcatttntccatggctatcaggaggcggcggcggcagaggagtgggagcagcggccctagcggcttgcggggggacatgcggaccgacggcccctggataggcggaaggagtggaggccctggtgcccggcccttggtgctgagtatccagcaagagtgaccggggtgaagaagcaaagactcggttgattgtcctgggctgtggctggctgtggagctagagccctggatggcccctgagccagccccagggaggacgatggtgccccttgtgcctgcactggtgatgcttggtttggtggcaggcgcccatggtgacagcaaacctgtcttcattaaagtccctgaggaccagactgggctgtcaggaggggtagcctccttcgtgtgccaagctacaggagaacccaagccgcgcatcacatggatgaagaaggggaagaaagtcagctcccagcgcttcgaggtcattgagtttgatgatggggcagggtcagtgcttcggatccagccattgcgggtgcagcgagatgaagccatctatgagtgtacagctactaacagcctgggtgagatcaacactagtgccaagctctcagtgctcgaagaggaacagctgccccctgggttcccttccatcgacatggggcctcagctgaaggtggtggagaaggcacgcacagccaccatgctatgtgccgcaggcggaaatccagaccctgagatttcttggttcaaggacttccttcctgtagaccctgccacgagcaacggccgcatcaagcagctgcgttcaggtgccttgcagatagagagcagtgaggaatccgaccaaggcaagtacgagtgtgtggcgaccaactcggcaggcacacgttactcagcccctgcgaacctgtatgtgcgagtgcgccgcgtggctcctcgtttctccatccctcccagcagccaggaggtgatgccaggcggcagcgtgaacctgacatgcgtggcagtgggtgcacccatgccctacgtgaagtggatgatgggggccgaggagctcaccaaggaggatgagatgccagttggccgcaacgtcctggagctcagcaatgtcgtacgctctgccaactacacctgtgtggccatctcctcgctgggcatgatcgaggccacagcccaggtcacagtgaaagctcttccaaagcctccgattgatcttgtggtgacagagacaactgccaccagtgtcaccctcacctgggactctgggaactcggagcctgtaacctactatggcatccagtaccgcgcagcgggcacggagggcccctttcaggaggtggatggtgtggccaccacccgctacagcattggcggcctcagccctttctcggaatatgccttccgcgtgctggcggtgaacagcatcgggcgagggccgcccagcgaggcagtgcgggcacgcacgggagaacaggcgccctccagcccaccgcgccgcgtgcaggcacgcatgctgagcgccagcaccatgctggtgcagtgggagcctcccgaggagcccaacggcctggtgcggggataccgcgtctactatactccggactcccgccgccccccgaacgcctggcacaagcacaacaccgacgcggggctcctcacgaccgtgggcagcctgctgcctggcatcacctacagcctgcgcgtgcttgccttcaccgccgtgggcgatggccctcccagccccaccatccaggtcaagacgcagcagggagtgcctgcccagcccgcggacttccaggccgaggtggagtcggacaccaggatccagctctcgtggctgctgccccctcaggagcggatcatcatgtatgaactggtgtactgggcggcagaggacgaagaccaacagcacaaggtcaccttcgacccaacctcctcctacacactagaggacctgaagcctgacacactctaccgcttccagctggctgcacgctcggatatgggggtgggcgtcttcacccccaccattgaggcccgcacagcccagtccaccccctccgcccctccccagaaggtgatgtgtgtgagcatgggctccaccacggtccgggtaagttgggtcccgccgcctgccgacagccgcaacggcgttatcacccagtactccgtggcctacgaggcggtggacggcgaggaccgcgggcggcatgtggtggatggcatcagccgtgagcactccagctgggacctggtgggcctggagaagtggacggagtaccgggtgtgggtgcgggcacacacagacgtgggccccggccccgagagcagcccggtgctggtgcgcaccgatgaggacgtgcccagcgggcctccgcggaaggtggaggtggagccactgaactccactgctgtgcatgtctactggaagctgcctgtccccagcaagcagcatggccagatccgcggctaccaggtcacctacgtgcggctggagaatggcgagccccgtggactccccatcatccaagacgtcatgctagccgaggcccagtggcggccagaggagtccgaggactatgtaagtaacaggtgtgcgaacgcggacaagacatgggtcaagctgggctcgtgggacgctcctcctctccctcctttcctgctagcctgcactgccaagatccacagggctctagccacatcaggagaaaattggcgtttagacacaagcactgagctgagcagcgattggcatttcctctaatccttacttcttgcctgtcgagcagcaatttgaggccagtgttcatgatcgaccagggcctggcccctgccccggccagacagggatggagttaaatccaatcctgatcgttaggccttattgatccctggagtgaaaaatcacctgctttagggcccaggctgggagggctgtctggagagtcggattctggc

SEQ ID NO: 451459 - DNA, 1952 bp, Homo sapiens
  misc_feature (18)..(18): n is a, c, g, or t
  misc_feature (1927)..(1927): n is a, c, g, or t
atgtcggtactgcatttntccatggctatcaggaggcggcggcggcagaggagtgggagcagcggccctagcggcttgcggggggacatgcggaccgacggcccctggataggcggaaggagtggaggccctggtgcccggcccttggtgctgagtatccagcaagagtgaccggggtgaagaagcaaagactcggttgattgtcctgggctgtggctggctgtggagctagagccctggatggcccctgagccagccccagggaggacgatggtgccccttgtgcctgcactggtgatgcttggtttggtggcaggcgcccatggtgacagcaaacctgtcttcattaaagtccctgaggaccagactgggctgtcaggaggggtagcctccttcgtgtgccaagctacaggagaacccaagccgcgcatcacatggatgaagaaggggaagaaagtcagctcccagcgcttcgaggtcattgagtttgatgatggggcagggtcagtgcttcggatccagccattgcgggtgcagcgagatgaagccatctatgagtgtacagctactaacagcctgggtgagatcaacactagtgccaagctctcagtgctcgaagaggaacagctgccccctgggttcccttccatcgacatggggcctcagctgaaggtggtggagaaggcacgcacagccaccatgctatgtgccgcaggcggaaatccagaccctgagatttcttggttcaaggacttccttcctgtagaccctgccacgagcaacggccgcatcaagcagctgcgttcaggtgccttgcagatagagagcagtgaggaatccgaccaaggcaagtacgagtgtgtggcgaccaactcggcaggcacacgttactcagcccctgcgaacctgtatgtgcgagtgcgccgcgtggctcctcgtttctccatccctcccagcagccaggaggtgatgccaggcggcagcgtgaacctgacatgcgtggcagtgggtgcacccatgccctacgtgaagtggatgatgggggccgaggagctcaccaaggaggatgagatgccagttggccgcaacgtcctggagctcagcaatgtcgtacgctctgccaactacacctgtgtggccatctcctcgctgggcatgatcgaggccacagcccaggtcacagtgaaagctcttccaaagcctccgattgatcttgtggtgacagagacaactgccaccagtgtcaccctcacctgggactctgggaactcggagcctgtaacctactatggcatccagtaccgcgcagcgggcacggagggcccctttcaggaggtggatggtgtggccaccacccgctacagcattggcggcctcagccctttctcggaatatgccttccgcgtgctggcggtgaacagcatcgggcgagggccgcccagcgaggcagtgcgggcacgcacgggagaacaggcgccctccagcccaccgcgccgcgtgcaggcacgcatgctgagcgccagcaccatgctggtgcagtgggagcctcccgaggagcccaacggcctggtgcggggataccgcgtctactatactccggactcccgccgccccccgaacgcctggcacaagcacaacaccgacgcggggctcctcacgaccgtgggcagcctgctgcctggcatcacctacagcctgcgcgtgcttgccttcaccgccgtgggcgatggccctcccagccccaccatccaggtcaagacgcagcagggagtgcctgcccagcccgcggacttccaggccgaggtggagtcggacaccaggatccagctctcgtggctgctgccccctcaggagcggatcatcatgtatgaactggtgtactgggcggcagaggacgaagaccaacagcacaaagtaaaatcgaccnccctgcagggttttccatgtctcgg

SEQ ID NO: 451460 - DNA, 543 bp, Homo sapiens
cccaagccgcgcatcacatggatgaagaaggggaagaaagtcagctcccagcgcttcgaggtgcgtctgtggtgggaaggggtcggcagggctcagggtctgcccacactctctcctttcagtgtccctcctcatggaccttttggaggtgggaggacaactgaccctgagcaggctcctgtgtcctgagtaggctgtgaccccatgtctgtcctctgacaggtcattgagtttgatgatggggcagggtcagtgcttcggatccagccattgcgggtgcagcgagatgaagccatctatgagtgtacagctactaacagcctgggtgagatcaacactagtgccaagctctcagtgctcgaaggtacgtgctagggagacgtggcacggtgggctgccgggctgaggcgtgggaagagccagccagccctgatcctgtcctgggcccatgtgcatttggcagaaaggaggactggccaccttggggtcagtgaaagtcagtggtggacagggatagtcattggatctggcctggattgtgcg

SEQ ID NO: 451461 - DNA, 770 bp, Homo sapiens
gctcacgccacactcctgctctccctaccccctccctgccctgtgttctctcatgtcaaggctgttctggccctggctcctccgcgctcagagatcctgggaagaggtggggcagtaggaggacagagccgtggacatgggggctccttggcagccagccatgccatgtgtcactgtctcagcctggacctcaggttctcaccagcctcccttctgtctctctaggaaaaggacccactctccgtcctctaaggatgagcagtcgatcggactgaaggactccttgctggcccactcctctgaccctgtggagatgcggaggctcaactaccagaccccaggtagggcactcctatggcctgtgtgcccccagcccagacctagcaggcctgtgggtctgttctgcaggtctcagggtcgccactgaagttcctgggccgcatgcacttgttcctgctccttttcttcctttctgcccttctccctgtgctcatccactttggttggaatgactggggagcccccatatcctgcagctggacaggtgccccaggccaggaccctcttaggtggcaaagccacttagccactgccttgtcttcagtcaaggcctctgaatatgggctgaggacctcccagagcccacgtctctgccacagggtggccagtgtctggcgcacgctctgacgcctccacatgaaagaggggcatgttaagcagtgggagatgcctcaccagacatctgtggggagatgaagtgcctgcacctg

SEQ ID NO: 451462 - DNA, 473 bp, Homo sapiens
atgatctaaggaaactgtatcagggcctttcctgggggagtggggtgctgaggcaggaccctcaagtttgctgtgcccacctgagctagggttgatacctccaggcctgacttccttctctacctgaccccccagtgcccagcgggcctccgcggaaggtggaggtggagccactgaactccactgctgtgcatgtctactggaagctgcctgtccccagcaagcagcatggccagatccgcggctaccaggtcacctacgtgcggctggagaatggcgagccccgtggactccccatcatccaagacgtcatgctagccgaggcccaggtgcagcattgggtggtggtggggtggcagggtgagcacagaccagcatgcacaagctcccttttggggcccagatatgtccctcttcccctgcctgccctcagcagtgctgtgactgcctttccttggttgtgagacccgaga

SEQ ID NO: 451463 - DNA, 3778 bp, Homo sapiens
  misc_feature (817)..(817): n is a, c, g, or t
  misc_feature (2594)..(2594): n is a, c, g, or t
cgtatataaacttggtcatgtggcttggttttaaaacagttcccttgactgtaattggcaggtgatagcatctacagcatggaaacctgcacctagtaggtgcttaagcatagcttcccttcccatgaagaggaggagacagggcacccactggccgagaggacaggagagatttagttcattaaggctgctcctctgtgctgcccccaccccgcttctgtggcaggcctggacctgatctgcaaacagacttgcctgcctgtgcctgtccctgaggcccatctccagagcagagggagggcatgcaccgctgggctgggtggtggtcctggctgagcctcctgctctcaccttggaccatttgaggtgcgtgctcagagagtcctttgttgccatgagacacttgccagccatgtcccgggatccacctgttctgccacaagaactgtgtctgtgacatgctgtcatcattggtagagactcctggcactagaacagatgacagaaacccacttataccagcgtaagcaaaacaaggaagtcctgtgttacaaatctgaaaagtgtagtagatttggtgctgggcagggctagatccaggtacttaaacaggttggccaggcatttgtctgtctgtttctgagctctcctctcctatgtcgacatctttgttctcaagcagcttttcctgtgtgttgggagaagccatccccagctgctctaagcttagctacctcagtagagagagaaggtcgcttttctaatagtttctgcggaagtccaaaggctgtttctccatagtcagatctgggtcacncaccccatgtatgaagaatgcaggtagaagtggtttccttaaagacaatgggaatgctcattgatttgaggagaaagcagaaccctgaatgtctacaagatactctcatgccctaggtgaacctggggacacagatccagcccaccagcacctgtcaggcctggtctctggggctgccagggtttgggttctgtctggagcaccagagtaaggcaggctgtggaaggagttgaagcaagtgctaaattaggtagggtctcttgggctgggcagaggagtcactgggagccatgcaggagcttgttaaacagggagtggcatcagatttgtgccagctgtttgtggagggcccgtgagcaggaattggggcagtggacaacaaggcaggaggactgacgcagaacacattgcagcaactcagggaaggatgatgatggcttggactttggtggtggcagttgcctgtgtgtatggagagaaatacatggatttggaagatatgttatgccacgctgttgacaggacctggtgacttgctgaatgtctgatctctgggtctaagttttgacccctgtatggtgaggtcagacgttggaccgggaggtctctgaagttgcttctagctctagttctgtgatttggggctgtgtgagcagcatagtctggtgcttatagtggagatgctccttatgtggtgctgtggggtctttgcatgcctgggccccccagcgagggtcctcagagaccagtgctctcagcagtgctcttgggtactgactagcctgctgcctgccgcctttggccctgcgtgtgagagtgcccgtgtaggacacaccctggcctctgctcaccagctgcatggcccatctgcatgccagacatgcctgcccacggctgggtttcatcacctcccttccctctgcatgctcctgtgtctgtgtcaagcttccaacttcgggggcgggtggttctaggctgtaccctggactgagaagctcagaacagcttctggtcaggggagtccaaggctggaggtcgtggccaggcacagccacagccacccctccccttgagacccttgtttgttggcgcaggaagccgtctgttcggcgccctcatcatgttactgccatcgtcatgcccatcctgcccgcagaccatgtccctggcctgccctgacccctgcccctccccagtcctcctgagggcagcccttttgcttgggttcccaggttgtgccctgagcatggctgagaccctggcaggcggccctgctgcttgccttatttcttcccctcaggccatggcctggaggtggaggcagtgactccacggcaggtggctgtgtccctctggactggccttctgctctgcccagccatgctctgaggaccctccaccctagggcctgctttctctccttggtgctccagccaggagcaggcagagataggccctggagaacaccctgggttgtggtcctgaccaggcctggaccttgtactgagtccctgtgtgaccctgggcagacaggaccttcctgacaggcctcagtttcctaggctataaaatgggagcttggttgcaagatctctcattgagtaagtcatcgtgctccagacagtccctgagtgtgggggccacttctaggctggaagtgggtggggtgggagtggatgatgagctggggtctggcggtgccacccctcctgtctctgagcatgggtttggctctgaccagaggggcttcctgaatgaggggcccctgcccttccangcagtcgtgtgtcctgcccggcctgtgagtgcctctctccctcctcctgcagtgcgccgcgtggctcctcgtttctccatccctcccagcagccaggaggtgatgccaggcggcagcgtgaacctgacatgcgtggcagtgggtgcacccatgccctacgtgaagtggatgatgggggccgaggagctcaccaaggaggatgagatgccagttggccgcaacgtcctggagctcagcaatgtcgtacgctctgccaactacacctgtgtggccatctcctcgctgggcatgatcgaggccacagcccaggtcacagtgaaaggtgagtgtggcaggtgctgtaaccagtgccctccctgtcatctgggaggtcctggtggtgggcgaatgtgagctggctgccatgggcacaggcatggctgagggattcttgccctttcctgggtgtccctgccctggggtcctccagcccttagagggagggagggatttctgttattagccggcttaatgataatagttaaggcatattgagttgcttggtgggagacatcatgctagcaagcacagttgattttgtttttttctgttttaccctgggagataggtgctcttattatttccatttttgaaacgagggaaccaaggcacagagagggtgtatcacttgccccagggtcacataaaaataaatgacagagcagggacttaaacccagtgtggtctgaatccatatctcaccctcaccactacatagtaccagaccttcaggtttaatagcctcccagcaagaagggtgtggtaaaatagtaggggaaagtgtgttctctctgccctgatacctggggacaggcacacatgtattacacatatgtcacatatatgtaaccgattctggccaggcacggtggctcattcctgtaagcctagcgctttgggaggccaagttggaaggattgcttgagctcaggagtttgagaccagcccagttaacgtagtgagacccccatctctacgaaaaaaaaaaaaaaaactgggcatggtggcacacacctgtggcccagctacttgggagggctgagacaggaggatcacttgagcccaggagggtgaggctacagtgacgcagtgagccatgatcacaccactgcactccagcctgagtgacagagcgagaccctatg

SEQ ID NO: 451464 - DNA, 357 bp, Homo sapiens
cctccgccatccctgtcgctacatgtgctgctgtctccatgccaccagttccaagtgctccatggtcacacatgttcacatgtgcacatacatgcgttggggctttctctgccacactgctcaagcctcacactaatgctgcctgtgtatgccctacctcccctaggtatgcgagaccacccacccatccccatcaccgacctggcggacaacatcgagcgcctcaaagccaacgatggcctcaagttctcccaggagtatgaggtgagatgttcccgccccctaccatgtgcctggcccaggcctacccaaaccagctcctgtcctgtcctaggtcccagctgtggtgggtgagga

SEQ ID NO: 451465 - DNA, 246 bp, Homo sapiens
catgttaagcagtgggagatgcctcaccagacatctgtggggagatgaagtgcctgcacctgagccttcctggaggccgaccccaggtttaccataccacgtacctgccccttctcctagccactctcatggggctgtccacctcttccttctacctgaaatgttactcctcccaacacccagcagacacagctcagacctctcctcttgcccacacccccacagggttaggtgtctcttcttggc

SEQ ID NO: 451466 - DNA, 7680 bp, Homo sapiens
gcgtgtgtggactgaaacccaaaagccagaaactctctgcatgtgtccctcatggagccatatggtctctagtctctgtttttcaaaatttgcaggactgatgactgattggacagtggtgcaggagggaaggtctctgcatgtcagtgattaaattgctgaagatgccactgcctgagacgggcagtattgaaggaaggagtggaggccctggtgcccggcccttggtgctgagtatccagcaagagtgaccggggtgaagaagcaaagactcggttgattgtcctgggctgtggctggctgtggagctagagccctggatggcccctgagccagccccagggaggacgatggtgccccttgtgcctgcactggtgatgcttggtttggtggcaggcgcccatggtgacagcaaacctgtcttcattaaagtccctgaggaccagactgggctgtcaggaggggtagcctccttcgtgtgccaagctacaggagaacccaagccgcgcatcacatggatgaagaaggggaagaaagtcagctcccagcgcttcgaggtcattgagtttgatgatggggcagggtcagtgcttcggatccagccattgcgggtgcagcgagatgaagccatctatgagtgtacagctactaacagcctgggtgagatcaacactagtgccaagctctcagtgctcgaagaggaacagctgccccctgggttcccttccatcgacatggggcctcagctgaaggtggtggagaaggcacgcacagccaccatgctatgtgccgcaggcggaaatccagaccctgagatttcttggttcaaggacttccttcctgtagaccctgccacgagcaacggccgcatcaagcagctgcgttcaggtgccttgcagatagagagcagtgaggaatccgaccaaggcaagtacgagtgtgtggcgaccaactcggcaggcacacgttactcagcccctgcgaacctgtatgtgcgagtgcgccgcgtggctcctcgtttctccatccctcccagcagccaggaggtgatgccaggcggcagcgtgaacctgacatgcgtggcagtgggtgcacccatgccctacgtgaagtggatgatgggggccgaggagctcaccaaggaggatgagatgccagttggccgcaacgtcctggagctcagcaatgtcgtacgctctgccaactacacctgtgtggccatctcctcgctgggcatgatcgaggccacagcccaggtcacagtgaaagctcttccaaagcctccgattgatcttgtggtgacagagacaactgccaccagtgtcaccctcacctgggactctgggaactcggagcctgtaacctactatggcatccagtaccgcgcagcgggcacggagggcccctttcaggaggtggatggtgtggccaccacccgctacagcattggcggcctcagccctttctcggaatatgccttccgcgtgctggcggtgaacagcatcgggcgagggccgcccagcgaggcagtgcgggcacgcacgggagaacaggcgccctccagcccaccgcgccgcgtgcaggcacgcatgctgagcgccagcaccatgctggtgcagtgggagcctcccgaggagcccaacggcctggtgcggggataccgcgtctactatactccggactcccgccgccccccgaacgcctggcacaagcacaacaccgacgcggggctcctcacgaccgtgggcagcctgctgcctggcatcacctacagcctgcgcgtgcttgccttcaccgccgtgggcgatggccctcccagccccaccatccaggtcaagacgcagcagggagtgcctgcccagcccgcggacttccaggccgaggtggagtcggacaccaggatccagctctcgtggctgctgccccctcaggagcggatcatcatgtatgaactggtgtactgggcggcagaggacgaagaccaacagcacaaggtcaccttcgacccaacctcctcctacacactagaggacctgaagcctgacacactctaccgcttccagctggctgcacgctcggatatgggggtgggcgtcttcacccccaccattgaggcccgcacagcccagtccaccccctccgcccctccccagaaggtgatgtgtgtgagcatgggctccaccacggtccgggtaagttgggtcccgccgcctgccgacagccgcaacggcgttatcacccagtactccgtggcctacgaggcggtggacggcgaggaccgcgggcggcatgtggtggatggcatcagccgtgagcactccagctgggacctggtgggcctggagaagtggacggagtaccgggtgtgggtgcgggcacacacagacgtgggccccggccccgagagcagcccggtgctggtgcgcaccgatgaggacgtgcccagcgggcctccgcggaaggtggaggtggagccactgaactccactgctgtgcatgtctactggaagctgcctgtccccagcaagcagcatggccagatccgcggctaccaggtcacctacgtgcggctggagaatggcgagccccgtggactccccatcatccaagacgtcatgctagccgaggcccaggaaaccactatcagcggcctgaccccggagaccacctactccgttactgttgctgcctataccaccaagggggatggtgcccgcagcaagcccaaaattgtcactacaacaggtgcagtcccaggccggcccaccatgatgatcagcaccacggccatgaacactgcgctgctccagtggcacccacccaaggaactgcctggcgagctgctgggctaccggctgcagtactgccgggccgacgaggcgcggcccaacaccatagatttcggcaaggatgaccagcacttcacagtcaccggcctgcacaaggggaccacctacatcttccggcttgctgccaagaaccgggctggcttgggtgaggagttcgagaaggagatcaggacccccgaggacctgcccagcggcttcccccaaaacctgcatgtgacaggactgaccacgtctaccacagaactggcctgggacccgccagtgctggcggagaggaacgggcgcatcatcagctacaccgtggtgttccgagacatcaacagccaacaggagctgcagaacatcacgacagacacccgctttacccttactggcctcaagccagacaccacttacgacatcaaggtccgcgcatggaccagcaaaggctctggcccactcagccccagcatccagtcccggaccatgccggtggagcaagtgtttgccaagaacttccgggtggcggctgcaatgaagacgtctgtgctgctcagctgggaggttcccgactcctataagtcagctgtgccctttaagattctgtacaatgggcagagtgtggaggtggacgggcactcgatgcggaagctgatcgcagacctgcagcccaacacagagtactcgtttgtgctgatgaaccgtggcagcagcgcagggggcctgcagcacctggtgtccatccgcacagcccccgacctcctgcctcacaagccgctgcctgcctctgcctacatagaggacggccgcttcgatctctccatgccccatgtgcaagacccctcgcttgtcaggtggttctacattgttgtggtacccattgaccgtgtgggcgggagcatgctgacgccaaggtggagcacacccgaggaactggagctggacgagcttctagaagccatcgagcaaggcggagaggagcagcggcggcggcggcggcaggcagaacgtctgaagccatatgtggctgctcaactggatgtgctcccggagacctttaccttgggggacaagaagaactaccggggcttctacaaccggcccctgtctccggacttgagctaccagtgctttgtgcttgcctccttgaaggaacccatggaccagaagcgctatgcctccagcccctactcggatgagatcgtggtccaggtgacaccagcccagcagcaggaggagccggagatgctgtgggtgacgggtcccgtgctggcagtcatcctcatcatcctcattgtcatcgccatcctcttgttcaaaaggaaaaggacccactctccgtcctctaaggatgagcagtcgatcggactgaaggactccttgctggcccactcctctgaccctgtggagatgcggaggctcaactaccagaccccaggtatgcgagaccacccacccatccccatcaccgacctggcggacaacatcgagcgcctcaaagccaacgatggcctcaagttctcccaggagtatgagtccatcgaccctggacagcagttcacgtgggagaattcaaacctggaggtgaacaagcccaagaaccgctatgcgaatgtcatcgcctacgaccactctcgagtcatccttacctctatcgatggcgtccccgggagtgactacatcaatgccaactacatcgatggctaccgcaagcagaatgcctacatcgccacgcagggccccctgcccgagaccatgggcgatttctggagaatggtgtgggaacagcgcacggccactgtggtcatgatgacacggctggaggagaagtcccgggtaaaatgtgatcagtactggccagcccgtggcaccgagacctgtggccttattcaggtgaccctgttggacacagtggagctggccacatacactgtgcgcaccttcgcactccacaagagtggctccagtgagaagcgcgagctgcgtcagtttcagttcatggcctggccagaccatggagttcctgagtacccaactcccatcctggccttcctacgacgggtcaaggcctgcaaccccctagacgcagggcccatggtggtgcactgcagcgcgggcgtgggccgcaccggctgcttcatcgtgattgatgccatgttggagcggatgaagcacgagaagacggtggacatctatggccacgtgacctgcatgcgatcacagaggaactacatggtgcagacggaggaccagtacgtgttcatccatgaggcgctgctggaggctgccacgtgcggccacacagaggtgcctgcccgcaacctgtatgcccacatccagaagctgggccaagtgcctccaggggagagtgtgaccgccatggagctcgagttcaagttgctggccagctccaaggcccacacgtcccgcttcatcagcgccaacctgccctgcaacaagttcaagaaccggctggtgaacatcatgccctacgaattgacccgtgtgtgtctgcagcccatccgtggtgtggagggctctgactacatcaatgccagcttcctggatggttatagacagcagaaggcctacatagctacacaggggcctctggcagagagcaccgaggacttctggcgcatgctatgggagcacaattccaccatcatcgtcatgctgaccaagcttcgggagatgggcagggagaaatgccaccagtactggccagcagagcgctctgctcgctaccagtactttgttgttgacccgatggctgagtacaacatgccccagtatatcctgcgtgagttcaaggtcacggatgcccgggatgggcagtcaaggacaatccggcagttccagttcacagactggccagagcagggcgtgcccaagacaggcgagggattcattgacttcatcgggcaggtgcataagaccaaggagcagtttggacaggatgggcctatcacggtgcactgcagtgctggcgtgggccgcaccggggtgttcatcactctgagcatcgtcctggagcgcatgcgctatgagggcgtggtcgacatgtttcagaccgtgaagaccctgcgtacacagcgtcctgccatggtgcagacagaggaccagtatcagctgtgctaccgtgcggccctggagtacctcggcagctttgaccactatgcaacgtaactaccgctcccctctcctccgccacccccgccgtggggctccggaggggacccagctcctctgagccataccgaccatcgtccagccctcctacgcagatgctgtcactggcagagcacagcccacggggatcacagcgtttcaggaacgttgccacaccaatcagagagcctagaacatccctgggcaagtggatggcccagcaggcaggcactgtggcccttctgtccaccagacccacctggagcccgcttcaagctctctgttgcgctcccgcatttctcatgcttcttctcatggggtggggttggggcaaagcctcctttttaatacattaagtggggtagactgagggattttagcctcttccctctgatttttcctttcgcgaatccgtatctgcagaatgggccactgtaggggttggggtttattttgttttgtttttttttttcttgagttcactttggatccttattttgtatgacttctgctgaaggacagaacattgccttcctcgtgcagagctggggctgccagcctgagcggaggctcggccgtgggccgggaggcagtgctgatccggctgctcctccagcccttcagacgagatcctgtttcagctaaatgcagggaaactcaatgtttttttaagttttgttttccctttaaagcctttttttaggccacattgacagtggtgggcggggagaagatagggaacactcatccctggtcgtctatcccagtgtgtgtttaacattcacagcccagaaccacagatgtgtctgggagagcctggcaaggcattcctcatcaccatcgtgtttgcaaaggttaaaacaaaaacaaaaaaccacaaaaataaaaaacaaaaaaaacaaaaaacccaagaaaaaaaaaaagagtcagcccttggcttctgcttcaaaccctcaagaggggaagcaactccgtgtgcctggggttcccgagggagctgctggctgacctgggcccacagagcctggctttggtccccagcattgcagtatggtgtggtgtttgtaggctgtggggtctggctgtgtggccaaggtgaatagcacaggttagggtgtgtgccacaccccatgcacctcagggccaagcgggggcgtggctggcctttcaggtccaggccagtgggcctggtagcacatgtctgtcctcagagcaggggccagatgattttcctccctggtttgcagctgttttcaaagcccccgataatcgctcttttccactccaagatgccctcataaaccaatgtggcaagactactggacttctatcaatggtactctaatcagtccttattatcccagcttgctgaggggcagggagagcgcctcttcctctgggcagcgctatctagataggtaagtgggggcggggaagggtgcatagctgttttagctgagggacgtggtgccgacgtccccaaacctagctaggctaagtcaagatcaacattccagggttggtaatgttggatgatgaaacattcatttttaccttgtggatgctagtgctgtagagttcactgttgtacacagtctgttttctatttgttaagaaaaactacagcatcattgcataattcttgatggtaataaatttgaataatcagatttcttacaaa

SEQ ID NO: 451467 - DNA, 6926 bp, Homo sapiens
aattcaggggcacgagtggcagaaccccctggaagaaattttccttgcggtttcaaaggggaagggtgttccctttcccctggtaggtaaccccatgcacacgagcaacggccgcatcaagcagctgcgttcaggtgccttgcagatagagagcagtgaggaatccgaccaaggcaagtacgagtgtgtggcgaccaactcggcaggcacacgttactcagcccctgcgaacctgtatgtgcgagtgcgccgcgtggctcctcgtttctccatccctcccagcagccaggaggtgatgccaggcggcagcgtgaacctgacatgcgtggcagtgggtgcacccatgccctacgtgaagtggatgatgggggccgaggagctcaccaaggaggatgagatgccagttggccgcaacgtcctggagctcagcaatgtcgtacgctctgccaactacacctgtgtggccatctcctcgctgggcatgatcgaggccacagcccaggtcacagtgaaagctcttccaaagcctccgattgatcttgtggtgacagagacaactgccaccagtgtcaccctcacctgggactctgggaactcggagcctgtaacctactatggcatccagtaccgcgcagcgggcacggagggcccctttcaggaggtggatggtgtggccaccacccgctacagcattggcggcctcagccctttctcggaatatgccttccgcgtgctggcggtgaacagcatcgggcgagggccgcccagcgaggcagtgcgggcacgcacgggagaacaggcgccctccagcccaccgcgccgcgtgcaggcacgcatgctgagcgccagcaccatgctggtgcagtgggagcctcccgaggagcccaacggcctggtgcggggataccgcgtctactatactccggactcccgccgccccccgaacgcctggcacaagcacaacaccgacgcggggctcctcacgaccgtgggcagcctgctgcctggcatcacctacagcctgcgcgtgcttgccttcaccgccgtgggcgatggccctcccagccccaccatccaggtcaagacgcagcagggagtgcctgcccagcccgcggacttccaggccgaggtggagtcggacaccaggatccagctctcgtggctgctgccccctcaggagcggatcatcatgtatgaactggtgtactgggcggcagaggacgaagaccaacagcacaaggtcaccttcgacccaacctcctcctacacactagaggacctgaagcctgacacactctaccgcttccagctggctgcacgctcggatatgggggtgggcgtcttcacccccaccattgaggcccgcacagcccagtccaccccctccgcccctccccagaaggtgatgtgtgtgagcatgggctccaccacggtccgggtaagttgggtcccgccgcctgccgacagccgcaacggcgttatcacccagtactccgtggcctacgaggcggtggacggcgaggaccgcgggcggcatgtggtggatggcatcagccgtgagcactccagctgggacctggtgggcctggagaagtggacggagtaccgggtgtgggtgcgggcacacacagacgtgggccccggccccgagagcagcccggtgctggtgcgcaccgatgaggacgtgcccagcgggcctccgcggaaggtggaggtggagccactgaactccactgctgtgcatgtctactggaagctgcctgtccccagcaagcagcatggccagatccgcggctaccaggtcacctacgtgcggctggagaatggcgagccccgtggactccccatcatccaagacgtcatgctagccgaggcccaggaaaccactatcagcggcctgaccccggagaccacctactccgttactgttgctgcctataccaccaagggggatggtgcccgcagcaagcccaaaattgtcactacaacaggtgcagtcccaggccggcccaccatgatgatcagcaccacggccatgaacactgcgctgctccagtggcacccacccaaggaactgcctggcgagctgctgggctaccggctgcagtactgccgggccgacgaggcgcggcccaacaccatagatttcggcaaggatgaccagcacttcacagtcaccggcctgcacaaggggaccacctacatcttccggcttgctgccaagaaccgggctggcttgggtgaggagttcgagaaggagatcaggacccccgaggacctgcccagcggcttcccccaaaacctgcatgtgacaggactgaccacgtctaccacagaactggcctgggacccgccagtgctggcggagaggaacgggcgcatcatcagctacaccgtggtgttccgagacatcaacagccaacaggagctgcagaacatcacgacagacacccgctttacccttactggcctcaagccagacaccacttacgacatcaaggtccgcgcatggaccagcaaaggctctggcccactcagccccagcatccagtcccggaccatgccggtggagcaagtgtttgccaagaacttccgggtggcggctgcaatgaagacgtctgtgctgctcagctgggaggttcccgactcctataagtcagctgtgccctttaagattctgtacaatgggcagagtgtggaggtggacgggcactcgatgcggaagctgatcgcagacctgcagcccaacacagagtactcgtttgtgctgatgaaccgtggcagcagcgcagggggcctgcagcacctggtgtccatccgcacagcccccgacctcctgcctcacaagccgctgcctgcctctgcctacatagaggacggccgcttcgatctctccatgccccatgtgcaagacccctcgcttgtcaggtggttctacattgttgtggtacccattgaccgtgtgggcgggagcatgctgacgccaaggtggagcacacccgaggaactggagctggacgagcttctagaagccatcgagcaaggcggagaggagcagcggcggcggcggcggcaggcagaacgtctgaagccatatgtggctgctcaactggatgtgctcccggagacctttaccttgggggacaagaagaactaccggggcttctacaaccggcccctgtctccggacttgagctaccagtgctttgtgcttgcctccttgaaggaacccatggaccagaagcgctatgcctccagcccctactcggatgagatcgtggtccaggtgacaccagcccagcagcaggaggagccggagatgctgtgggtgacgggtcccgtgctggcagtcatcctcatcatcctcattgtcatcgccatcctcttgttcaaaaggaaaaggacccactctccgtcctctaaggatgagcagtcgatcggactgaaggactccttgctggcccactcctctgaccctgtggagatgcggaggctcaactaccagaccccaggtatgcgagaccacccacccatccccatcaccgacctggcggacaacatcgagcgcctcaaagccaacgatggcctcaagttctcccaggagtatgagtccatcgaccctggacagcagttcacgtgggagaattcaaacctggaggtgaacaagcccaagaaccgctatgcgaatgtcatcgcctacgaccactctcgagtcatccttacctctatcgatggcgtccccgggagtgactacatcaatgccaactacatcgatggctaccgcaagcagaatgcctacatcgccacgcagggccccctgcccgagaccatgggcgatttctggagaatggtgtgggaacagcgcacggccactgtggtcatgatgacacggctggaggagaagtcccgggtaaaatgtgatcagtactggccagcccgtggcaccgagacctgtggccttattcaggtgaccctgttggacacagtggagctggccacatacactgtgcgcaccttcgcactccacaagagtggctccagtgagaagcgcgagctgcgtcagtttcagttcatggcctggccagaccatggagttcctgagtacccaactcccatcctggccttcctacgacgggtcaaggcctgcaaccccctagacgcagggcccatggtggtgcactgcagcgcgggcgtgggccgcaccggctgcttcatcgtgattgatgccatgttggagcggatgaagcacgagaagacggtggacatctatggccacgtgacctgcatgcgatcacagaggaactacatggtgcagacggaggaccagtacgtgttcatccatgaggcgctgctggaggctgccacgtgcggccacacagaggtgcctgcccgcaacctgtatgcccacatccagaagctgggccaagtgcctccaggggagagtgtgaccgccatggagctcgagttcaagttgctggccagctccaaggcccacacgtcccgcttcatcagcgccaacctgccctgcaacaagttcaagaaccggctggtgaacatcatgccctacgaattgacccgtgtgtgtctgcagcccatccgtggtgtggagggctctgactacatcaatgccagcttcctggatggttatagacagcagaaggcctacatagctacacaggggcctctggcagagagcaccgaggacttctggcgcatgctatgggagcacaattccaccatcatcgtcatgctgaccaagcttcgggagatgggcagggagaaatgccaccagtactggccagcagagcgctctgctcgctaccagtactttgttgttgacccgatggctgagtacaacatgccccagtatatcctgcgtgagttcaaggtcacggatgcccgggatgggcagtcaaggacaatccggcagttccagttcacagactggccagagcagggcgtgcccaagacaggcgagggattcattgacttcatcgggcaggtgcataagaccaaggagcagtttggacaggatgggcctatcacggtgcactgcagtgctggcgtgggccgcaccggggtgttcatcactctgagcatcgtcctggagcgcatgcgctatgagggcgtggtcgacatgtttcagaccgtgaagaccctgcgtacacagcgtcctgccatggtgcagacagaggaccagtatcagctgtgctaccgtgcggccctggagtacctcggcagctttgaccactatgcaacgtaactaccgctcccctctcctccgccacccccgccgtggggctccggaggggacccagctcctctgagccataccgaccatcgtccagccctcctacgcagatgctgtcactggcagagcacagcccacggggatcacagcgtttcaggaacgttgccacaccaatcagagagcctagaacatccctgggcaagtggatggcccagcaggcaggcactgtggcccttctgtccaccagacccacctggagcccgcttcaagctctctgttgcgctcccgcatttctcatgcttcttctcatggggtggggttggggcaaagcctcctttttaatacattaagtggggtagactgagggattttagcctcttccctctgatttttcctttcgcgaatccgtatctgcagaatgggccactgtaggggttggggtttattttgttttgtttttttttttcttgagttcactttggatccttattttgtatgacttctgctgaaggacagaacattgccttcctcgtgcagagctggggctgccagcctgagcggaggctcggccgtgggccgggaggcagtgctgatccggctgctcctccagcccttcagacgagatcctgtttcagctaaatgcagggaaactcaatgtttttttaagttttgttttccctttaaagcctttttttaggccacattgacagtggtgggcggggagaagatagggaacactcatccctggtcgtctatcccagtgtgtgtttaacattcacagcccagaaccacagatgtgtctgggagagcctggcaaggcattcctcatcaccatcgtgtttgcaaaggttaaaacaaaaacaaaaaaccacaaaaataaaaaacaaaaaaaacaaaaaacccaagaaaaaaaaaaagagtcagcccttggcttctgcttcaaaccctcaagaggggaagcaactccgtgtgcctggggttcccgagggagctgctggctgacctgggcccacagagcctggctttggtccccagcattgcagtatggtgtggtgtttgtaggctgtggggtctggctgtgtggccaaggtgaatagcacaggttagggtgtgtgccacaccccatgcacctcagggccaagcgggggcgtggctggcctttcaggtccaggccagtgggcctggtagcacatgtctgtcctcagagcaggggccagatgattttcctccctggtttgcagctgttttcaaagcccccgataatcgctcttttccactccaagatgccctcataaaccaatgtggcaagactactggacttctatcaatggtactctaatcagtccttattatcccagcttgctgaggggcagggagagcgcctcttcctctgggcagcgctatctagataggtaagtgggggcggggaagggtgcatagctgttttagctgagggacgtggtgccgacgtccccaaacctagctaggctaagtcaagatcaacattccagggttggtaatgttggatgatgaaacattcatttttaccttgtggatgctagtgctgtagagttcactgttgtacacagtctgttttctatttgttaagaaaaactacagcatcattgcataattcttgatggtaataaatttgaataatcagatttcttacaaa

SEQ ID NO: 451468 - DNA, 5302 bp, Homo sapiens
gcatcctacctgcctgcttcctctccagcagaggccaccattgtatagccccaccttccacaacccctggccttgtgtgccccggggctcccctcaggctagggtcctgaggtccctgacaaggtctggcctctccctgcattcttgtgatgggaacgaacccctcctcctccctcaggaaaccactatcagcggcctgaccccggagaccacctactccgttactgttgctgcctataccaccaagggggatggtgcccgcagcaagcccaaaattgtcactacaacaggtgcaggtgagtgaggggtcaggacggacctgagggtggggcagcaggagggcagcgccagagcccagcccgtggtccttcagtcccaggccggcccaccatgatgatcagcaccacggccatgaacactgcgctgctccagtggcacccacccaaggaactgcctggcgagctgctgggctaccggctgcagtactgccgggccgacgaggcgcggcccaacaccatagatttcggcaaggatgaccagcacttcacagtcaccggcctgcacaaggggaccacctacatcttccggcttgctgccaagaaccgggctggcttgggtgaggagttcgagaaggagatcaggacccccgaggacctgcccagcggcttcccccaaaacctgcatgtgacaggactgaccacgtctaccacagaactggcctgggacccgccagtgctggcggagaggaacgggcgcatcatcagctacaccgtggtgttccgagacatcaacagccaacaggagctgcagaacatcacgacagacacccgctttacccttactggcctcaagccagacaccacttacgacatcaaggtccgcgcatggaccagcaaaggctctggcccactcagccccagcatccagtcccggaccatgccggtggagcaagtgtttgccaagaacttccgggtggcggctgcaatgaagacgtctgtgctgctcagctgggaggttcccgactcctataagtcagctgtgccctttaagattctgtacaatgggcagagtgtggaggtggacgggcactcgatgcggaagctgatcgcagacctgcagcccaacacagagtactcgtttgtgctgatgaaccgtggcagcagcgcagggggcctgcagcacctggtgtccatccgcacagcccccgacctcctgcctcacaagccgctgcctgcctctgcctacatagaggacggccgcttcgatctctccatgccccatgtgcaagacccctcgcttgtcaggtggttctacattgttgtggtacccattgaccgtgtgggcgggagcatgctgacgccaaggtggagcacacccgaggaactggagctggacgagcttctagaagccatcgagcaaggcggagaggagcagcggcggcggcggcggcaggcagaacgtctgaagccatatgtggctgctcaactggatgtgctcccggagacctttaccttgggggacaagaagaactaccggggcttctacaaccggcccctgtctccggacttgagctaccagtgctttgtgcttgcctccttgaaggaacccatggaccagaagcgctatgcctccagcccctactcggatgagatcgtggtccaggtgacaccagcccagcagcaggaggagccggagatgctgtgggtgacgggtcccgtgctggcagtcatcctcatcatcctcattgtcatcgccatcctcttgttcaaaaggaaaaggacccactctccgtcctctaaggatgagcagtcgatcggactgaaggactccttgctggcccactcctctgaccctgtggagatgcggaggctcaactaccagaccccaggtatgcgagaccacccacccatccccatcaccgacctggcggacaacatcgagcgcctcaaagccaacgatggcctcaagttctcccaggagtatgagtccatcgaccctggacagcagttcacgtgggagaattcaaacctggaggtgaacaagcccaagaaccgctatgcgaatgtcatcgcctacgaccactctcgagtcatccttacctctatcgatggcgtccccgggagtgactacatcaatgccaactacatcgatggctaccgcaagcagaatgcctacatcgccacgcagggccccctgcccgagaccatgggcgatttctggagaatggtgtgggaacagcgcacggccactgtggtcatgatgacacggctggaggagaagtcccgggtaaaatgtgatcagtactggccagcccgtggcaccgagacctgtggccttattcaggtgaccctgttggacacagtggagctggccacatacactgtgcgcaccttcgcactccacaagagtggctccagtgagaagcgcgagctgcgtcagtttcagttcatggcctggccagaccatggagttcctgagtacccaactcccatcctggccttcctacgacgggtcaaggcctgcaaccccctagacgcagggcccatggtggtgcactgcagcgcgggcgtgggccgcaccggctgcttcatcgtgattgatgccatgttggagcggatgaagcacgagaagacggtggacatctatggccacgtgacctgcatgcgatcacagaggaactacatggtgcagacggaggaccagtacgtgttcatccatgaggcgctgctggaggctgccacgtgcggccacacagaggtgcctgcccgcaacctgtatgcccacatccagaagctgggccaagtgcctccaggggagagtgtgaccgccatggagctcgagttcaagttgctggccagctccaaggcccacacgtcccgcttcatcagcgccaacctgccctgcaacaagttcaagaaccggctggtgaacatcatgccctacgaattgacccgtgtgtgtctgcagcccatccgtggtgtggagggctctgactacatcaatgccagcttcctggatggttatagacagcagaaggcctacatagctacacaggggcctctggcagagagcaccgaggacttctggcgcatgctatgggagcacaattccaccatcatcgtcatgctgaccaagcttcgggagatgggcagggagaaatgccaccagtactggccagcagagcgctctgctcgctaccagtactttgttgttgacccgatggctgagtacaacatgccccagtatatcctgcgtgagttcaaggtcacggatgcccgggatgggcagtcaaggacaatccggcagttccagttcacagactggccagagcagggcgtgcccaagacaggcgagggattcattgacttcatcgggcaggtgcataagaccaaggagcagtttggacaggatgggcctatcacggtgcactgcagtgctggcgtgggccgcaccggggtgttcatcactctgagcatcgtcctggagcgcatgcgctatgagggcgtggtcgacatgtttcagaccgtgaagaccctgcgtacacagcgtcctgccatggtgcagacagaggaccagtatcagctgtgctaccgtgcggccctggagtacctcggcagctttgaccactatgcaacgtaactaccgctcccctctcctccgccacccccgccgtggggctccggaggggacccagctcctctgagccataccgaccatcgtccagccctcctacgcagatgctgtcactggcagagcacagcccacggggatcacagcgtttcaggaacgttgccacaccaatcagagagcctagaacatccctgggcaagtggatggcccagcaggcaggcactgtggcccttctgtccaccagacccacctggagcccgcttcaagctctctgttgcgctcccgcatttctcatgcttcttctcatggggtggggttggggcaaagcctcctttttaatacattaagtggggtagactgagggattttagcctcttccctctgatttttcctttcgcgaatccgtatctgcagaatgggccactgtaggggttggggtttattttgttttgtttttttttttcttgagttcactttggatccttattttgtatgacttctgctgaaggacagaacattgccttcctcgtgcagagctggggctgccagcctgagcggaggctcggccgtgggccgggaggcagtgctgatccggctgctcctccagcccttcagacgagatcctgtttcagctaaatgcagggaaactcaatgtttttttaagttttgttttccctttaaagcctttttttaggccacattgacagtggtgggcggggagaagatagggaacactcatccctggtcgtctatcccagtgtgtgtttaacattcacagcccagaaccacagatgtgtctgggagagcctggcaaggcattcctcatcaccatcgtgtttgcaaaggttaaaacaaaaacaaaaaaccacaaaaataaaaaacaaaaaaaacaaaaaacccaagaaaaaaaaaaagagtcagcccttggcttctgcttcaaaccctcaagaggggaagcaactccgtgtgcctggggttcccgagggagctgctggctgacctgggcccacagagcctggctttggtccccagcattgcagtatggtgtggtgtttgtaggctgtggggtctggctgtgtggccaaggtgaatagcacaggttagggtgtgtgccacaccccatgcacctcagggccaagcgggggcgtggctggcctttcaggtccaggccagtgggcctggtagcacatgtctgtcctcagagcaggggccagatgattttcctccctggtttgcagctgttttcaaagcccccgataatcgctcttttccactccaagatgccctcataaaccaatgtggcaagactactggacttctatcaatggtactctaatcagtccttattatcccagcttgctgaggggcagggagagcgcctcttcctctgggcagcgctatctagataggtaagtgggggcggggaagggtgcatagctgttttagctgagggacgtggtgccgacgtccccaaacctagctaggctaagtcaagatcaacattccagggttggtaatgttggatgatgaaacattcatttttaccttgtggatgctagtgctgtagagttcactgttgtacacagtctgttttctatttgttaagaaaaactacagcatcattgcataattcttgatggtaataaatttgaataatcagatttcttacaaa

SEQ ID NO: 451469 - DNA, 7818 bp, Homo sapiens
  misc_feature (18)..(18): n is a, c, g, or t
atgtcggtactgcatttntccatggctatcaggaggcggcggcggcagaggagtgggagcagcggccctagcggcttgcggggggacatgcggaccgacggcccctggataggcggaaggagtggaggccctggtgcccggcccttggtgctgagtatccagcaagagtgaccggggtgaagaagcaaagactcggttgattgtcctgggctgtggctggctgtggagctagagccctggatggcccctgagccagccccagggaggacgatggtgccccttgtgcctgcactggtgatgcttggtttggtggcaggcgcccatggtgacagcaaacctgtcttcattaaagtccctgaggaccagactgggctgtcaggaggggtagcctccttcgtgtgccaagctacaggagaacccaagccgcgcatcacatggatgaagaaggggaagaaagtcagctcccagcgcttcgaggtcattgagtttgatgatggggcagggtcagtgcttcggatccagccattgcgggtgcagcgagatgaagccatctatgagtgtacagctactaacagcctgggtgagatcaacactagtgccaagctctcagtgctcgaagaggaacagctgccccctgggttcccttccatcgacatggggcctcagctgaaggtggtggagaaggcacgcacagccaccatgctatgtgccgcaggcggaaatccagaccctgagatttcttggttcaaggacttccttcctgtagaccctgccacgagcaacggccgcatcaagcagctgcgttcaggtgccttgcagatagagagcagtgaggaatccgaccaaggcaagtacgagtgtgtggcgaccaactcggcaggcacacgttactcagcccctgcgaacctgtatgtgcgagtgcgccgcgtggctcctcgtttctccatccctcccagcagccaggaggtgatgccaggcggcagcgtgaacctgacatgcgtggcagtgggtgcacccatgccctacgtgaagtggatgatgggggccgaggagctcaccaaggaggatgagatgccagttggccgcaacgtcctggagctcagcaatgtcgtacgctctgccaactacacctgtgtggccatctcctcgctgggcatgatcgaggccacagcccaggtcacagtgaaagctcttccaaagcctccgattgatcttgtggtgacagagacaactgccaccagtgtcaccctcacctgggactctgggaactcggagcctgtaacctactatggcatccagtaccgcgcagcgggcacggagggcccctttcaggaggtggatggtgtggccaccacccgctacagcattggcggcctcagccctttctcggaatatgccttccgcgtgctggcggtgaacagcatcgggcgagggccgcccagcgaggcagtgcgggcacgcacgggagaacaggcgccctccagcccaccgcgccgcgtgcaggcacgcatgctgagcgccagcaccatgctggtgcagtgggagcctcccgaggagcccaacggcctggtgcggggataccgcgtctactatactccggactcccgccgccccccgaacgcctggcacaagcacaacaccgacgcggggctcctcacgaccgtgggcagcctgctgcctggcatcacctacagcctgcgcgtgcttgccttcaccgccgtgggcgatggccctcccagccccaccatccaggtcaagacgcagcagggagtgcctgcccagcccgcggacttccaggccgaggtggagtcggacaccaggatccagctctcgtggctgctgccccctcaggagcggatcatcatgtatgaactggtgtactgggcggcagaggacgaagaccaacagcacaaggtcaccttcgacccaacctcctcctacacactagaggacctgaagcctgacacactctaccgcttccagctggctgcacgctcggatatgggggtgggcgtcttcacccccaccattgaggcccgcacagcccagtccaccccctccgcccctccccagaaggtgatgtgtgtgagcatgggctccaccacggtccgggtaagttgggtcccgccgcctgccgacagccgcaacggcgttatcacccagtactccgtggcctacgaggcggtggacggcgaggaccgcgggcggcatgtggtggatggcatcagccgtgagcactccagctgggacctggtgggcctggagaagtggacggagtaccgggtgtgggtgcgggcacacacagacgtgggccccggccccgagagcagcccggtgctggtgcgcaccgatgaggacgtgcccagcgggcctccgcggaaggtggaggtggagccactgaactccactgctgtgcatgtctactggaagctgcctgtccccagcaagcagcatggccagatccgcggctaccaggtcacctacgtgcggctggagaatggcgagccccgtggactccccatcatccaagacgtcatgctagccgaggcccaggaaaccactatcagcggcctgaccccggagaccacctactccgttactgttgctgcctataccaccaagggggatggtgcccgcagcaagcccaaaattgtcactacaacaggtgcagtcccaggccggcccaccatgatgatcagcaccacggccatgaacactgcgctgctccagtggcacccacccaaggaactgcctggcgagctgctgggctaccggctgcagtactgccgggccgacgaggcgcggcccaacaccatagatttcggcaaggatgaccagcacttcacagtcaccggcctgcacaaggggaccacctacatcttccggcttgctgccaagaaccgggctggcttgggtgaggagttcgagaaggagatcaggacccccgaggacctgcccagcggcttcccccaaaacctgcatgtgacaggactgaccacgtctaccacagaactggcctgggacccgccagtgctggcggagaggaacgggcgcatcatcagctacaccgtggtgttccgagacatcaacagccaacaggagctgcagaacatcacgacagacacccgctttacccttactggcctcaagccagacaccacttacgacatcaaggtccgcgcatggaccagcaaaggctctggcccactcagccccagcatccagtcccggaccatgccggtggagcaagtgtttgccaagaacttccgggtggcggctgcaatgaagacgtctgtgctgctcagctgggaggttcccgactcctataagtcagctgtgccctttaagattctgtacaatgggcagagtgtggaggtggacgggcactcgatgcggaagctgatcgcagacctgcagcccaacacagagtactcgtttgtgctgatgaaccgtggcagcagcgcagggggcctgcagcacctggtgtccatccgcacagcccccgacctcctgcctcacaagccgctgcctgcctctgcctacatagaggacggccgcttcgatctctccatgccccatgtgcaagacccctcgcttgtcaggtggttctacattgttgtggtacccattgaccgtgtgggcgggagcatgctgacgccaaggtggagcacacccgaggaactggagctggacgagcttctagaagccatcgagcaaggcggagaggagcagcggcggcggcggcggcaggcagaacgtctgaagccatatgtggctgctcaactggatgtgctcccggagacctttaccttgggggacaagaagaactaccggggcttctacaaccggcccctgtctccggacttgagctaccagtgctttgtgcttgcctccttgaaggaacccatggaccagaagcgctatgcctccagcccctactcggatgagatcgtggtccaggtgacaccagcccagcagcaggaggagccggagatgctgtgggtgacgggtcccgtgctggcagtcatcctcatcatcctcattgtcatcgccatcctcttgttcaaaaggaaaaggacccactctccgtcctctaaggatgagcagtcgatcggactgaaggactccttgctggcccactcctctgaccctgtggagatgcggaggctcaactaccagaccccaggtatgcgagaccacccacccatccccatcaccgacctggcggacaacatcgagcgcctcaaagccaacgatggcctcaagttctcccaggagtatgagtccatcgaccctggacagcagttcacgtgggagaattcaaacctggaggtgaacaagcccaagaaccgctatgcgaatgtcatcgcctacgaccactctcgagtcatccttacctctatcgatggcgtccccgggagtgactacatcaatgccaactacatcgatggctaccgcaagcagaatgcctacatcgccacgcagggccccctgcccgagaccatgggcgatttctggagaatggtgtgggaacagcgcacggccactgtggtcatgatgacacggctggaggagaagtcccgggtaaaatgtgatcagtactggccagcccgtggcaccgagacctgtggccttattcaggtgaccctgttggacacagtggagctggccacatacactgtgcgcaccttcgcactccacaagagtggctccagtgagaagcgcgagctgcgtcagtttcagttcatggcctggccagaccatggagttcctgagtacccaactcccatcctggccttcctacgacgggtcaaggcctgcaaccccctagacgcagggcccatggtggtgcactgcagcgcgggcgtgggccgcaccggctgcttcatcgtgattgatgccatgttggagcggatgaagcacgagaagacggtggacatctatggccacgtgacctgcatgcgatcacagaggaactacatggtgcagacggaggaccagtacgtgttcatccatgaggcgctgctggaggctgccacgtgcggccacacagaggtgcctgcccgcaacctgtatgcccacatccagaagctgggccaagtgcctccaggggagagtgtgaccgccatggagctcgagttcaagttgctggccagctccaaggcccacacgtcccgcttcatcagcgccaacctgccctgcaacaagttcaagaaccggctggtgaacatcatgccctacgaattgacccgtgtgtgtctgcagcccatccgtggtgtggagggctctgactacatcaatgccagcttcctggatggttatagacagcagaaggcctacatagctacacaggggcctctggcagagagcaccgaggacttctggcgcatgctatgggagcacaattccaccatcatcgtcatgctgaccaagcttcgggagatgggcagggagaaatgccaccagtactggccagcagagcgctctgctcgctaccagtactttgttgttgacccgatggctgagtacaacatgccccagtatatcctgcgtgagttcaaggtcacggatgcccgggatgggcagtcaaggacaatccggcagttccagttcacagactggccagagcagggcgtgcccaagacaggcgagggattcattgacttcatcgggcaggtgcataagaccaaggagcagtttggacaggatgggcctatcacggtgcactgcagtgctggcgtgggccgcaccggggtgttcatcactctgagcatcgtcctggagcgcatgcgctatgagggcgtggtcgacatgtttcagaccgtgaagaccctgcgtacacagcgtcctgccatggtgcagacagaggaccagtatcagctgtgctaccgtgcggccctggagtacctcggcagctttgaccactatgcaacgtaactaccgctcccctctcctccgccacccccgccgtggggctccggaggggacccagctcctctgagccataccgaccatcgtccagccctcctacgcagatgctgtcactggcagagcacagcccacggggatcacagcgtttcaggaacgttgccacaccaatcagagagcctagaacatccctgggcaagtggatggcccagcaggcaggcactgtggcccttctgtccaccagacccacctggagcccgcttcaagctctctgttgcgctcccgcatttctcatgcttcttctcatggggtggggttggggcaaagcctcctttttaatacattaagtggggtagactgagggattttagcctcttccctctgatttttcctttcgcgaatccgtatctgcagaatgggccactgtaggggttggggtttattttgttttgtttttttttttcttgagttcactttggatccttattttgtatgacttctgctgaaggacagaacattgccttcctcgtgcagagctggggctgccagcctgagcggaggctcggccgtgggccgggaggcagtgctgatccggctgctcctccagcccttcagacgagatcctgtttcagctaaatgcagggaaactcaatgtttttttaagttttgttttccctttaaagcctttttttaggccacattgacagtggtgggcggggagaagatagggaacactcatccctggtcgtctatcccagtgtgtgtttaacattcacagcccagaaccacagatgtgtctgggagagcctggcaaggcattcctcatcaccatcgtgtttgcaaaggttaaaacaaaaacaaaaaaccacaaaaataaaaaacaaaaaaaacaaaaaacccaagaaaaaaaaaaagagtcagcccttggcttctgcttcaaaccctcaagaggggaagcaactccgtgtgcctggggttcccgagggagctgctggctgacctgggcccacagagcctggctttggtccccagcattgcagtatggtgtggtgtttgtaggctgtggggtctggctgtgtggccaaggtgaatagcacaggttagggtgtgtgccacaccccatgcacctcagggccaagcgggggcgtggctggcctttcaggtccaggccagtgggcctggtagcacatgtctgtcctcagagcaggggccagatgattttcctccctggtttgcagctgttttcaaagcccccgataatcgctcttttccactccaagatgccctcataaaccaatgtggcaagactactggacttctatcaatggtactctaatcagtccttattatcccagcttgctgaggggcagggagagcgcctcttcctctgggcagcgctatctagataggtaagtgggggcggggaagggtgcatagctgttttagctgagggacgtggtgccgacgtccccaaacctagctaggctaagtcaagatcaacattccagggttggtaatgttggatgatgaaacattcatttttaccttgtggatgctagtgctgtagagttcactgttgtacacagtctgttttctatttgttaagaaaaactacagcatcattgcataattcttgatggtaataaatttgaataatcagatttcttacaaaaaaaaaaaaaaaaaaaaaaattgttgcgcggcggccctgggaccccaaaaaaagtttttaaaaccattcggtggggcgcggcgccccgtggttgtcggacacggggccaacctggcccagagggccccgggccggcaggctgtggtccccccaaaaaaaggcgggggccggggtggcacaccaggggctcgggccccggcttcagggccagcgacccg

SEQ ID NO: 451470 - DNA, 7596 bp, Homo sapiens
  misc_feature (18)..(18): n is a, c, g, or t
atgtcggtactgcatttntccatggctatcaggaggcggcggcggcagaggagtgggagcagcggccctagcggcttgcggggggacatgcggaccgacggcccctggataggcggaaggagtggaggccctggtgcccggcccttggtgctgagtatccagcaagagtgaccggggtgaagaagcaaagactcggttgattgtcctgggctgtggctggctgtggagctagagccctggatggcccctgagccagccccagggaggacgatggtgccccttgtgcctgcactggtgatgcttggtttggtggcaggcgcccatggtgacagcaaacctgtcttcattaaagtccctgaggaccagactgggctgtcaggaggggtagcctccttcgtgtgccaagctacaggagaacccaagccgcgcatcacatggatgaagaaggggaagaaagtcagctcccagcgcttcgaggtcattgagtttgatgatggggcagggtcagtgcttcggatccagccattgcgggtgcagcgagatgaagccatctatgagtgtacagctactaacagcctgggtgagatcaacactagtgccaagctctcagtgctcgaagaggaacagctgccccctgggttcccttccatcgacatggggcctcagctgaaggtggtggagaaggcacgcacagccaccatgctatgtgccgcaggcggaaatccagaccctgagatttcttggttcaaggacttccttcctgtagaccctgccacgagcaacggccgcatcaagcagctgcgttcaggtgccttgcagatagagagcagtgaggaatccgaccaaggcaagtacgagtgtgtggcgaccaactcggcaggcacacgttactcagcccctgcgaacctgtatgtgcgagtgcgccgcgtggctcctcgtttctccatccctcccagcagccaggaggtgatgccaggcggcagcgtgaacctgacatgcgtggcagtgggtgcacccatgccctacgtgaagtggatgatgggggccgaggagctcaccaaggaggatgagatgccagttggccgcaacgtcctggagctcagcaatgtcgtacgctctgccaactacacctgtgtggccatctcctcgctgggcatgatcgaggccacagcccaggtcacagtgaaagctcttccaaagcctccgattgatcttgtggtgacagagacaactgccaccagtgtcaccctcacctgggactctgggaactcggagcctgtaacctactatggcatccagtaccgcgcagcgggcacggagggcccctttcaggaggtggatggtgtggccaccacccgctacagcattggcggcctcagccctttctcggaatatgccttccgcgtgctggcggtgaacagcatcgggcgagggccgcccagcgaggcagtgcgggcacgcacgggagaacaggcgccctccagcccaccgcgccgcgtgcaggcacgcatgctgagcgccagcaccatgctggtgcagtgggagcctcccgaggagcccaacggcctggtgcggggataccgcgtctactatactccggactcccgccgccccccgaacgcctggcacaagcacaacaccgacgcggggctcctcacgaccgtgggcagcctgctgcctggcatcacctacagcctgcgcgtgcttgccttcaccgccgtgggcgatggccctcccagccccaccatccaggtcaagacgcagcagggagtgcctgcccagcccgcggacttccaggccgaggtggagtcggacaccaggatccagctctcgtggctgctgccccctcaggagcggatcatcatgtatgaactggtgtactgggcggcagaggacgaagaccaacagcacaaggtcaccttcgacccaacctcctcctacacactagaggacctgaagcctgacacactctaccgcttccagctggctgcacgctcggatatgggggtgggcgtcttcacccccaccattgaggcccgcacagcccagtccaccccctccgcccctccccagaaggtgatgtgtgtgagcatgggctccaccacggtccgggtaagttgggtcccgccgcctgccgacagccgcaacggcgttatcacccagtactccgtggcctacgaggcggtggacggcgaggaccgcgggcggcatgtggtggatggcatcagccgtgagcactccagctgggacctggtgggcctggagaagtggacggagtaccgggtgtgggtgcgggcacacacagacgtgggccccggccccgagagcagcccggtgctggtgcgcaccgatgaggacgtgcccagcgggcctccgcggaaggtggaggtggagccactgaactccactgctgtgcatgtctactggaagctgcctgtccccagcaagcagcatggccagatccgcggctaccaggtcacctacgtgcggctggagaatggcgagccccgtggactccccatcatccaagacgtcatgctagccgaggcccaggaaaccactatcagcggcctgaccccggagaccacctactccgttactgttgctgcctataccaccaagggggatggtgcccgcagcaagcccaaaattgtcactacaacaggtgcagtcccaggccggcccaccatgatgatcagcaccacggccatgaacactgcgctgctccagtggcacccacccaaggaactgcctggcgagctgctgggctaccggctgcagtactgccgggccgacgaggcgcggcccaacaccatagatttcggcaaggatgaccagcacttcacagtcaccggcctgcacaaggggaccacctacatcttccggcttgctgccaagaaccgggctggcttgggtgaggagttcgagaaggagatcaggacccccgaggacctgcccagcggcttcccccaaaacctgcatgtgacaggactgaccacgtctaccacagaactggcctgggacccgccagtgctggcggagaggaacgggcgcatcatcagctacaccgtggtgttccgagacatcaacagccaacaggagctgcagaacatcacgacagacacccgctttacccttactggcctcaagccagacaccacttacgacatcaaggtccgcgcatggaccagcaaaggctctggcccactcagccccagcatccagtcccggaccatgccggtggagcaagtgtttgccaagaacttccgggtggcggctgcaatgaagacgtctgtgctgctcagctgggaggttcccgactcctataagtcagctgtgccctttaagattctgtacaatgggcagagtgtggaggtggacgggcactcgatgcggaagctgatcgcagacctgcagcccaacacagagtactcgtttgtgctgatgaaccgtggcagcagcgcagggggcctgcagcacctggtgtccatccgcacagcccccgacctcctgcctcacaagccgctgcctgcctctgcctacatagaggacggccgcttcgatctctccatgccccatgtgcaagacccctcgcttgtcaggtggttctacattgttgtggtacccattgaccgtgtgggcgggagcatgctgacgccaaggtggagcacacccgaggaactggagctggacgagcttctagaagccatcgagcaaggcggagaggagcagcggcggcggcggcggcaggcagaacgtctgaagccatatgtggctgctcaactggatgtgctcccggagacctttaccttgggggacaagaagaactaccggggcttctacaaccggcccctgtctccggacttgagctaccagtgctttgtgcttgcctccttgaaggaacccatggaccagaagcgctatgcctccagcccctactcggatgagatcgtggtccaggtgacaccagcccagcagcaggaggagccggagatgctgtgggtgacgggtcccgtgctggcagtcatcctcatcatcctcattgtcatcgccatcctcttgttcaaaaggaaaaggacccactctccgtcctctaaggatgagcagtcgatcggactgaaggactccttgctggcccactcctctgaccctgtggagatgcggaggctcaactaccagaccccaggtatgcgagaccacccacccatccccatcaccgacctggcggacaacatcgagcgcctcaaagccaacgatggcctcaagttctcccaggagtatgagtccatcgaccctggacagcagttcacgtgggagaattcaaacctggaggtgaacaagcccaagaaccgctatgcgaatgtcatcgcctacgaccactctcgagtcatccttacctctatcgatggcgtccccgggagtgactacatcaatgccaactacatcgatggctaccgcaagcagaatgcctacatcgccacgcagggccccctgcccgagaccatgggcgatttctggagaatggtgtgggaacagcgcacggccactgtggtcatgatgacacggctggaggagaagtcccgggtaaaatgtgatcagtactggccagcccgtggcaccgagacctgtggccttattcaggtgaccctgttggacacagtggagctggccacatacactgtgcgcaccttcgcactccacaagagtggctccagtgagaagcgcgagctgcgtcagtttcagttcatggcctggccagaccatggagttcctgagtacccaactcccatcctggccttcctacgacgggtcaaggcctgcaaccccctagacgcagggcccatggtggtgcactgcagcgcgggcgtgggccgcaccggctgcttcatcgtgattgatgccatgttggagcggatgaagcacgagaagacggtggacatctatggccacgtgacctgcatgcgatcacagaggaactacatggtgcagacggaggaccagtacgtgttcatccatgaggcgctgctggaggctgccacgtgcggccacacagaggtgcctgcccgcaacctgtatgcccacatccagaagctgggccaagtgcctccaggggagagtgtgaccgccatggagctcgagttcaagttgctggccagctccaaggcccacacgtcccgcttcatcagcgccaacctgccctgcaacaagttcaagaaccggctggtgaacatcatgccctacgaattgacccgtgtgtgtctgcagcccatccgtggtgtggagggctctgactacatcaatgccagcttcctggatggttatagacagcagaaggcctacatagctacacaggggcctctggcagagagcaccgaggacttctggcgcatgctatgggagcacaattccaccatcatcgtcatgctgaccaagcttcgggagatgggcagggagaaatgccaccagtactggccagcagagcgctctgctcgctaccagtactttgttgttgacccgatggctgagtacaacatgccccagtatatcctgcgtgagttcaaggtcacggatgcccgggatgggcagtcaaggacaatccggcagttccagttcacagactggccagagcagggcgtgcccaagacaggcgagggattcattgacttcatcgggcaggtgcataagaccaaggagcagtttggacaggatgggcctatcacggtgcactgcagtgctggcgtgggccgcaccggggtgttcatcactctgagcatcgtcctggagcgcatgcgctatgagggcgtggtcgacatgtttcagaccgtgaagaccctgcgtacacagcgtcctgccatggtgcagacagaggaccagtatcagctgtgctaccgtgcggccctggagtacctcggcagctttgaccactatgcaacgtaactaccgctcccctctcctccgccacccccgccgtggggctccggaggggacccagctcctctgagccataccgaccatcgtccagccctcctacgcagatgctgtcactggcagagcacagcccacggggatcacagcgtttcaggaacgttgccacaccaatcagagagcctagaacatccctgggcaagtggatggcccagcaggcaggcactgtggcccttctgtccaccagacccacctggagcccgcttcaagctctctgttgcgctcccgcatttctcatgcttcttctcatggggtggggttggggcaaagcctcctttttaatacattaagtggggtagactgagggattttagcctcttccctctgatttttcctttcgcgaatccgtatctgcagaatgggccactgtaggggttggggtttattttgttttgtttttttttttcttgagttcactttggatccttattttgtatgacttctgctgaaggacagaacattgccttcctcgtgcagagctggggctgccagcctgagcggaggctcggccgtgggccgggaggcagtgctgatccggctgctcctccagcccttcagacgagatcctgtttcagctaaatgcagggaaactcaatgtttttttaagttttgttttccctttaaagcctttttttaggccacattgacagtggtgggcggggagaagatagggaacactcatccctggtcgtctatcccagtgtgtgtttaacattcacagcccagaaccacagatgtgtctgggagagcctggcaaggcattcctcatcaccatcgtgtttgcaaaggttaaaacaaaaacaaaaaaccacaaaaataaaaaacaaaaaaaacaaaaaacccaagaaaaaaaaaaagagtcagcccttggcttctgcttcaaaccctcaagaggggaagcaactccgtgtgcctggggttcccgagggagctgctggctgacctgggcccacagagcctggctttggtccccagcattgcagtatggtgtggtgtttgtaggctgtggggtctggctgtgtggccaaggtgaatagcacaggttagggtgtgtgccacaccccatgcacctcagggccaagcgggggcgtggctggcctttcaggtccaggccagtgggcctggtagcacatgtctgtcctcagagcaggggccagatgattttcctccctggtttgcagctgttttcaaagcccccgataatcgctcttttccactccaagatgccctcataaaccaatgtggcaagactactggacttctatcaatggtactctaatcagtccttattatcccagcttgctgaggggcagggagagcgcctcttcctctgggcagcgctatctagataggtaagtgggggcggggaagggtgcatagctgttttagctgagggacgtggtgccgacgtccccaaacctagctaggctaagtcaagatcaacattccagggttggtaatgttggatgatgaaacattcatttttaccttgtggatgctagtgctgtagagttcactgttgtacacagtctgttttctatttgttaagaaaaactacagcatcatctctggtggtaaatatgatatcaagtcccgtctcgtcctggcccc

SEQ ID NO: 451471 - DNA, 7385 bp, Homo sapiens
  misc_feature (18)..(18): n is a, c, g, or t
atgtcggtactgcatttntccatggctatcaggaggcggcggcggcagaggagtgggagcagcggccctagcggcttgcggggggacatgcggaccgacggcccctggataggcggaaggagtggaggccctggtgcccggcccttggtgctgagtatccagcaagagtgaccggggtgaagaagcaaagactcggttgattgtcctgggctgtggctggctgtggagctagagccctggatggcccctgagccagccccagggaggacgatggtgccccttgtgcctgcactggtgatgcttggtttggtggcaggcgcccatggtgacagcaaacctgtcttcattaaagtccctgaggaccagactgggctgtcaggaggggtagcctccttcgtgtgccaagctacaggagaacccaagccgcgcatcacatggatgaagaaggggaagaaagtcagctcccagcgcttcgaggtcattgagtttgatgatggggcagggtcagtgcttcggatccagccattgcgggtgcagcgagatgaagccatctatgagtgtacagctactaacagcctgggtgagatcaacactagtgccaagctctcagtgctcgaagaggaacagctgccccctgggttcccttccatcgacatggggcctcagctgaaggtggtggagaaggcacgcacagccaccatgctatgtgccgcaggcggaaatccagaccctgagatttcttggttcaaggacttccttcctgtagaccctgccacgagcaacggccgcatcaagcagctgcgttcaggtgccttgcagatagagagcagtgaggaatccgaccaaggcaagtacgagtgtgtggcgaccaactcggcaggcacacgttactcagcccctgcgaacctgtatgtgcgagtgcgccgcgtggctcctcgtttctccatccctcccagcagccaggaggtgatgccaggcggcagcgtgaacctgacatgcgtggcagtgggtgcacccatgccctacgtgaagtggatgatgggggccgaggagctcaccaaggaggatgagatgccagttggccgcaacgtcctggagctcagcaatgtcgtacgctctgccaactacacctgtgtggccatctcctcgctgggcatgatcgaggccacagcccaggtcacagtgaaagctcttccaaagcctccgattgatcttgtggtgacagagacaactgccaccagtgtcaccctcacctgggactctgggaactcggagcctgtaacctactatggcatccagtaccgcgcagcgggcacggagggcccctttcaggaggtggatggtgtggccaccacccgctacagcattggcggcctcagccctttctcggaatatgccttccgcgtgctggcggtgaacagcatcgggcgagggccgcccagcgaggcagtgcgggcacgcacgggagaacaggcgccctccagcccaccgcgccgcgtgcaggcacgcatgctgagcgccagcaccatgctggtgcagtgggagcctcccgaggagcccaacggcctggtgcggggataccgcgtctactatactccggactcccgccgccccccgaacgcctggcacaagcacaacaccgacgcggggctcctcacgaccgtgggcagcctgctgcctggcatcacctacagcctgcgcgtgcttgccttcaccgccgtgggcgatggccctcccagccccaccatccaggtcaagacgcagcagggagtgcctgcccagcccgcggacttccaggccgaggtggagtcggacaccaggatccagctctcgtggctgctgccccctcaggagcggatcatcatgtatgaactggtgtactgggcggcagaggacgaagaccaacagcacaaggtcaccttcgacccaacctcctcctacacactagaggacctgaagcctgacacactctaccgcttccagctggctgcacgctcggatatgggggtgggcgtcttcacccccaccattgaggcccgcacagcccagtccaccccctccgcccctccccagaaggtgatgtgtgtgagcatgggctccaccacggtccgggtaagttgggtcccgccgcctgccgacagccgcaacggcgttatcacccagtactccgtggcctacgaggcggtggacggcgaggaccgcgggcggcatgtggtggatggcatcagccgtgagcactccagctgggacctggtgggcctggagaagtggacggagtaccgggtgtgggtgcgggcacacacagacgtgggccccggccccgagagcagcccggtgctggtgcgcaccgatgaggacgtgcccagcgggcctccgcggaaggtggaggtggagccactgaactccactgctgtgcatgtctactggaagctgcctgtccccagcaagcagcatggccagatccgcggctaccaggtcacctacgtgcggctggagaatggcgagccccgtggactccccatcatccaagacgtcatgctagccgaggcccaggaaaccactatcagcggcctgaccccggagaccacctactccgttactgttgctgcctataccaccaagggggatggtgcccgcagcaagcccaaaattgtcactacaacaggtgcagtcccaggccggcccaccatgatgatcagcaccacggccatgaacactgcgctgctccagtggcacccacccaaggaactgcctggcgagctgctgggctaccggctgcagtactgccgggccgacgaggcgcggcccaacaccatagatttcggcaaggatgaccagcacttcacagtcaccggcctgcacaaggggaccacctacatcttccggcttgctgccaagaaccgggctggcttgggtgaggagttcgagaaggagatcaggacccccgaggacctgcccagcggcttcccccaaaacctgcatgtgacaggactgaccacgtctaccacagaactggcctgggacccgccagtgctggcggagaggaacgggcgcatcatcagctacaccgtggtgttccgagacatcaacagccaacaggagctgcagaacatcacgacagacacccgctttacccttactggcctcaagccagacaccacttacgacatcaaggtccgcgcatggaccagcaaaggctctggcccactcagccccagcatccagtcccggaccatgccggtggagcaagtgtttgccaagaacttccgggtggcggctgcaatgaagacgtctgtgctgctcagctgggaggttcccgactcctataagtcagctgtgccctttaagattctgtacaatgggcagagtgtggaggtggacgggcactcgatgcggaagctgatcgcagacctgcagcccaacacagagtactcgtttgtgctgatgaaccgtggcagcagcgcagggggcctgcagcacctggtgtccatccgcacagcccccgacctcctgcctcacaagccgctgcctgcctctgcctacatagaggacggccgcttcgatctctccatgccccatgtgcaagacccctcgcttgtcaggtggttctacattgttgtggtacccattgaccgtgtgggcgggagcatgctgacgccaaggtggagcacacccgaggaactggagctggacgagcttctagaagccatcgagcaaggcggagaggagcagcggcggcggcggcggcaggcagaacgtctgaagccatatgtggctgctcaactggatgtgctcccggagacctttaccttgggggacaagaagaactaccggggcttctacaaccggcccctgtctccggacttgagctaccagtgctttgtgcttgcctccttgaaggaacccatggaccagaagcgctatgcctccagcccctactcggatgagatcgtggtccaggtgacaccagcccagcagcaggaggagccggagatgctgtgggtgacgggtcccgtgctggcagtcatcctcatcatcctcattgtcatcgccatcctcttgttcaaaaggaaaaggacccactctccgtcctctaaggatgagcagtcgatcggactgaaggactccttgctggcccactcctctgaccctgtggagatgcggaggctcaactaccagaccccaggtatgcgagaccacccacccatccccatcaccgacctggcggacaacatcgagcgcctcaaagccaacgatggcctcaagttctcccaggagtatgagtccatcgaccctggacagcagttcacgtgggagaattcaaacctggaggtgaacaagcccaagaaccgctatgcgaatgtcatcgcctacgaccactctcgagtcatccttacctctatcgatggcgtccccgggagtgactacatcaatgccaactacatcgatggctaccgcaagcagaatgcctacatcgccacgcagggccccctgcccgagaccatgggcgatttctggagaatggtgtgggaacagcgcacggccactgtggtcatgatgacacggctggaggagaagtcccgggtaaaatgtgatcagtactggccagcccgtggcaccgagacctgtggccttattcaggtgaccctgttggacacagtggagctggccacatacactgtgcgcaccttcgcactccacaagagtggctccagtgagaagcgcgagctgcgtcagtttcagttcatggcctggccagaccatggagttcctgagtacccaactcccatcctggccttcctacgacgggtcaaggcctgcaaccccctagacgcagggcccatggtggtgcactgcagcgcgggcgtgggccgcaccggctgcttcatcgtgattgatgccatgttggagcggatgaagcacgagaagacggtggacatctatggccacgtgacctgcatgcgatcacagaggaactacatggtgcagacggaggaccagtacgtgttcatccatgaggcgctgctggaggctgccacgtgcggccacacagaggtgcctgcccgcaacctgtatgcccacatccagaagctgggccaagtgcctccaggggagagtgtgaccgccatggagctcgagttcaagttgctggccagctccaaggcccacacgtcccgcttcatcagcgccaacctgccctgcaacaagttcaagaaccggctggtgaacatcatgccctacgaattgacccgtgtgtgtctgcagcccatccgtggtgtggagggctctgactacatcaatgccagcttcctggatggttatagacagcagaaggcctacatagctacacaggggcctctggcagagagcaccgaggacttctggcgcatgctatgggagcacaattccaccatcatcgtcatgctgaccaagcttcgggagatgggcagggagaaatgccaccagtactggccagcagagcgctctgctcgctaccagtactttgttgttgacccgatggctgagtacaacatgccccagtatatcctgcgtgagttcaaggtcacggatgcccgggatgggcagtcaaggacaatccggcagttccagttcacagactggccagagcagggcgtgcccaagacaggcgagggattcattgacttcatcgggcaggtgcataagaccaaggagcagtttggacaggatgggcctatcacggtgcactgcagtgctggcgtgggccgcaccggggtgttcatcactctgagcatcgtcctggagcgcatgcgctatgagggcgtggtcgacatgtttcagaccgtgaagaccctgcgtacacagcgtcctgccatggtgcagacagaggaccagtatcagctgtgctaccgtgcggccctggagtacctcggcagctttgaccactatgcaacgtaactaccgctcccctctcctccgccacccccgccgtggggctccggaggggacccagctcctctgagccataccgaccatcgtccagccctcctacgcagatgctgtcactggcagagcacagcccacggggatcacagcgtttcaggaacgttgccacaccaatcagagagcctagaacatccctgggcaagtggatggcccagcaggcaggcactgtggcccttctgtccaccagacccacctggagcccgcttcaagctctctgttgcgctcccgcatttctcatgcttcttctcatggggtggggttggggcaaagcctcctttttaatacattaagtggggtagactgagggattttagcctcttccctctgatttttcctttcgcgaatccgtatctgcagaatgggccactgtaggggttggggtttattttgttttgtttttttttttcttgagttcactttggatccttattttgtatgacttctgctgaaggacagaacattgccttcctcgtgcagagctggggctgccagcctgagcggaggctcggccgtgggccgggaggcagtgctgatccggctgctcctccagcccttcagacgagatcctgtttcagctaaatgcagggaaactcaatgtttttttaagttttgttttccctttaaagcctttttttaggccacattgacagtggtgggcggggagaagatagggaacactcatccctggtcgtctatcccagtgtgtgtttaacattcacagcccagaaccacagatgtgtctgggagagcctggcaaggcattcctcatcaccatcgtgtttgcaaaggttaaaacaaaaacaaaaaaccacaaaaataaaaaacaaaaaaaacaaaaaacccaagaaaaaaaaaaagagtcagcccttggcttctgcttcaaaccctcaagaggggaagcaactccgtgtgcctggggttcccgagggagctgctggctgacctgggcccacagagcctggctttggtccccagcattgcagtatggtgtggtgtttgtaggctgtggggtctggctgtgtggccaaggtgaatagcacaggttagggtgtgtgccacaccccatgcacctcagggccaagcgggggcgtggctggcctttcaggtccaggccagtgggcctggtagcacatgtctgtcctcagagcaggggccagatgattttcctccctggtttgcagctgttttcaaagcccccgataatcgctcttttccactccaagatgccctcataaaccaatgtggcaagactactggacttctatcaatggtactctaatcagtccttattatcccagcttgctgaggggcagggagagcgcctcttcctctgggcagcgctatctagataggtaagtgggggcggggactgcttcagtttcgtcgacgcggccgcgaat

SEQ ID NO: 451472 - DNA, 6555 bp, Homo sapiens
  misc_feature (18)..(18): n is a, c, g, or t
atgtcggtactgcatttntccatggctatcaggaggcggcggcggcagaggagtgggagcagcggccctagcggcttgcggggggacatgcggaccgacggcccctggataggcggaaggagtggaggccctggtgcccggcccttggtgctgagtatccagcaagagtgaccggggtgaagaagcaaagactcggttgattgtcctgggctgtggctggctgtggagctagagccctggatggcccctgagccagccccagggaggacgatggtgccccttgtgcctgcactggtgatgcttggtttggtggcaggcgcccatggtgacagcaaacctgtcttcattaaagtccctgaggaccagactgggctgtcaggaggggtagcctccttcgtgtgccaagctacaggagaacccaagccgcgcatcacatggatgaagaaggggaagaaagtcagctcccagcgcttcgaggtcattgagtttgatgatggggcagggtcagtgcttcggatccagccattgcgggtgcagcgagatgaagccatctatgagtgtacagctactaacagcctgggtgagatcaacactagtgccaagctctcagtgctcgaagaggaacagctgccccctgggttcccttccatcgacatggggcctcagctgaaggtggtggagaaggcacgcacagccaccatgctatgtgccgcaggcggaaatccagaccctgagatttcttggttcaaggacttccttcctgtagaccctgccacgagcaacggccgcatcaagcagctgcgttcaggtgccttgcagatagagagcagtgaggaatccgaccaaggcaagtacgagtgtgtggcgaccaactcggcaggcacacgttactcagcccctgcgaacctgtatgtgcgagtgcgccgcgtggctcctcgtttctccatccctcccagcagccaggaggtgatgccaggcggcagcgtgaacctgacatgcgtggcagtgggtgcacccatgccctacgtgaagtggatgatgggggccgaggagctcaccaaggaggatgagatgccagttggccgcaacgtcctggagctcagcaatgtcgtacgctctgccaactacacctgtgtggccatctcctcgctgggcatgatcgaggccacagcccaggtcacagtgaaagctcttccaaagcctccgattgatcttgtggtgacagagacaactgccaccagtgtcaccctcacctgggactctgggaactcggagcctgtaacctactatggcatccagtaccgcgcagcgggcacggagggcccctttcaggaggtggatggtgtggccaccacccgctacagcattggcggcctcagccctttctcggaatatgccttccgcgtgctggcggtgaacagcatcgggcgagggccgcccagcgaggcagtgcgggcacgcacgggagaacaggcgccctccagcccaccgcgccgcgtgcaggcacgcatgctgagcgccagcaccatgctggtgcagtgggagcctcccgaggagcccaacggcctggtgcggggataccgcgtctactatactccggactcccgccgccccccgaacgcctggcacaagcacaacaccgacgcggggctcctcacgaccgtgggcagcctgctgcctggcatcacctacagcctgcgcgtgcttgccttcaccgccgtgggcgatggccctcccagccccaccatccaggtcaagacgcagcagggagtgcctgcccagcccgcggacttccaggccgaggtggagtcggacaccaggatccagctctcgtggctgctgccccctcaggagcggatcatcatgtatgaactggtgtactgggcggcagaggacgaagaccaacagcacaaggtcaccttcgacccaacctcctcctacacactagaggacctgaagcctgacacactctaccgcttccagctggctgcacgctcggatatgggggtgggcgtcttcacccccaccattgaggcccgcacagcccagtccaccccctccgcccctccccagaaggtgatgtgtgtgagcatgggctccaccacggtccgggtaagttgggtcccgccgcctgccgacagccgcaacggcgttatcacccagtactccgtggcctacgaggcggtggacggcgaggaccgcgggcggcatgtggtggatggcatcagccgtgagcactccagctgggacctggtgggcctggagaagtggacggagtaccgggtgtgggtgcgggcacacacagacgtgggccccggccccgagagcagcccggtgctggtgcgcaccgatgaggacgtgcccagcgggcctccgcggaaggtggaggtggagccactgaactccactgctgtgcatgtctactggaagctgcctgtccccagcaagcagcatggccagatccgcggctaccaggtcacctacgtgcggctggagaatggcgagccccgtggactccccatcatccaagacgtcatgctagccgaggcccaggaaaccactatcagcggcctgaccccggagaccacctactccgttactgttgctgcctataccaccaagggggatggtgcccgcagcaagcccaaaattgtcactacaacaggtgcagtcccaggccggcccaccatgatgatcagcaccacggccatgaacactgcgctgctccagtggcacccacccaaggaactgcctggcgagctgctgggctaccggctgcagtactgccgggccgacgaggcgcggcccaacaccatagatttcggcaaggatgaccagcacttcacagtcaccggcctgcacaaggggaccacctacatcttccggcttgctgccaagaaccgggctggcttgggtgaggagttcgagaaggagatcaggacccccgaggacctgcccagcggcttcccccaaaacctgcatgtgacaggactgaccacgtctaccacagaactggcctgggacccgccagtgctggcggagaggaacgggcgcatcatcagctacaccgtggtgttccgagacatcaacagccaacaggagctgcagaacatcacgacagacacccgctttacccttactggcctcaagccagacaccacttacgacatcaaggtccgcgcatggaccagcaaaggctctggcccactcagccccagcatccagtcccggaccatgccggtggagcaagtgtttgccaagaacttccgggtggcggctgcaatgaagacgtctgtgctgctcagctgggaggttcccgactcctataagtcagctgtgccctttaagattctgtacaatgggcagagtgtggaggtggacgggcactcgatgcggaagctgatcgcagacctgcagcccaacacagagtactcgtttgtgctgatgaaccgtggcagcagcgcagggggcctgcagcacctggtgtccatccgcacagcccccgacctcctgcctcacaagccgctgcctgcctctgcctacatagaggacggccgcttcgatctctccatgccccatgtgcaagacccctcgcttgtcaggtggttctacattgttgtggtacccattgaccgtgtgggcgggagcatgctgacgccaaggtggagcacacccgaggaactggagctggacgagcttctagaagccatcgagcaaggcggagaggagcagcggcggcggcggcggcaggcagaacgtctgaagccatatgtggctgctcaactggatgtgctcccggagacctttaccttgggggacaagaagaactaccggggcttctacaaccggcccctgtctccggacttgagctaccagtgctttgtgcttgcctccttgaaggaacccatggaccagaagcgctatgcctccagcccctactcggatgagatcgtggtccaggtgacaccagcccagcagcaggaggagccggagatgctgtgggtgacgggtcccgtgctggcagtcatcctcatcatcctcattgtcatcgccatcctcttgttcaaaaggaaaaggacccactctccgtcctctaaggatgagcagtcgatcggactgaaggactccttgctggcccactcctctgaccctgtggagatgcggaggctcaactaccagaccccaggtatgcgagaccacccacccatccccatcaccgacctggcggacaacatcgagcgcctcaaagccaacgatggcctcaagttctcccaggagtatgagtccatcgaccctggacagcagttcacgtgggagaattcaaacctggaggtgaacaagcccaagaaccgctatgcgaatgtcatcgcctacgaccactctcgagtcatccttacctctatcgatggcgtccccgggagtgactacatcaatgccaactacatcgatggctaccgcaagcagaatgcctacatcgccacgcagggccccctgcccgagaccatgggcgatttctggagaatggtgtgggaacagcgcacggccactgtggtcatgatgacacggctggaggagaagtcccgggtaaaatgtgatcagtactggccagcccgtggcaccgagacctgtggccttattcaggtgaccctgttggacacagtggagctggccacatacactgtgcgcaccttcgcactccacaagagtggctccagtgagaagcgcgagctgcgtcagtttcagttcatggcctggccagaccatggagttcctgagtacccaactcccatcctggccttcctacgacgggtcaaggcctgcaaccccctagacgcagggcccatggtggtgcactgcagcgcgggcgtgggccgcaccggctgcttcatcgtgattgatgccatgttggagcggatgaagcacgagaagacggtggacatctatggccacgtgacctgcatgcgatcacagaggaactacatggtgcagacggaggaccagtacgtgttcatccatgaggcgctgctggaggctgccacgtgcggccacacagaggtgcctgcccgcaacctgtatgcccacatccagaagctgggccaagtgcctccaggggagagtgtgaccgccatggagctcgagttcaagttgctggccagctccaaggcccacacgtcccgcttcatcagcgccaacctgccctgcaacaagttcaagaaccggctggtgaacatcatgccctacgaattgacccgtgtgtgtctgcagcccatccgtggtgtggagggctctgactacatcaatgccagcttcctggatggttatagacagcagaaggcctacatagctacacaggggcctctggcagagagcaccgaggacttctggcgcatgctatgggagcacaattccaccatcatcgtcatgctgaccaagcttcgggagatgggcagggagaaatgccaccagtactggccagcagagcgctctgctcgctaccagtactttgttgttgacccgatggctgagtacaacatgccccagtatatcctgcgtgagttcaaggtcacggatgcccgggatgggcagtcaaggacaatccggcagttccagttcacagactggccagagcagggcgtgcccaagacaggcgagggattcattgacttcatcgggcaggtgcataagaccaaggagcagtttggacaggatgggcctatcacggtgcactgcagtgctggcgtgggccgcaccggggtgttcatcactctgagcatcgtcctggagcgcatgcgctatgagggcgtggtcgacatgtttcagaccgtgaagaccctgcgtacacagcgtcctgccatggtgcagacagaggaccagtatcagctgtgctaccgtgcggccctggagtacctccccagcattgcagtatggtgtggtgtttgtaggctgtggggtctggctgtgtggccaaggtgaatagcacaggttagggtgtgtgccacaccccatgcacctcagggccaagcgggggcgtggctggcctttcaggtccaggccagtgggcctggtagcacatgtctgtcctcagagcaggggccagatgattttcctccctggtttgcagctgttttcaaagcccccgataatcgctcttttccactccaagatgccctcataaaccaatgtggcaagactactggacttctatcaatggtactctaatcagtccttattatcccagcttgctgaggggcagggagagcgcctcttcctctgggcagcgctatctagataggtaagtgggggcggggaagggtgcatagctgttttagctgagggacgtggtgccgacgtccccaaacctagctaggctaagtcaagatcaacattccagggttggtaatgttggatgatgaaacattcatttttaccttgtggatgctagtgctgtagagttcactgttgtacacagtctgttttctatttgttaagaaaaactacagcatcattgcataattcttgatggtaataaatttgaataatcagatttcttacaaa

SEQ ID NO: 451473 - DNA, 5877 bp, Homo sapiens
  misc_feature (18)..(18): n is a, c, g, or t
atgtcggtactgcatttntccatggctatcaggaggcggcggcggcagaggagtgggagcagcggccctagcggcttgcggggggacatgcggaccgacggcccctggataggcggaaggagtggaggccctggtgcccggcccttggtgctgagtatccagcaagagtgaccggggtgaagaagcaaagactcggttgattgtcctgggctgtggctggctgtggagctagagccctggatggcccctgagccagccccagggaggacgatggtgccccttgtgcctgcactggtgatgcttggtttggtggcaggcgcccatggtgacagcaaacctgtcttcattaaagtccctgaggaccagactgggctgtcaggaggggtagcctccttcgtgtgccaagctacaggagaacccaagccgcgcatcacatggatgaagaaggggaagaaagtcagctcccagcgcttcgaggtcattgagtttgatgatggggcagggtcagtgcttcggatccagccattgcgggtgcagcgagatgaagccatctatgagtgtacagctactaacagcctgggtgagatcaacactagtgccaagctctcagtgctcgaagaggaacagctgccccctgggttcccttccatcgacatggggcctcagctgaaggtggtggagaaggcacgcacagccaccatgctatgtgccgcaggcggaaatccagaccctgagatttcttggttcaaggacttccttcctgtagaccctgccacgagcaacggccgcatcaagcagctgcgttcaggtgccttgcagatagagagcagtgaggaatccgaccaaggcaagtacgagtgtgtggcgaccaactcggcaggcacacgttactcagcccctgcgaacctgtatgtgcgagtgcgccgcgtggctcctcgtttctccatccctcccagcagccaggaggtgatgccaggcggcagcgtgaacctgacatgcgtggcagtgggtgcacccatgccctacgtgaagtggatgatgggggccgaggagctcaccaaggaggatgagatgccagttggccgcaacgtcctggagctcagcaatgtcgtacgctctgccaactacacctgtgtggccatctcctcgctgggcatgatcgaggccacagcccaggtcacagtgaaagctcttccaaagcctccgattgatcttgtggtgacagagacaactgccaccagtgtcaccctcacctgggactctgggaactcggagcctgtaacctactatggcatccagtaccgcgcagcgggcacggagggcccctttcaggaggtggatggtgtggccaccacccgctacagcattggcggcctcagccctttctcggaatatgccttccgcgtgctggcggtgaacagcatcgggcgagggccgcccagcgaggcagtgcgggcacgcacgggagaacaggcgccctccagcccaccgcgccgcgtgcaggcacgcatgctgagcgccagcaccatgctggtgcagtgggagcctcccgaggagcccaacggcctggtgcggggataccgcgtctactatactccggactcccgccgccccccgaacgcctggcacaagcacaacaccgacgcggggctcctcacgaccgtgggcagcctgctgcctggcatcacctacagcctgcgcgtgcttgccttcaccgccgtgggcgatggccctcccagccccaccatccaggtcaagacgcagcagggagtgcctgcccagcccgcggacttccaggccgaggtggagtcggacaccaggatccagctctcgtggctgctgccccctcaggagcggatcatcatgtatgaactggtgtactgggcggcagaggacgaagaccaacagcacaaggtcaccttcgacccaacctcctcctacacactagaggacctgaagcctgacacactctaccgcttccagctggctgcacgctcggatatgggggtgggcgtcttcacccccaccattgaggcccgcacagcccagtccaccccctccgcccctccccagaaggtgatgtgtgtgagcatgggctccaccacggtccgggtaagttgggtcccgccgcctgccgacagccgcaacggcgttatcacccagtactccgtggcctacgaggcggtggacggcgaggaccgcgggcggcatgtggtggatggcatcagccgtgagcactccagctgggacctggtgggcctggagaagtggacggagtaccgggtgtgggtgcgggcacacacagacgtgggccccggccccgagagcagcccggtgctggtgcgcaccgatgaggacgtgcccagcgggcctccgcggaaggtggaggtggagccactgaactccactgctgtgcatgtctactggaagctgcctgtccccagcaagcagcatggccagatccgcggctaccaggtcacctacgtgcggctggagaatggcgagccccgtggactccccatcatccaagacgtcatgctagccgaggcccaggaaaccactatcagcggcctgaccccggagaccacctactccgttactgttgctgcctataccaccaagggggatggtgcccgcagcaagcccaaaattgtcactacaacaggtgcagtcccaggccggcccaccatgatgatcagcaccacggccatgaacactgcgctgctccagtggcacccacccaaggaactgcctggcgagctgctgggctaccggctgcagtactgccgggccgacgaggcgcggcccaacaccatagatttcggcaaggatgaccagcacttcacagtcaccggcctgcacaaggggaccacctacatcttccggcttgctgccaagaaccgggctggcttgggtgaggagttcgagaaggagatcaggacccccgaggacctgcccagcggcttcccccaaaacctgcatgtgacaggactgaccacgtctaccacagaactggcctgggacccgccagtgctggcggagaggaacgggcgcatcatcagctacaccgtggtgttccgagacatcaacagccaacaggagctgcagaacatcacgacagacacccgctttacccttactggcctcaagccagacaccacttacgacatcaaggtccgcgcatggaccagcaaaggctctggcccactcagccccagcatccagtcccggaccatgccggtggagcaagtgtttgccaagaacttccgggtggcggctgcaatgaagacgtctgtgctgctcagctgggaggttcccgactcctataagtcagctgtgccctttaagattctgtacaatgggcagagtgtggaggtggacgggcactcgatgcggaagctgatcgcagacctgcagcccaacacagagtactcgtttgtgctgatgaaccgtggcagcagcgcagggggcctgcagcacctggtgtccatccgcacagcccccgacctcctgcctcacaagccgctgcctgcctctgcctacatagaggacggccgcttcgatctctccatgccccatgtgcaagacccctcgcttgtcaggtggttctacattgttgtggtacccattgaccgtgtgggcgggagcatgctgacgccaaggtggagcacacccgaggaactggagctggacgagcttctagaagccatcgagcaaggcggagaggagcagcggcggcggcggcggcaggcagaacgtctgaagccatatgtggctgctcaactggatgtgctcccggagacctttaccttgggggacaagaagaactaccggggcttctacaaccggcccctgtctccggacttgagctaccagtgctttgtgcttgcctccttgaaggaacccatggaccagaagcgctatgcctccagcccctactcggatgagatcgtggtccaggtgacaccagcccagcagcaggaggagccggagatgctgtgggtgacgggtcccgtgctggcagtcatcctcatcatcctcattgtcatcgccatcctcttgttcaaaaggaaaaggacccactctccgtcctctaaggatgagcagtcgatcggactgaaggactccttgctggcccactcctctgaccctgtggagatgcggaggctcaactaccagaccccaggtatgcgagaccacccacccatccccatcaccgacctggcggacaacatcgagcgcctcaaagccaacgatggcctcaagttctcccaggagtatgagtccatcgaccctggacagcagttcacgtgggagaattcaaacctggaggtgaacaagcccaagaaccgctatgcgaatgtcatcgcctacgaccactctcgagtcatccttacctctatcgatggcgtccccgggagtgactacatcaatgccaactacatcgatggctaccgcaagcagaatgcctacatcgccacgcagggccccctgcccgagaccatgggcgatttctggagaatggtgtgggaacagcgcacggccactgtggtcatgatgacacggctggaggagaagtcccgggtaaaatgtgatcagtactggccagcccgtggcaccgagacctgtggccttattcaggtgaccctgttggacacagtggagctggccacatacactgtgcgcaccttcgcactccacaagagtggctccagtgagaagcgcgagctgcgtcagtttcagttcatggcctggccagaccatggagttcctgagtacccaactcccatcctggccttcctacgacgggtcaaggcctgcaaccccctagacgcagggcccatggtggtgcactgcagcgcgggcgtgggccgcaccggctgcttcatcgtgattgatgccatgttggagcggatgaagcacgagaagatagggaacactcatccctggtcgtctatcccagtgtgtgtttaacattcacagcccagaaccacagatgtgtctgggagagcctggcaaggcattcctcatcaccatcgtgtttgcaaaggttaaaacaaaaacaaaaaaccacaaaaataaaaaacaaaaaaaacaaaaaacccaagaaaaaaaaaaagagtcagcccttggcttctgcttcaaaccctcaagaggggaagcaactccgtgtgcctggggttcccgagggagctgctggctgacctgggcccacagagcctggctttggtccccagcattgcagtatggtgtggtgtttgtaggctgtggggtctggctgtgtggccaaggtgaatagcacaggttagggtgtgtgccacaccccatgcacctcagggccaagcgggggcgtggctggcctttcaggtccaggccagtgggcctggtagcacatgtctgtcctcagagcaggggccagatgattttcctccctggtttgcagctgttttcaaagcccccgataatcgctcttttccactccaagatgccctcataaaccaatgtggcaagactactggacttctatcaatggtactctaatcagtccttattatcccagcttgctgaggggcagggagagcgcctcttcctctgggcagcgctatctagataggtaagtgggggcggggaagggtgcatagctgttttagctgagggacgtggtgccgacgtccccaaacctagctaggctaagtcaagatcaacattccagggttggtaatgttggatgatgaaacattcatttttaccttgtggatgctagtgctgtagagttcactgttgtacacagtctgttttctatttgttaagaaaaactacagcatcattgcataattcttgatggtaataaatttgaataatcagatttcttacaaa

SEQ ID NO: 451474 - DNA, 6194 bp, Homo sapiens
  misc_feature (18)..(18): n is a, c, g, or t
atgtcggtactgcatttntccatggctatcaggaggcggcggcggcagaggagtgggagcagcggccctagcggcttgcggggggacatgcggaccgacggcccctggataggcggaaggagtggaggccctggtgcccggcccttggtgctgagtatccagcaagagtgaccggggtgaagaagcaaagactcggttgattgtcctgggctgtggctggctgtggagctagagccctggatggcccctgagccagccccagggaggacgatggtgccccttgtgcctgcactggtgatgcttggtttggtggcaggcgcccatggtgacagcaaacctgtcttcattaaagtccctgaggaccagactgggctgtcaggaggggtagcctccttcgtgtgccaagctacaggagaacccaagccgcgcatcacatggatgaagaaggggaagaaagtcagctcccagcgcttcgaggtcattgagtttgatgatggggcagggtcagtgcttcggatccagccattgcgggtgcagcgagatgaagccatctatgagtgtacagctactaacagcctgggtgagatcaacactagtgccaagctctcagtgctcgaagaggaacagctgccccctgggttcccttccatcgacatggggcctcagctgaaggtggtggagaaggcacgcacagccaccatgctatgtgccgcaggcggaaatccagaccctgagatttcttggttcaaggacttccttcctgtagaccctgccacgagcaacggccgcatcaagcagctgcgttcaggtgccttgcagatagagagcagtgaggaatccgaccaaggcaagtacgagtgtgtggcgaccaactcggcaggcacacgttactcagcccctgcgaacctgtatgtgcgagtgcgccgcgtggctcctcgtttctccatccctcccagcagccaggaggtgatgccaggcggcagcgtgaacctgacatgcgtggcagtgggtgcacccatgccctacgtgaagtggatgatgggggccgaggagctcaccaaggaggatgagatgccagttggccgcaacgtcctggagctcagcaatgtcgtacgctctgccaactacacctgtgtggccatctcctcgctgggcatgatcgaggccacagcccaggtcacagtgaaagctcttccaaagcctccgattgatcttgtggtgacagagacaactgccaccagtgtcaccctcacctgggactctgggaactcggagcctgtaacctactatggcatccagtaccgcgcagcgggcacggagggcccctttcaggaggtggatggtgtggccaccacccgctacagcattggcggcctcagccctttctcggaatatgccttccgcgtgctggcggtgaacagcatcgggcgagggccgcccagcgaggcagtgcgggcacgcacgggagaacaggcgccctccagcccaccgcgccgcgtgcaggcacgcatgctgagcgccagcaccatgctggtgcagtgggagcctcccgaggagcccaacggcctggtgcggggataccgcgtctactatactccggactcccgccgccccccgaacgcctggcacaagcacaacaccgacgcggggctcctcacgaccgtgggcagcctgctgcctggcatcacctacagcctgcgcgtgcttgccttcaccgccgtgggcgatggccctcccagccccaccatccaggtcaagacgcagcagggagtgcctgcccagcccgcggacttccaggccgaggtggagtcggacaccaggatccagctctcgtggctgctgccccctcaggagcggatcatcatgtatgaactggtgtactgggcggcagaggacgaagaccaacagcacaaggtcaccttcgacccaacctcctcctacacactagaggacctgaagcctgacacactctaccgcttccagctggctgcacgctcggatatgggggtgggcgtcttcacccccaccattgaggcccgcacagcccagtccaccccctccgcccctccccagaaggtgatgtgtgtgagcatgggctccaccacggtccgggtaagttgggtcccgccgcctgccgacagccgcaacggcgttatcacccagtactccgtggcctacgaggcggtggacggcgaggaccgcgggcggcatgtggtggatggcatcagccgtgagcactccagctgggacctggtgggcctggagaagtggacggagtaccgggtgtgggtgcgggcacacacagacgtgggccccggccccgagagcagcccggtgctggtgcgcaccgatgaggacgtgcccagcgggcctccgcggaaggtggaggtggagccactgaactccactgctgtgcatgtctactggaagctgcctgtccccagcaagcagcatggccagatccgcggctaccaggtcacctacgtgcggctggagaatggcgagccccgtggactccccatcatccaagacgtcatgctagccgaggcccaggaaaccactatcagcggcctgaccccggagaccacctactccgttactgttgctgcctataccaccaagggggatggtgcccgcagcaagcccaaaattgtcactacaacaggtgcagtcccaggccggcccaccatgatgatcagcaccacggccatgaacactgcgctgctccagtggcacccacccaaggaactgcctggcgagctgctgggctaccggctgcagtactgccgggccgacgaggcgcggcccaacaccatagatttcggcaaggatgaccagcacttcacagtcaccggcctgcacaaggggaccacctacatcttccggcttgctgccaagaaccgggctggcttgggtgaggagttcgagaaggagatcaggacccccgaggacctgcccagcggcttcccccaaaacctgcatgtgacaggactgaccacgtctaccacagaactggcctgggacccgccagtgctggcggagaggaacgggcgcatcatcagctacaccgtggtgttccgagacatcaacagccaacaggagctgcagaacatcacgacagacacccgctttacccttactggcctcaagccagacaccacttacgacatcaaggtccgcgcatggaccagcaaaggctctggcccactcagccccagcatccagtcccggaccatgccggtggagcaagtgtttgccaagaacttccgggtggcggctgcaatgaagacgtctgtgctgctcagctgggaggttcccgactcctataagtcagctgtgccctttaagattctgtacaatgggcagagtgtggaggtggacgggcactcgatgcggaagctgatcgcagacctgcagcccaacacagagtactcgtttgtgctgatgaaccgtggcagcagcgcagggggcctgcagcacctggtgtccatccgcacagcccccgacctcctgcctcacaagccgctgcctgcctctgcctacatagaggacggccgcttcgatctctccatgccccatgtgcaagacccctcgcttgtcaggtggttctacattgttgtggtacccattgaccgtgtgggcgggagcatgctgacgccaaggtggagcacacccgaggaactggagctggacgagcttctagaagccatcgagcaaggcggagaggagcagcggcggcggcggcggcaggcagaacgtctgaagccatatgtggctgctcaactggatgtgctcccggagacctttaccttgggggacaagaagaactaccggggcttctacaaccggcccctgtctccggacttgagctaccagtgctttgtgcttgcctccttgaaggaacccatggaccagaagcgctatgcctccagcccctactcggatgagatcgtggtccaggtgacaccagcccagcagcaggaggagccggagatgctgtgggtgacgggtcccgtgctggcagtcatcctcatcatcctcattgtcatcgccatcctcttgttcaaaaggaaaaggacccactctccgtcctctaaggatgagcagtcgatcggactgaaggactccttgctggcccactcctctgaccctgtggagatgcggaggctcaactaccagaccccaggtatgcgagaccacccacccatccccatcaccgacctggcggacaacatcgagcgcctcaaagccaacgatggcctcaagttctcccaggagtatgagtccatcgaccctggacagcagttcacgtgggagaattcaaacctggaggtgaacaagcccaagaaccgctatgcgaatgtcatcgcctacgaccactctcgagtcatccttacctctatcgatggcgtccccgggagtgactacatcaatgccaactacatcgatggctaccgcaagcagaatgcctacatcgccacgcagggccccctgcccgagaccatgggcgatttctggagaatggtgtgggaacagcgcacggccactgtggtcatgatgacacggctggaggagaagtcccgggtaaaatgtgatcagtactggccagcccgtggcaccgagacctgtggccttattcaggtgaccctgttggacacagtggagctggccacatacactgtgcgcaccttcgcactccacaagagtggctccagtgagaagcgcgagctgcgtcagtttcagttcatggcctggccagaccatggagttcctgagtacccaactcccatcctggccttcctacgacgggtcaaggcctgcaaccccctagacgcagggcccatggtggtgcactgcagcgcgggcgtgggccgcaccggctgcttcatcgtgattgatgccatgttggagcggatgaagcacgagaagacggtggacatctatggccacgtgacctgcatgcgatcacagaggaactacatggtgcagacggaggaccagtacgtgttcatccatgaggcgctgctggaggctgccacgtgcggccacacagaggtgcctgccctgcaacaagttcaagaaccggctggtgaacatcatgccctacgaattgacccgtgtgtgtctgcagcccatccgtggtgtggagggctctgactacatcaatgccagcttcctggatggttatagacagcagaaggcctacatagctacacaggggcctctggcagagagcaccgaggacttctggcgcatgctatgggagcacaattccaccatcatcgtcatgctgaccaagcttcgggagatgggcagggagaaatgccaccagtactggccagcagagcgctctgctcgctaccagtactttgttgttgacccgatggctgagtacaacatgccccagtatatcctgcgtgagttcaaggtcacggatgcccgggatgggcagtcaaggacaatccggcagttccagttcacagactggccagagcagggcgtgcccaagacaggcgagggattcattgacttcatcgggcaggtgcataagaccaaggagcagtttggacaggatgggcctatcacggtgcactgcagtgctggcgtgggccgcaccggggtgttcatcactctgagcatcgtcctggagcgcatgcgctatgagggcgtggctggcctttcaggtccaggccagtgggcctggtagcacatgtctgtcctcagagcaggggccagatgattttcctccctggtttgcagctgttttcaaagcccccgataatcgctcttttccactccaagatgccctcataaaccaatgtggcaagactactggacttctatcaatggtactctaatcagtccttattatcccagcttgctgaggggcagggagagcgcctcttcctctgggcagcgctatctagataggtaagtgggggcggggaagggtgcatagctgttttagctgagggacgtggtgccgacgtccccaaacctagctaggctaagtcaagatcaacattccagggttggtaatgttggatgatgaaacattcatttttaccttgtggatgctagtgctgtagagttcactgttgtacacagtctgttttctatttgttaagaaaaactacagcatcattgcataattcttgatggtaataaatttgaataatcagatttcttacaaa

SEQ ID NO: 451475 - DNA, 4327 bp, Homo sapiens
  misc_feature (18)..(18): n is a, c, g, or t
atgtcggtactgcatttntccatggctatcaggaggcggcggcggcagaggagtgggagcagcggccctagcggcttgcggggggacatgcggaccgacggcccctggataggcggaaggagtggaggccctggtgcccggcccttggtgctgagtatccagcaagagtgaccggggtgaagaagcaaagactcggttgattgtcctgggctgtggctggctgtggagctagagccctggatggcccctgagccagccccagggaggacgatggtgccccttgtgcctgcactggtgatgcttggtttggtggcaggcgcccatggtgacagcaaacctgtcttcattaaagtccctgaggaccagactgggctgtcaggaggggtagcctccttcgtgtgccaagctacaggagaacccaagccgcgcatcacatggatgaagaaggggaagaaagtcagctcccagcgcttcgaggtcattgagtttgatgatggggcagggtcagtgcttcggatccagccattgcgggtgcagcgagatgaagccatctatgagtgtacagctactaacagcctgggtgagatcaacactagtgccaagctctcagtgctcgaagaggaacagctgccccctgggttcccttccatcgacatggggcctcagctgaaggtggtggagaaggcacgcacagccaccatgctatgtgccgcaggcggaaatccagaccctgagatttcttggttcaaggacttccttcctgtagaccctgccacgagcaacggccgcatcaagcagctgcgttcaggtgccttgcagatagagagcagtgaggaatccgaccaaggcaagtacgagtgtgtggcgaccaactcggcaggcacacgttactcagcccctgcgaacctgtatgtgcgagtgcgccgcgtggctcctcgtttctccatccctcccagcagccaggaggtgatgccaggcggcagcgtgaacctgacatgcgtggcagtgggtgcacccatgccctacgtgaagtggatgatgggggccgaggagctcaccaaggaggatgagatgccagttggccgcaacgtcctggagctcagcaatgtcgtacgctctgccaactacacctgtgtggccatctcctcgctgggcatgatcgaggccacagcccaggtcacagtgaaagctcttccaaagcctccgattgatcttgtggtgacagagacaactgccaccagtgtcaccctcacctgggactctgggaactcggagcctgtaacctactatggcatccagtaccgcgcagcgggcacggagggcccctttcaggaggtggatggtgtggccaccacccgctacagcattggcggcctcagccctttctcggaatatgccttccgcgtgctggcggtgaacagcatcgggcgagggccgcccagcgaggcagtgcgggcacgcacgggagaacaggcgccctccagcccaccgcgccgcgtgcaggcacgcatgctgagcgccagcaccatgctggtgcagtgggagcctcccgaggagcccaacggcctggtgcggggataccgcgtctactatactccggactcccgccgccccccgaacgcctggcacaagcacaacaccgacgcggggctcctcacgaccgtgggcagcctgctgcctggcatcacctacagcctgcgcgtgcttgccttcaccgccgtgggcgatggccctcccagccccaccatccaggtcaagacgcagcagggagtgcctgcccagcccgcggacttccaggccgaggtggagtcggacaccaggatccagctctcgtggctgctgccccctcaggagcggatcatcatgtatgaactggtgtactgggcggcagaggacgaagaccaacagcacaaggtcaccttcgacccaacctcctcctacacactagaggacctgaagcctgacacactctaccgcttccagctggctgcacgctcggatatgggggtgggcgtcttcacccccaccattgaggcccgcacagcccagtccaccccctccgcccctccccagaaggtgatgtgtgtgagcatgggctccaccacggtccgggtaagttgggtcccgccgcctgccgacagccgcaacggcgttatcacccagtactccgtggcctacgaggcggtggacggcgaggaccgcgggcggcatgtggtggatggcatcagccgtgagcactccagctgggacctggtgggcctggagaagtggacggagtaccgggtgtgggtgcgggcacacacagacgtgggccccggccccgagagcagcccggtgctggtgcgcaccgatgaggacgtgcccagcgggcctccgcggaaggtggaggtggagccactgaactccactgctgtgcatgtctactggaagctgcctgtccccagcaagcagcatggccagatccgcggctaccaggtcacctacgtgcggctggagaatggcgagccccgtggactccccatcatccaagacgtcatgctagccgaggcccaggaaaccactatcagcggcctgaccccggagaccacctactccgttactgttgctgcctataccaccaagggggatggtgcccgcagcaagcccaaaattgtcactacaacaggtgcagtcccaggccggcccaccatgatgatcagcaccacggccatgaacactgcgctgctccagtggcacccacccaaggaactgcctggcgagctgctgggctaccggctgcagtactgccgggccgacgaggcgcggcccaacaccatagatttcggcaaggatgaccagcacttcacagtcaccggcctgcacaaggggaccacctacatcttccggcttgctgccaagaaccgggctggcttgggtgaggagttcgagaaggagatcaggacccccgaggacctgcccagcggcttcccccaaaacctgcatgtgacaggactgaccacgtctaccacagaactggcctgggacccgccagtgctggcggagaggaacgggcgcatcatcagctacaccgtggtgttccgagacatcaacagccaacaggagctgcagaacatcacgacagacacccgctttacccttactggcctcaagccagacaccacttacgacatcaaggtccgcgcatggaccagcaaaggctctggcccactcagccccagcatccagtcccggaccatgccggtggagcaagtgtttgccaagaacttccgggtggcggctgcaatgaagacgtctgtgctgctcagctgggaggttcccgactcctataagtcagctgtgccctttaagattctgtacaatgggcagagtgtggaggtggacgggcactcgatgcggaagctgatcgcagacctgcagcccaacacagagtactcgtttgtgctgatgaaccgtggcagcagcgcagggggcctgcagcacctggtgtccatccgcacagcccccgacctcctgcctcacaagccgctgcctgcctctgcctacatagaggacggccgcttcgatctctccatgccccatgtgcaagacccctcgcttgtcaggtggttctacattgttgtggtacccattgaccgtgtgggcgggagcatgctgacgccaaggtggagcacacccgaggaactggagctggacgagcttctagaagccatcgagcaaggcggagaggagcagcggcggcggcggcggcaggcagaacgtctgaagccatatgtggctgctcaactggatgtgctcccggagacctttaccttgggggacaagaagaactaccggggcttctacaaccggcccctgtctccggacttgagctaccagtgctttgtgcttgcctccttgaaggaacccatggaccagaagcgctatgcctccagcccctactcggatgagatcgtggtccaggtgacaccagcccagcagcaggaggagccggagatgctgtgggtgacgggtcccgtgctggcagtcatcctcatcatcctcattgtcatcgccatcctcttgttcaaaaggaaaaggacccactctccgtcctctaaggatgagcagtcgatcggactgaaggactccttgctggcccactcctctgaccctgtggagatgcggaggctcaactaccagaccccaggtatgcgagaccacccacccatccccatcaccgacctggcggacaacatcgagcgcctcaaagccaacgatggcctcaagttctcccaggagtatgagtccatcgacctgacagcatctccgcttgaaaggtacgactcat

SEQ ID NO: 451476 - DNA, 2062 bp, Homo sapiens
  misc_feature (18)..(18): n is a, c, g, or t
  misc_feature (1793)..(1793): n is a, c, g, or t
  misc_feature (1977)..(1977): n is a, c, g, or t
atgtcggtactgcatttntccatggctatcaggaggcggcggcggcagaggagtgggagcagcggccctagcggcttgcggggggacatgcggaccgacggcccctggataggcggaaggagtggaggccctggtgcccggcccttggtgctgagtatccagcaagagtgaccggggtgaagaagcaaagactcggttgattgtcctgggctgtggctggctgtggagctagagccctggatggcccctgagccagccccagggaggacgatggtgccccttgtgcctgcactggtgatgcttggtttggtggcaggcgcccatggtgacagcaaacctgtcttcattaaagtccctgaggaccagactgggctgtcaggaggggtagcctccttcgtgtgccaagctacaggagaacccaagccgcgcatcacatggatgaagaaggggaagaaagtcagctcccagcgcttcgaggtcattgagtttgatgatggggcagggtcagtgcttcggatccagccattgcgggtgcagcgagatgaagccatctatgagtgtacagctactaacagcctgggtgagatcaacactagtgccaagctctcagtgctcgaagaggaacagctgccccctgggttcccttccatcgacatggggcctcagctgaaggtggtggagaaggcacgcacagccaccatgctatgtgccgcaggcggaaatccagaccctgagatttcttggttcaaggacttccttcctgtagaccctgccacgagcaacggccgcatcaagcagctgcgttcaggtgccttgcagatagagagcagtgaggaatccgaccaaggcaagtacgagtgtgtggcgaccaactcggcaggcacacgttactcagcccctgcgaacctgtatgtgcgaggtaaggactcaggcagtgcctggcccctgtcaccacagagctgtgctgcacctgccgggctctctgcccagagcccttggtgcagacacgcaagggactgccatgggcccagtctcttctccttcctgcttctttctgcagcagcagcaacagctcccactgggcaagttcctggcgtctgccactacttcgccttccttccttgcaggcccatggggaagcagccactcttgggagcatttgtatcttttgtaggtcttgccgcatgggcccggagccccatgggaatttggagccatccaatccgacttcttggtgtatgtgcatgtgtgtgtgcacacacgggcacacttatctgtgtgtaaatgcatgcatacctggcctggctttccttcagtacatcctcctgcctgccgcagcatggtgggctccagaaccaccatggctctgggctttggggtagtaaggcctcaggaacggaccaggccaggtgagcctatcctctggccaggtcttcctggagccttcctggaggaacccttgtgttcagctgtgagcccctgtggttatgttgcctcgggtgagcacctggtgtgttccagatgttctttgctgggagcgagtggacagtgtgctttctggaagtccaagttcccagcagagaggaacctggggactgttttggggtttccaatctctgctatgctcacagcctaggggtgactaaagctggccaccttgccctttcctgagaacacactgggtctggtatacatgtgcccagaaggggccctgagagccccttctaccctcatactgtcccctcacctagccttcttgtacagatggatgtcattaaaagttaaactgttgnccgggtgtggtggctcacgcctgtaatcccagcactttgggaggctgaggcaggcagatcacgaggtcaggagatcgagaccatcctggccaacatggtgaaaccccgtctctactaaaactacaaaaattagctgggcgtggtggcgcgtgcctgtaatcccagctactcaggaggctgaggnaggaaaatcgcttgaaccagaggttgcagtgagccaaggtcgcgccactgcactccagcttggtgaaagagcaagactccatctc

SEQ ID NO: 451477 - DNA, 3664 bp, Homo sapiens
  misc_feature (18)..(18): n is a, c, g, or t
atgtcggtactgcatttntccatggctatcaggaggcggcggcggcagaggagtgggagcagcggccctagcggcttgcggggggacatgcggaccgacggcccctggataggcggaaggagtggaggccctggtgcccggcccttggtgctgagtatccagcaagagtgaccggggtgaagaagcaaagactcggttgattgtcctgggctgtggctggctgtggagctagagccctggatggcccctgagccagccccagggaggacgatggtgccccttgtgcctgcactggtgatgcttggtttggtggcaggcgcccatggtgacagcaaacctgtcttcattaaagtccctgaggaccagactgggctgtcaggaggggtagcctccttcgtgtgccaagctacaggagaacccaagccgcgcatcacatggatgaagaaggggaagaaagtcagctcccagcgcttcgaggtcattgagtttgatgatggggcagggtcagtgcttcggatccagccattgcgggtgcagcgagatgaagccatctatgagtgtacagctactaacagcctgggtgagatcaacactagtgccaagctctcagtgctcgaagaggaacagctgccccctgggttcccttccatcgacatggggcctcagctgaaggtggtggagaaggcacgcacagccaccatgctatgtgccgcaggcggaaatccagaccctgagatttcttggttcaaggacttccttcctgtagaccctgccacgagcaacggccgcatcaagcagctgcgttcaggtgccttgcagatagagagcagtgaggaatccgaccaaggcaagtacgagtgtgtggcgaccaactcggcaggcacacgttactcagcccctgcgaacctgtatgtgcgagtgcgccgcgtggctcctcgtttctccatccctcccagcagccaggaggtgatgccaggcggcagcgtgaacctgacatgcgtggcagtgggtgcacccatgccctacgtgaagtggatgatgggggccgaggagctcaccaaggaggatgagatgccagttggccgcaacgtcctggagctcagcaatgtcgtacgctctgccaactacacctgtgtggccatctcctcgctgggcatgatcgaggccacagcccaggtcacagtgaaagctcttccaaagcctccgattgatcttgtggtgacagagacaactgccaccagtgtcaccctcacctgggactctgggaactcggagcctgtaacctactatggcatccagtaccgcgcagcgggcacggagggcccctttcaggaggtggatggtgtggccaccacccgctacagcattggcggcctcagccctttctcggaatatgccttccgcgtgctggcggtgaacagcatcgggcgagggccgcccagcgaggcagtgcgggcacgcacgggagaacaggcgccctccagcccaccgcgccgcgtgcaggcacgcatgctgagcgccagcaccatgctggtgcagtgggagcctcccgaggagcccaacggcctggtgcggggataccgcgtctactatactccggactcccgccgccccccgaacgcctggcacaagcacaacaccgacgcggggctcctcacgaccgtgggcagcctgctgcctggcatcacctacagcctgcgcgtgcttgccttcaccgccgtgggcgatggccctcccagccccaccatccaggtcaagacgcagcagggagtgcctgcccagcccgcggacttccaggccgaggtggagtcggacaccaggatccagctctcgtggctgctgccccctcaggagcggatcatcatgtatgaactggtgtactgggcggcagaggacgaagaccaacagcacaaggtcaccttcgacccaacctcctcctacacactagaggacctgaagcctgacacactctaccgcttccagctggctgcacgctcggatatgggggtgggcgtcttcacccccaccattgaggcccgcacagcccagtccaccccctccgcccctccccagaaggtgatgtgtgtgagcatgggctccaccacggtccgggtaagttgggtcccgccgcctgccgacagccgcaacggcgttatcacccagtactccgtggcctacgaggcggtggacggcgaggaccgcgggcggcatgtggtggatggcatcagccgtgagcactccagctgggacctggtgggcctggagaagtggacggagtaccgggtgtgggtgcgggcacacacagacgtgggccccggccccgagagcagcccggtgctggtgcgcaccgatgaggacgtgcccagcgggcctccgcggaaggtggaggtggagccactgaactccactgctgtgcatgtctactggaagctgcctgtccccagcaagcagcatggccagatccgcggctaccaggtcacctacgtgcggctggagaatggcgagccccgtggactccccatcatccaagacgtcatgctagccgaggcccagtggcggccagaggagtccgaggactatgaaaccactatcagcggcctgaccccggagaccacctactccgttactgttgctgcctataccaccaagggggatggtgcccgcagcaagcccaaaattgtcactacaacaggtgcagtcccaggccggcccaccatgatgatcagcaccacggccatgaacactgcgctgctccagtggcacccacccaaggaactgcctggcgagctgctgggctaccggctgcagtactgccgggccgacgaggcgcggcccaacaccatagatttcggcaaggatgaccagcacttcacagtcaccggcctgcacaaggggaccacctacatcttccggcttgctgccaagaaccgggctggcttgggtgaggagttcgagaaggagatcaggacccccgaggacctgcccagcggcttcccccaaaacctgcatgtgacaggactgaccacgtctaccacagaactggcctgggacccgccagtgctggcggagaggaacgggcgcatcatcagctacaccgtggtgttccgagacatcaacagccaacaggagctgcagaacatcacgacagacacccgctttacccttactggcctcaagccagacaccacttacgacatcaaggtccgcgcatggaccagcaaaggctctggcccactcagccccagcatccagtcccggaccatgccggtggagcaaggtgtgtgctgtggacatggcatcccttcccgagtgtggctgcatctgggggtctctgctctccttgagccactgacctctggcgactgtgatccaccagcctctggtgtgtgacctccaatctctcatgactgtgaccactaacctctagtgaatgggcaccacattcttgatgcctgacctctgctgtccttaacctactgacctctgctgtatgaccttctgatctcttgtgacctcgccctacttcggctttttcaccgcgcgctgcacccactgacctgcgcccactgtctggcactccctagtgagatgaacctggtacctcagatggaaatgcagaaatcattcatcttctgcatcccctcacgctgagcctgtagaccag

SEQ ID NO: 451478 - DNA, 544 bp, Homo sapiens
  misc_feature (28)..(28): n is a, c, g, or t
tctagaggatcctctatacacctatacnacacaccttaaaacacacagaatagcaatggctgcggagcgcaagacatgctggtagtgggttttaaggtgtggtggagtgcttgagagaatctgaatgtaggatgggttcaactgcacaaaaggaaaagatttttaccactttttttatatagatataaagtgaagcaaccgccttagtgctgaaatatgtagtacatgaatatgccttgtttaattacagaaaattccaaaacttgtactatttttttttccatgtagaaaggcaggaatgtctcctaagctttcctggacagcagatgaatgagcggtagctttagtttgtacgtaggtacagttggagcactatatgtactctctggactactttggacagaagtaggtttttgaatgtaacaagataagtcaacttgagttgtaatatattttggggaatcagctcactacaaattgtgactgtaaacattgtactgtaaatgttttgtagttttcccccaataaaatttttgggaaataa

SEQ ID NO: 451479 - DNA, 3693 bp, Homo sapiens
agcggagttccagcagtccgcgagctgccgtcggctccgcggggggggcgggccgggcaccccggggcgcggaggagcgctcctcgcttctctccttcccccctgccgcactccgccggaccctcccgccggcccgcgccgctgcactcgccctctcctctcgccccccggcaaactttcggcccctccccgcccctcgcccgttattcgtcgtggctcaagcccggccacgccgccccaagggctcctcccgacctcccggcctgccgctccggccactgcgggatccagaaacatgtcgaccacacttctgtccgccttctacgatgtcgacttcttgtgcaagacagagaaatccctggccaacctcaacctgaacaacatgctggacaagaaggcggtggggacgcctgtggccgccgcccccagctcgggcttcgcgccgggattcctccgacggcactcggccagcaacctgcatgcactcgcccaccccgcgcccagccccggcagctgctcgcccaagttcccgggcgccgctaacggcagcagctgcggcagcgcggcggccggcggtccgacctcctacggcacccttaaggagccgtcggggggcggcggcacagccctgctcaacaaggagaacaaattccgggaccgctcgtttagcgagaacggcgatcgcagccagcacctcctgcacctgcagcagcagcagaaggggggcggcggctcccagatcaactccacgcgctacaagaccgagctgtgccggcccttcgaggagagcggcacgtgcaagtacggcgaaaagtgccagttcgcgcatggcttccacgagctgcgcagcctgactcgccatccgaagtacaagaccgagctgtgccgcacctttcataccatcggcttctgcccctatgggccgcgctgccacttcatccacaacgcggacgagcggcggcccgcgccgtcggggggcgcctccggggacctgcgtgcctttggcacgcgcgatgcgttgcacctgggcttcccgcgggagccgcggcccaagctgcaccacagcctcagcttctcgggcttcccgtcgggccaccatcagcccccgggcggcctcgagtcgccgctgctgctcgacagccccacgtcgcgcacgccgccgccgccctcctgctcttcggcctcgtcctgctcctcctccgcctcctcctgttcctcggcctccgcggcctccacgccctcgggcgccccgacatgctgcgcctccgcggcggccgcggctgcggccgctctgctgtacggcaccgggggcgccgaggacctgctggcgccgggggccccgtgcgcggcctgctcgtcggcctcgtgcgccaacaacgccttcgccttcggtccggagctcagcagcctcatcacgccgctcgccatccagacccacaactttgccgccgtggccgccgccgcctactaccgcagtcagcagcagcagcagcagcagggcctggcgccccccgcgcagccgccggcgccgcccagcgcgaccctccccgccggggccgccgcacctccctcgccgcccttcagcttccagctgccgcgccgcctgtccgactcgcccgtgttcgacgcgccccccagccccccggactcgctgtcggaccgcgacagctacctaagcggctccctgagctccggcagcctcagcggctctgagtctcccagcctcgaccctggccgccgcctgccaatcttcagccgcctctccatctccgacgactgaggcaagagggcgccagtgaggaggaagggaaggcggttcagagatgttggaggacacccctcgccatctcgcccttgctgggggcacgggagtggggggggtgacatgggccctaggcagactgcaagcccgaccgagcacttggactcgaactctgtgccgggaggggcccccacccctcctttttcggtttcctcttgtctttttttttttatttttattacgaagtttcattctttttgagcaaaaaagtcgaactttttctgttgaacaaaatattcacaacagggcagttgtgatacgaatagaacaaaaaaaaaaaaaaaacacttaaactttgttaggactccgatgagtttgggacttcaggaaaaatcaacccagcaccagcagctaccaaccaccattccatctcttcacttgaacagcattagttaagtccagatgtgggaacccttctcttggaagaagttcctaattgtgtctcagaccggtgtaaacaaaccagccagccgccaccttgctaaacctataagctttttaaaatccaatatattctgccaagaatatgccttgatagttagccctcagcccataggtgttttttgttttttaacagaattatatatgtctgggggtgaaaaaacccttgcattccaaaggtccatactggttacttggtttcattgccaccacttagtggatgttcagtttagaaccattttgtctgctccctctggaagccttgcgcagagcttactttgtaattgttggagaataactgctgaatttttagctgttttgagttgattcgcaccactgcaccacaactcaatatgaaaactatttaacttatttattatcttgtgaaaagtatacaatgaaaattttgttcatactgtatttatcaagtatgatgaaaagcaatagatatatattcttttattatgttaaattatgattgccattattaatcggcaaaatgtggagtgtatgttcttttcacagtaatatatgccttttgtaacttcacttggttattttattgtaaatgagtacaaaattcttaatttaagagattgtatgtaatatttatttcattaatttctttccttgtttacgtaaattttgaaagattgcatgatttcttgacagaaatcgatcttgatgctgtggaagtagtttgaggaacatcctatgagttttcttagaatgtataaaggttgtagcccatccaacttcaaagaaaaaaatgaccacatactttgcaatcaggctgaaatgtggcatgcttttctaattccaactttataaactagcaaaaaagtgtttgcttattccaccagttctactgtgacatactcgagtataaagacatgtagcaataacggggagtgggggggggagtctcacagtgcctttggaagggcccgaacttgccttaaatcttcctcaaccaaataagtattttattagtgcttgagagaatctgaatgtaggatgggttcaactgcacaaaaggaaaagatttttaccactttttttatatagatataaagtgaagcaaccgccttagtgctgaaatatgtagtacatgaatatgccttgtttaattacagaaaattccaaaacttgtactatttttttttccatgtagaaaggcaggaatgtctcctaagctttcctggacagcagatgaatgagcggtagctttagtttgtacgtaggtacagttggagcactatatgtactctctggactactttggacagaagtaggtttttgaatgtaacaagataagtcaacttgagttgtaatatattttggggaatcagctcactacaaattgtgactgtaaacattgtactgtaaatgttttgtagttttcccccaataaaatttttgggaaataa

SEQ ID NO: 451480 - DNA, 3696 bp, Homo sapiens
agcggagttccagcagtccgcgagctgccgtcggctccgcggggggggcgggccgggcaccccggggcgcggaggagcgctcctcgcttctctccttcccccctgccgcactccgccggaccctcccgccggcccgcgccgctgcactcgccctctcctctcgtccgggccggccccaagggcgtagcagtgagcgcgtcggtggaccgagagataagaggccgcggagcggctggcgcacaaggcaataggtgcagggctcggagcccgcgcagcctgcgccgtgggatccagaaacatgtcgaccacacttctgtccgccttctacgatgtcgacttcttgtgcaagacagagaaatccctggccaacctcaacctgaacaacatgctggacaagaaggcggtggggacgcctgtggccgccgcccccagctcgggcttcgcgccgggattcctccgacggcactcggccagcaacctgcatgcactcgcccaccccgcgcccagccccggcagctgctcgcccaagttcccgggcgccgctaacggcagcagctgcggcagcgcggcggccggcggtccgacctcctacggcacccttaaggagccgtcggggggcggcggcacagccctgctcaacaaggagaacaaattccgggaccgctcgtttagcgagaacggcgatcgcagccagcacctcctgcacctgcagcagcagcagaaggggggcggcggctcccagatcaactccacgcgctacaagaccgagctgtgccggcccttcgaggagagcggcacgtgcaagtacggcgaaaagtgccagttcgcgcatggcttccacgagctgcgcagcctgactcgccatccgaagtacaagaccgagctgtgccgcacctttcataccatcggcttctgcccctatgggccgcgctgccacttcatccacaacgcggacgagcggcggcccgcgccgtcggggggcgcctccggggacctgcgtgcctttggcacgcgcgatgcgttgcacctgggcttcccgcgggagccgcggcccaagctgcaccacagcctcagcttctcgggcttcccgtcgggccaccatcagcccccgggcggcctcgagtcgccgctgctgctcgacagccccacgtcgcgcacgccgccgccgccctcctgctcttcggcctcgtcctgctcctcctccgcctcctcctgttcctcggcctccgcggcctccacgccctcgggcgccccgacatgctgcgcctccgcggcggccgcggctgcggccgctctgctgtacggcaccgggggcgccgaggacctgctggcgccgggggccccgtgcgcggcctgctcgtcggcctcgtgcgccaacaacgccttcgccttcggtccggagctcagcagcctcatcacgccgctcgccatccagacccacaactttgccgccgtggccgccgccgcctactaccgcagtcagcagcagcagcagcagcagggcctggcgccccccgcgcagccgccggcgccgcccagcgcgaccctccccgccggggccgccgcacctccctcgccgcccttcagcttccagctgccgcgccgcctgtccgactcgcccgtgttcgacgcgccccccagccccccggactcgctgtcggaccgcgacagctacctaagcggctccctgagctccggcagcctcagcggctctgagtctcccagcctcgaccctggccgccgcctgccaatcttcagccgcctctccatctccgacgactgaggcaagagggcgccagtgaggaggaagggaaggcggttcagagatgttggaggacacccctcgccatctcgcccttgctgggggcacgggagtggggggggtgacatgggccctaggcagactgcaagcccgaccgagcacttggactcgaactctgtgccgggaggggcccccacccctcctttttcggtttcctcttgtctttttttttttatttttattacgaagtttcattctttttgagcaaaaaagtcgaactttttctgttgaacaaaatattcacaacagggcagttgtgatacgaatagaacaaaaaaaaaaaaaaaacacttaaactttgttaggactccgatgagtttgggacttcaggaaaaatcaacccagcaccagcagctaccaaccaccattccatctcttcacttgaacagcattagttaagtccagatgtgggaacccttctcttggaagaagttcctaattgtgtctcagaccggtgtaaacaaaccagccagccgccaccttgctaaacctataagctttttaaaatccaatatattctgccaagaatatgccttgatagttagccctcagcccataggtgttttttgttttttaacagaattatatatgtctgggggtgaaaaaacccttgcattccaaaggtccatactggttacttggtttcattgccaccacttagtggatgttcagtttagaaccattttgtctgctccctctggaagccttgcgcagagcttactttgtaattgttggagaataactgctgaatttttagctgttttgagttgattcgcaccactgcaccacaactcaatatgaaaactatttaacttatttattatcttgtgaaaagtatacaatgaaaattttgttcatactgtatttatcaagtatgatgaaaagcaatagatatatattcttttattatgttaaattatgattgccattattaatcggcaaaatgtggagtgtatgttcttttcacagtaatatatgccttttgtaacttcacttggttattttattgtaaatgagtacaaaattcttaatttaagagattgtatgtaatatttatttcattaatttctttccttgtttacgtaaattttgaaagattgcatgatttcttgacagaaatcgatcttgatgctgtggaagtagtttgaggaacatcctatgagttttcttagaatgtataaaggttgtagcccatccaacttcaaagaaaaaaatgaccacatactttgcaatcaggctgaaatgtggcatgcttttctaattccaactttataaactagcaaaaaagtgtttgcttattccaccagttctactgtgacatactcgagtataaagacatgtagcaataacggggagtgggggggggagtctcacagtgcctttggaagggcccgaacttgccttaaatcttcctcaaccaaataagtattttattagtgcttgagagaatctgaatgtaggatgggttcaactgcacaaaaggaaaagatttttaccactttttttatatagatataaagtgaagcaaccgccttagtgctgaaatatgtagtacatgaatatgccttgtttaattacagaaaattccaaaacttgtactatttttttttccatgtagaaaggcaggaatgtctcctaagctttcctggacagcagatgaatgagcggtagctttagtttgtacgtaggtacagttggagcactatatgtactctctggactactttggacagaagtaggtttttgaatgtaacaagataagtcaacttgagttgtaatatattttggggaatcagctcactacaaattgtgactgtaaacattgtactgtaaatgttttgtagttttcccccaataaaatttttgggaaataa

SEQ ID NO: 451481 - DNA, 3640 bp, Homo sapiens
agcggagttccagcagtccgcgagctgccgtcggctccgcggggggggcgggccgggcaccccggggcgcggaggagcgctcctcgcttctctccttcccccctgccgcactccgccggaccctcccgccggcccgcgccgctgcactcgccctctcctctcgccccccggcaaactttcggcccctccccgcccctcgcccgttattcgtcgtggctcaagcccggccacgccgccccaagggctcctcccgacctcccggcctgccgctccggccactgcgggatccagaaacatgtcgaccacacttctgtccgccttctacgatgtcgacttcttgtgcaagacagagaaatccctggccaacctcaacctgaacaacatgctggacaagaaggcggtggggacgcctgtggccgccgcccccagctcgggcttcgcgccgggattcctccgacggcactcggccagcaacctgcatgcactcgcccaccccgcgcccagccccggcagctgctcgcccaagttcccgggcgccgctaacggcagcagctgcggcagcgcggcggccggcggtccgacctcctacggcacccttaaggagccgtcggggggcggcggcacagccctgctcaacaaggagaacaaattccgggaccgctcgtttagcgagaacggcgatcgcagccagcacctcctgcacctgcagcagcagcagaaggggggcggcggctcccagatcaactccacgcgctacaagaccgagctgtgccggcccttcgaggagagcggcacgtgcaagtacggcgaaaagtgccagttcgcgcatggcttccacgagctgcgcagcctgactcgccatccgaagtacaagaccgagctgtgccgcacctttcataccatcggcttctgcccctatgggccgcgctgccacttcatccacaacgcggacgagcggcggcccgcgccgtcggggggcgcctccggggacctgcgtgcctttggcacgcgcgatgcgttgcacctgggcttcccgcgggagccgcggcccaagctgcaccacagcctcagcttctcgggcttcccgtcgggccaccatcagcccccgggcggcctcgagtcgccgctgctgctcgacagccccacgtcgcgcacgccgccgccgccctcctgctcttcggcctcgtcctgctcctcctccgcctcctcctgttcctcggcctccgcggcctccacgccctcgggcgccccgacatgctgcgcctccgcggcggccgcggctgcggccgctctgctgtacggcaccgggggcgccgaggacctgctggcgccgggggccccgtgcgcggcctgctcgtcggcctcgtgcgccaacaacgccttcgccttcggtccggagctcagcagcctcatcacgccgctcgccatccagacccacaactttgccgccgtggccgccgccgcctactaccgcagtcagcagcagcagcagcagcagggcctggcgccccccgcgcagccgccggcgccgcccagcgcgaccctccccgccggggccgccgcacctccctcgccgcccttcagcttccagctgccgcgccgcctgtccgactcgcccgtgttcgacgcgccccccagccccccggactcgctgtcggaccgcgacagctacctaagcggctccctgagctccggcagcctcagcggctctgagtctcccagcctcgaccctggccgccgcctgccaatcttcagccgcctctccatctccgacgactgaggcaagagggcgccagtgaggaggaagggaaggcggttcagagatgttggagatgggccctaggcagactgcaagcccgaccgagcacttggactcgaactctgtgccgggaggggcccccacccctcctttttcggtttcctcttgtctttttttttttatttttattacgaagtttcattctttttgagcaaaaaagtcgaactttttctgttgaacaaaatattcacaacagggcagttgtgatacgaatagaacaaaaaaaaaaaaaaaacacttaaactttgttaggactccgatgagtttgggacttcaggaaaaatcaacccagcaccagcagctaccaaccaccattccatctcttcacttgaacagcattagttaagtccagatgtgggaacccttctcttggaagaagttcctaattgtgtctcagaccggtgtaaacaaaccagccagccgccaccttgctaaacctataagctttttaaaatccaatatattctgccaagaatatgccttgatagttagccctcagcccataggtgttttttgttttttaacagaattatatatgtctgggggtgaaaaaacccttgcattccaaaggtccatactggttacttggtttcattgccaccacttagtggatgttcagtttagaaccattttgtctgctccctctggaagccttgcgcagagcttactttgtaattgttggagaataactgctgaatttttagctgttttgagttgattcgcaccactgcaccacaactcaatatgaaaactatttaacttatttattatcttgtgaaaagtatacaatgaaaattttgttcatactgtatttatcaagtatgatgaaaagcaatagatatatattcttttattatgttaaattatgattgccattattaatcggcaaaatgtggagtgtatgttcttttcacagtaatatatgccttttgtaacttcacttggttattttattgtaaatgagtacaaaattcttaatttaagagattgtatgtaatatttatttcattaatttctttccttgtttacgtaaattttgaaagattgcatgatttcttgacagaaatcgatcttgatgctgtggaagtagtttgaggaacatcctatgagttttcttagaatgtataaaggttgtagcccatccaacttcaaagaaaaaaatgaccacatactttgcaatcaggctgaaatgtggcatgcttttctaattccaactttataaactagcaaaaaagtgtttgcttattccaccagttctactgtgacatactcgagtataaagacatgtagcaataacggggagtgggggggggagtctcacagtgcctttggaagggcccgaacttgccttaaatcttcctcaaccaaataagtattttattagtgcttgagagaatctgaatgtaggatgggttcaactgcacaaaaggaaaagatttttaccactttttttatatagatataaagtgaagcaaccgccttagtgctgaaatatgtagtacatgaatatgccttgtttaattacagaaaattccaaaacttgtactatttttttttccatgtagaaaggcaggaatgtctcctaagctttcctggacagcagatgaatgagcggtagctttagtttgtacgtaggtacagttggagcactatatgtactctctggactactttggacagaagtaggtttttgaatgtaacaagataagtcaacttgagttgtaatatattttggggaatcagctcactacaaattgtgactgtaaacattgtactgtaaatgttttgtagttttcccccaataaaatttttgggaaataa

SEQ ID NO: 451482 - DNA, 3925 bp, Homo sapiens
agcggagttccagcagtccgcgagctgccgtcggctccgcggggggggcgggccgggcaccccggggcgcggaggagcgctcctcgcttctctccttcccccctgccgcactccgccggaccctcccgccggcccgcgccgctgcactcgccctctcctctcgccccccggcaaactttcggcccctccccgcccctcgcccgttattcgtcgtggctcaagcccggccacgccgccccaagggctcctcccgacctcccggcctgccgctccggccactgcgggatccagaaacatgtcgaccacacttctgtccgccttctacgatgtcgacttcttgtgcaagacagagaaatccctggccaacctcaacctgaacaacatgctggacaagaaggcggtggggacgcctgtggccgccgcccccagctcgggcttcgcgccgggattcctccgacggcactcggccagcaacctgcatgcactcgcccaccccgcgcccagccccggcagctgctcgcccaagttcccgggcgccgctaacggcagcagctgcggcagcgcggcggccggcggtccgacctcctacggcacccttaaggagccgtcggggggcggcggcacagccctgctcaacaaggagaacaaattccgggaccgctcgtttagcgagaacggcgatcgcagccagcacctcctgcacctgcagcagcagcagaaggggggcggcggctcccagatcaactccacgcgctacaagaccgagctgtgccggcccttcgaggagagcggcacgtgcaagtacggcgaaaagtgccagttcgcgcatggcttccacgagctgcgcagcctgactcgccatccgaagtacaagaccgagctgtgccgcacctttcataccatcggcttctgcccctatgggccgcgctgccacttcatccacaacgcggacgagcggcggcccgcgccgtcggggggcgcctccggggacctgcgtgcctttggcacgcgcgatgcgttgcacctgggcttcccgcgggagccgcggcccaagctgcaccacagcctcagcttctcgggcttcccgtcgggccaccatcagcccccgggcggcctcgagtcgccgctgctgctcgacagccccacgtcgcgcacgccgccgccgccctcctgctcttcggcctcgtcctgctcctcctccgcctcctcctgttcctcggcctccgcggcctccacgccctcgggcgccccgacatgctgcgcctccgcggcggccgcggctgcggccgctctgctgtacggcaccgggggcgccgaggacctgctggcgccgggggccccgtgcgcggcctgctcgtcggcctcgtgcgccaacaacgccttcgccttcggtccggagctcagcagcctcatcacgccgctcgccatccagacccacaactttgccgccgtggccgccgccgcctactaccgcagtcagcagcagcagcagcagcagggcctggcgccccccgcgcagccgccggcgccgcccagcgcgaccctccccgccggggccgccgcacctccctcgccgcccttcagcttccagctgccgcgccgcctgtccgactcgcccgtgttcgacgcgccccccagccccccggactcgctgtcggaccgcgacagctacctaagcggctccctgagctccggcagcctcagcggctctgagtctcccagcctcgaccctggccgccgcctgccaatcttcagccgcctctccatctccgacgactgaggcaagagggcgccagtgaggaggaagggaaggcggttcagagatgttggaggacacccctcgccatctcgcccttgctgggggcacgggagtggggggggtgacatgggccctaggcagactgcaagcccgaccgagcacttggactcgaactctgtgccgggaggggcccccacccctcctttttcggtttcctcttgtctttttttttttatttttattacgaagtttcattctttttgagcaaaaaagtcgaactttttctgttgaacaaaatattcacaacagggcagttgtgatacgaatagaacaaaaaaaaaaaaaaaacacttaaactttgttaggactccgatgagtttgggacttcaggaaaaatcaacccagcaccagcagctaccaaccaccattccatctcttcacttgaacagcattagttaagtccagatgtgggaacccttctcttggaagaagttcctaattgtgtctcagaccggtgtaaacaaaccagccagccgccaccttgctaaacctataagctttttaaaatccaatatattctgccaagaatatgccttgatagttagccctcagcccataggtgttttttgttttttaacagaattatatatgtctgggggtgaaaaaacccttgcattccaaaggtccatactggttacttggtttcattgccaccacttagtggatgttcagtttagaaccattttgtctgctccctctggaagccttgcgcagagcttactttgtaattgttggagaataactgctgaatttttagctgttttgagttgattcgcaccactgcaccacaactcaatatgaaaactatttaacttatttattatcttgtgaaaagtatacaatgaaaattttgttcatactgtatttatcaagtatgatgaaaagcaatagatatatattcttttattatgttaaattatgattgccattattaatcggcaaaatgtggagtgtatgttcttttcacagtaatatatgccttttgtaacttcacttggttattttattgtaaatgagtacaaaattcttaatttaagagattgtatgtaatatttatttcattaatttctttccttgtttacgtaaattttgaaagattgcatgatttcttgacagaaatcgatcttgatgctgtggaagtagtttgaggaacatcctatgagttttcttagaatgtataaaggttgtagcccatccaacttcaaagaaaaaaatgaccacatactttgcaatcaggctgaaatgtggcatgcttttctaattccaactttataaactagcaaaaaagtgtttgcttattccaccagttctactgtgacatactcgagtataaagacatgtagcaataacggggagtgggggggggagtctcacagtgcctttggaagggcccgaacttgccttaaatcttcctcaaccaaataagtattttattagtgcttgagagaatctgaatgtaggatgggttcaactgcacaaaaggaaaagatttttaccactttttttatatagatataaagtgaagcaaccgccttagtgctgaaatatgtagtacatgaatatgccttgtttaattacagaaaattccaaaacttgtactatttttttttccatgtagaaaggcaggaatgtctcctaagctttcctggacagcagatgaatgagcggtagctttagtttgtacgtaggtacagttggagcactatatgtactctctggactactttggacagaagtaggtttttgaatgtaacaagataagtcaacttgagttgtaatatattttggggaatcagctcactacaaattgtgactgtaaacattgtactgtaaatgttttgtagttttcccccaataaaatttttgggaaataaaaagtattaatatgtaagagctttctttttaaacaggaatgtcttagctttctagcttcccagctaaccatgtctgccattccccaggtcttggcatggtgggggaggacttggagagctggcagagccagagttcagaagagcctgcgtcctctcagcccgtatatattttataagcaagttcttctaatgaaagaaagtaattatttggactgtcaagggcattagttag

SEQ ID NO: 451483 - DNA, 3990 bp, Homo sapiens
agcggagttccagcagtccgcgagctgccgtcggctccgcggggggggcgggccgggcaccccggggcgcggaggagcgctcctcgcttctctccttcccccctgccgcactccgccggaccctcccgccggcccgcgccgctgcactcgccctctcctctcgccccccggcaaactttcggcccctccccgcccctcgcccgttattcgtcgtggctcaagcccggccacgccgccccaagggctcctcccgacctcccggcctgccgctccggccactgcgggatccagaaacatgtcgaccacacttctgtccgccttctacgatgtcgacttcttgtgcaagacagagaaatccctggccaacctcaacctgaacaacatgctggacaagaaggcggtggggacgcctgtggccgccgcccccagctcgggcttcgcgccgggattcctccgacggcactcggccagcaacctgcatgcactcgcccaccccgcgcccagccccggcagctgctcgcccaagttcccgggcgccgctaacggcagcagctgcggcagcgcggcggccggcggtccgacctcctacggcacccttaaggagccgtcggggggcggcggcacagccctgctcaacaaggagaacaaattccgggaccgctcgtttagcgagaacggcgatcgcagccagcacctcctgcacctgcagcagcagcagaaggggggcggcggctcccagatcaactccacgcgctacaagaccgagctgtgccggcccttcgaggagagcggcacgtgcaagtacggcgaaaagtgccagttcgcgcatggcttccacgagctgcgcagcctgactcgccatccgaagtacaagaccgagctgtgccgcacctttcataccatcggcttctgcccctatgggccgcgctgccacttcatccacaacgcggacgagcggcggcccgcgccgtcggggggcgcctccggggacctgcgtgcctttggcacgcgcgatgcgttgcacctgggcttcccgcgggagccgcggcccaagctgcaccacagcctcagcttctcgggcttcccgtcgggccaccatcagcccccgggcggcctcgagtcgccgctgctgctcgacagccccacgtcgcgcacgccgccgccgccctcctgctcttcggcctcgtcctgctcctcctccgcctcctcctgttcctcggcctccgcggcctccacgccctcgggcgccccgacatgctgcgcctccgcggcggccgcggctgcggccgctctgctgtacggcaccgggggcgccgaggacctgctggcgccgggggccccgtgcgcggcctgctcgtcggcctcgtgcgccaacaacgccttcgccttcggtccggagctcagcagcctcatcacgccgctcgccatccagacccacaactttgccgccgtggccgccgccgcctactaccgcagtcagcagcagcagcagcagcagggcctggcgccccccgcgcagccgccggcgccgcccagcgcgaccctccccgccggggccgccgcacctccctcgccgcccttcagcttccagctgccgcgccgcctgtccgactcgcccgtgttcgacgcgccccccagccccccggactcgctgtcggaccgcgacagctacctaagcggctccctgagctccggcagcctcagcggctctgagtctcccagcctcgaccctggccgccgcctgccaatcttcagccgcctctccatctccgacgactgaggcaagagggcgccagtgaggaggaagggaaggcggttcagagatgttggaggacacccctcgccatctcgcccttgctgggggcacgggagtggggggggtgacatgggccctaggcagactgcaagcccgaccgagcacttggactcgaactctgtgccgggaggggcccccacccctcctttttcggtttcctcttgtctttttttttttatttttattacgaagtttcattctttttgagcaaaaaagtcgaactttttctgttgaacaaaatattcacaacagggcagttgtgatacgaatagaacaaaaaaaaaaaaaaaacacttaaactttgttaggactccgatgagtttgggacttcaggaaaaatcaacccagcaccagcagctaccaaccaccattccatctcttcacttgaacagcattagttaagtccagatgtgggaacccttctcttggaagaagttcctaattgtgtctcagaccggtgtaaacaaaccagccagccgccaccttgctaaacctataagctttttaaaatccaatatattctgccaagaatatgccttgatagttagccctcagcccataggtgttttttgttttttaacagaattatatatgtctgggggtgaaaaaacccttgcattccaaaggtccatactggttacttggtttcattgccaccacttagtggatgttcagtttagaaccattttgtctgctccctctggaagccttgcgcagagcttactttgtaattgttggagaataactgctgaatttttagctgttttgagttgattcgcaccactgcaccacaactcaatatgaaaactatttaacttatttattatcttgtgaaaagtatacaatgaaaattttgttcatactgtatttatcaagtatgatgaaaagcaatagatatatattcttttattatgttaaattatgattgccattattaatcggcaaaatgtggagtgtatgttcttttcacagtaatatatgccttttgtaacttcacttggttattttattgtaaatgagtacaaaattcttaatttaagagattgtatgtaatatttatttcattaatttctttccttgtttacgtaaattttgaaagattgcatgatttcttgacagaaatcgatcttgatgctgtggaagtagtttgaggaacatcctatgagttttcttagaatgtataaaggttgtagcccatccaacttcaaagaaaaaaatgaccacatactttgcaatcaggctgaaatgtggcatgcttttctaattccaactttataaactagcaaaaaagtgtttgcttattccaccagttctactgtgacatactcgagtataaagacatgtagcaataacggggagtgggggggggagtctcacagtgcctttggaagggcccgaacttgccttaaatcttcctcaaccaaataagtattttattagtgcttgagagaatctgaatgtaggatgggttcaactgcacaaaaggaaaagatttttaccactttttttatatagatataaagtgaagcaaccgccttagtgctgaaatatgtagtacatgaatatgccttgtttaattacagaaaattccaaaacttgtactatttttttttccatgtagaaaggcaggaatgtctcctaagctttcctggacagcagatgaatgagcggtagctttagtttgtacgtaggtacagttggagcactatatgtactctctggactactttggacagaagtaggtttttgaatgtaacaagataagtcaacttgagttgtaatatattttggggaatcagctcactacaaattgtgactgtaaacattgtactgtaaatgttttgtagttttcccccaataaaatttttgggaaataaaaaaaaaaaaaaaaaaaaaaaaaaaaaaaaaaaaagggggggcacccctaaaaaaaacgccacctaggggggggaacaaaataaagtgcgaaacacaacgactgctgagcacgaaacaatggggcacaatagagaggacgcgagacaagaaacgaagagaagacgaggaccgatataaaaagagcgagagcgagaaagaaacgacaaagccggagacatgaaggagacgaccaaaaactatggggtggagcaaaaaatcgggaacaatacatcgaagataaagccgaaggagcatga

SEQ ID NO: 451484 - DNA, 3636 bp, Homo sapiens
agcggagttccagcagtccgcgagctgccgtcggctccgcggggggggcgggccgggcaccccggggcgcggaggagcgctcctcgcttctctccttcccccctgccgcactccgccggaccctcccgccggcccgcgccgctgcactcgccctctcctctcgccccccggcaaactttcggcccctccccgcccctcgcccgttattcgtcgtggctcaagcccggccacgccgccccaagggctcctcccgacctcccggcctgccgctccggccactgcgggatccagaaacatgtcgaccacacttctgtccgccttctacgatgtcgacttcttgtgcaagacagagaaatccctggccaacctcaacctgaacaacatgctggacaagaaggcggtggggacgcctgtggccgccgcccccagctcgggcttcgcgccgggattcctccgacggcactcggccagcaacctgcatgcactcgcccaccccgcgcccagccccggcagctgctcgcccaagttcccgggcgccgctaacggcagcagctgcggcagcgcggcggccggcggtccgacctcctacggcacccttaaggagccgtcggggggcggcggcacagccctgctcaacaaggagaacaaattccgggaccgctcgtttagcgagaacggcgatcgcagccagcacctcctgcacctgcagcagcagcagaaggggggcggcggctcccagatcaactccacgcgctacaagaccgagctgtgccggcccttcgaggagagcggcacgtgcaagtacggcgaaaagtgccagttcgcgcatggcttccacgagctgcgcagcctgactcgccatccgaagtacaagaccgagctgtgccgcacctttcataccatcggcttctgcccctatgggccgcgctgccacttcatccacaacgcggacgagcggcggcccgcgccgtcggggggcgcctccggggacctgcgtgcctttggcacgcgcgatgcgttgcacctgggcttcccgcgggagccgcggcccaagctgcaccacagcctcagcttctcgggcttcccgtcgggccaccatcagcccccgggcggcctcgagtcgccgctgctgctcgacagccccacgtcgcgcacgccgccgccgccctcctgctcttcggcctcgtcctgctcctcctccgcctcctcctgttcctcggcctccgcggcctccacgccctcgggcgccccgacatgctgcgcctccgcggcggccgcggctgcggccgctctgctgtacggcaccgggggcgccgaggacctgctggcgccgggggccccgtgcgcggcctgctcgtcggcctcgtgcgccaacaacgccttcgccttcggtccggagctcagcagcctcatcacgccgctcgccatccagacccacaactttgccgccgtggccgccgccgcctactaccgcagtcagcagcagcagcagcagcagggcctggcgccccccgcgcagccgccggcgccgcccagcgcgaccctccccgccggggccgccgcacctccctcgccgcccttcagcttccagctgccgcgccgcctgtccgactcgcccgtgttcgacgcgccccccagccccccggactcgctgtcggaccgcgacagctacctaagcggctccctgagctccggcagcctcagcggctctgagtctcccagcctcgaccctggccgccgcctgccaatcttcagccgcctctccatctccgacgactgaggcaagagggcgccagtgaggaggaagggaaggcggttcagagatgttggaggacacccctcgccatctcgcccttgctgggggcacgggagtggggggggtgacatgggccctaggcagactgcaagcccgaccgagcacttggactcgaactctgtgccgggaggggcccccacccctcctttttcggtttcctcttgtctttttttttttatttttattacgaagtttcattctttttgagcaaaaaagtcgaactttttctgttgaacaaaatattcacaacagggcagttgtgatacgaatagaacaaaaaaaaaaaaaaaacacttaaactttgttaggactccgatgagtttgggacttcaggaaaaatcaacccagcaccagcagctaccaaccaccattccatctcttcacttgaacagcattagttaagtccagatgtgggaacccttctcttggaagaagttcctaattgtgtctcagaccggtgtaaacaaaccagccagccgccaccttgctaaacctataagctttttaaaatccaatatattctgccaagaatatgccttgatagttagccctcagcccataggtgttttttgttttttaacagaattatatatgtctgggggtgaaaaaacccttgcattccaaaggtccatactggttacttggtttcattgccaccacttagtggatgttcagtttagaaccattttgtctgctccctctggaagccttgcgcagagcttactttgtaattgttggagaataactgctgaatttttagctgttttgagttgattcgcaccactgcaccacaactcaatatgaaaactatttaacttatttattatcttgtgaaaagtatacaatgaaaattttgttcatactgtatttatcaagtatgatgaaaagcaatagatatatattcttttattatgttaaattatgattgccattattaatcggcaaaatgtggagtgtatgttcttttcacagtaatatatgccttttgtaacttcacttggttattttattgtaaatgagtacaaaattcttaatttaagagattgtatgtaatatttatttcattaatttctttccttgtttacgtaaattttgaaagattgcatgatttcttgacagaaatcgatcttgatgctgtggaagtagtttgaggaacatcctatgagttttcttagaatgtataaaggttgtagcccatccaacttcaaagaaaaaaatgaccacatactttgcaatcaggctgaaatgtggcatgcttttctaattccaactttataaactagcaaaaaagtgtttgcttattccaccagttctactgtgacatactcgagtataaagacatgtagcaataacggggagtgggggggggagtctcacagtgcctttggaagggcccgaacttgccttaaatcttcctcaaccaaataagtattttattagtgcttgagagaatctgaatgtaggatgggttcaactgcacaaaaggaaaagatttttaccactttttttatatagatataaagtgaagcaaccgccttagtgctgaaatatgtagtacatgaatatgccttgtttaattacagaaaattccctggacagcagatgaatgagcggtagctttagtttgtacgtaggtacagttggagcactatatgtactctctggactactttggacagaagtaggtttttgaatgtaacaagataagtcaacttgagttgtaatatattttggggaatcagctcactacaaattgtgactgtaaacattgtactgtaaatgttttgtagttttcccccaataaaatttttgggaaataa

SEQ ID NO: 451485 - DNA, 3654 bp, Homo sapiens
agcggagttccagcagtccgcgagctgccgtcggctccgcggggggggcgggccgggcaccccggggcgcggaggagcgctcctcgcttctctccttcccccctgccgcactccgccggaccctcccgccggcccgcgccgctgcactcgccctctcctctcgccccccggcaaactttcggcccctccccgcccctcgcccgttattcgtcgtggctcaagcccggccacgccgccccaagggctcctcccgacctcccggcctgccgctccggccactgcgggatccagaaacatgtcgaccacacttctgtccgccttctacgatgtcgacttcttgtgcaagacagagaaatccctggccaacctcaacctgaacaacatgctggacaagaaggcggtggggacgcctgtggccgccgcccccagctcgggcttcgcgccgggattcctccgacggcactcggccagcaacctgcatgcactcgcccaccccgcgcccagccccggcagctgctcgcccaagttcccgggcgccgctaacggcagcagctgcggcagcgcggcggccggcggtccgacctcctacggcacccttaaggagccgtcggggggcggcggcacagccctgctcaacaaggagaacaaattccgggaccgctcgtttagcgagaacggcgatcgcagccagcacctcctgcacctgcagcagcagcagaaggggggcggcggctcccagatcaactccacgcgctacaagaccgagctgtgccggcccttcgaggagagcggcacgtgcaagtacggcgaaaagtgccagttcgcgcatggcttccacgagctgcgcagcctgactcgccatccgaagtacaagaccgagctgtgccgcacctttcataccatcggcttctgcccctatgggccgcgctgccacttcatccacaacgcggacgagcggcggcccgcgccgtcggggggcgcctccggggacctgcgtgcctttggcacgcgcgatgcgttgcacctgggcttcccgcgggagccgcggcccaagctgcaccacagcctcagcttctcgggcttcccgtcgggccaccatcagcccccgggcggcctcgagtcgccgctgctgctcgacagccccacgtcgcgcacgccgccgccgccctcctgctcttcggcctcgtcctgctcctcctccgcctcctcctgttcctcggcctccgcggcctccacgccctcgggcgccccgacatgctgcgcctccgcggcggccgcggctgcggccgctctgctgtacggcaccgggggcgccgaggacctgctggcgccgggggccccgtgcgcggcctgctcgtcggcctcgtgcgccaacaacgccttcgccttcggtccggagctcagcagcctcatcacgccgctcgccatccagacccacaactttgccgccgtggccgccgccgcctactaccgcagtcagcagcagcagcagcagcagggcctggcgccccccgcgcagccgccggcgccgcccagcgcgaccctccccgccggggccgccgcacctccctcgccgcccttcagcttccagctgccgcgccgcctgtccgactcgcccgtgttcgacgcgccccccagcccccccctgagctccggcagcctcagcggctctgagtctcccagcctcgaccctggccgccgcctgccaatcttcagccgcctctccatctccgacgactgaggcaagagggcgccagtgaggaggaagggaaggcggttcagagatgttggaggacacccctcgccatctcgcccttgctgggggcacgggagtggggggggtgacatgggccctaggcagactgcaagcccgaccgagcacttggactcgaactctgtgccgggaggggcccccacccctcctttttcggtttcctcttgtctttttttttttatttttattacgaagtttcattctttttgagcaaaaaagtcgaactttttctgttgaacaaaatattcacaacagggcagttgtgatacgaatagaacaaaaaaaaaaaaaaaacacttaaactttgttaggactccgatgagtttgggacttcaggaaaaatcaacccagcaccagcagctaccaaccaccattccatctcttcacttgaacagcattagttaagtccagatgtgggaacccttctcttggaagaagttcctaattgtgtctcagaccggtgtaaacaaaccagccagccgccaccttgctaaacctataagctttttaaaatccaatatattctgccaagaatatgccttgatagttagccctcagcccataggtgttttttgttttttaacagaattatatatgtctgggggtgaaaaaacccttgcattccaaaggtccatactggttacttggtttcattgccaccacttagtggatgttcagtttagaaccattttgtctgctccctctggaagccttgcgcagagcttactttgtaattgttggagaataactgctgaatttttagctgttttgagttgattcgcaccactgcaccacaactcaatatgaaaactatttaacttatttattatcttgtgaaaagtatacaatgaaaattttgttcatactgtatttatcaagtatgatgaaaagcaatagatatatattcttttattatgttaaattatgattgccattattaatcggcaaaatgtggagtgtatgttcttttcacagtaatatatgccttttgtaacttcacttggttattttattgtaaatgagtacaaaattcttaatttaagagattgtatgtaatatttatttcattaatttctttccttgtttacgtaaattttgaaagattgcatgatttcttgacagaaatcgatcttgatgctgtggaagtagtttgaggaacatcctatgagttttcttagaatgtataaaggttgtagcccatccaacttcaaagaaaaaaatgaccacatactttgcaatcaggctgaaatgtggcatgcttttctaattccaactttataaactagcaaaaaagtgtttgcttattccaccagttctactgtgacatactcgagtataaagacatgtagcaataacggggagtgggggggggagtctcacagtgcctttggaagggcccgaacttgccttaaatcttcctcaaccaaataagtattttattagtgcttgagagaatctgaatgtaggatgggttcaactgcacaaaaggaaaagatttttaccactttttttatatagatataaagtgaagcaaccgccttagtgctgaaatatgtagtacatgaatatgccttgtttaattacagaaaattccaaaacttgtactatttttttttccatgtagaaaggcaggaatgtctcctaagctttcctggacagcagatgaatgagcggtagctttagtttgtacgtaggtacagttggagcactatatgtactctctggactactttggacagaagtaggtttttgaatgtaacaagataagtcaacttgagttgtaatatattttggggaatcagctcactacaaattgtgactgtaaacattgtactgtaaatgttttgtagttttcccccaataaaatttttgggaaataa

SEQ ID NO: 451486 - DNA, 3647 bp, Homo sapiens
agcggagttccagcagtccgcgagctgccgtcggctccgcggggggggcgggccgggcaccccggggcgcggaggagcgctcctcgcttctctccttcccccctgccgcactccgccggaccctcccgccggcccgcgccgctgcactcgccctctcctctcgccccccggcaaactttcggcccctccccgcccctcgcccgttattcgtcgtggctcaagcccggccacgccgccccaagggctcctcccgacctcccggcctgccgctccggccactgcgggatccagaaacatgtcgaccacacttctgtccgccttctacgatgtcgacttcttgtgcaagacagagaaatccctggccaacctcaacctgaacaacatgctggacaagaaggcggtggggacgcctgtggccgccgcccccagctcgggcttcgcgccgggattcctccgacggcactcggccagcaacctgcatgcactcgcccaccccgcgcccagccccggcagctgctcgcccaagttcccgggcgccgctaacggcagcagctgcggcagcgcggcggccggcggtccgacctcctacggcacccttaaggagccgtcggggggcggcggcacagccctgctcaacaaggagaacaaattccgggaccgctcgtttagcgagaacggcgatcgcagccagcacctcctgcacctgcagcagcagcagaaggggggcggcggctcccagatcaactccacgcgctacaagaccgagctgtgccggcccttcgaggagagcggcacgtgcaagtacggcgaaaagtgccagttcgcgcatggcttccacgagctgcgcagcctgactcgccatccgaagtacaagaccgagctgtgccgcacctttcataccatcggcttctgcccctatgggccgcgctgccacttcatccacaacgcggacgagcggcggcccgcgccgtcggggggcgcctccggggacctgcgtgcctttggcacgcgcgatgcgttgcacctgggcttcccgcgggagccgcggcccaagctgcaccacagcctcagcttctcgggcttcccgtcgggccaccatcagcccccgggcggcctcgagtcgccgctgctgctcgacagccccacgtcgcgcacgccgccgccgccctcctgctcttcggcctcgtcctgctcctcctccgcctcctcctgttcctcggcctccgcggcctccacgccctcgggcgccccgacatgctgcgcctccgcggcggccgcggctgcggccgctctgctgtacggcaccgggggcgccgaggacctgctggcgccgggggccccgtgcgcggcctgctcgtcggcctcgtgcgccaacaacgccttcgccttcggtccggagctcagcagcctcatcacgccgactaccgcagtcagcagcagcagcagcagcagggcctggcgccccccgcgcagccgccggcgccgcccagcgcgaccctccccgccggggccgccgcacctccctcgccgcccttcagcttccagctgccgcgccgcctgtccgactcgcccgtgttcgacgcgccccccagccccccggactcgctgtcggaccgcgacagctacctaagcggctccctgagctccggcagcctcagcggctctgagtctcccagcctcgaccctggccgccgcctgccaatcttcagccgcctctccatctccgacgactgaggcaagagggcgccagtgaggaggaagggaaggcggttcagagatgttggaggacacccctcgccatctcgcccttgctgggggcacgggagtggggggggtgacatgggccctaggcagactgcaagcccgaccgagcacttggactcgaactctgtgccgggaggggcccccacccctcctttttcggtttcctcttgtctttttttttttatttttattacgaagtttcattctttttgagcaaaaaagtcgaactttttctgttgaacaaaatattcacaacagggcagttgtgatacgaatagaacaaaaaaaaaaaaaaaacacttaaactttgttaggactccgatgagtttgggacttcaggaaaaatcaacccagcaccagcagctaccaaccaccattccatctcttcacttgaacagcattagttaagtccagatgtgggaacccttctcttggaagaagttcctaattgtgtctcagaccggtgtaaacaaaccagccagccgccaccttgctaaacctataagctttttaaaatccaatatattctgccaagaatatgccttgatagttagccctcagcccataggtgttttttgttttttaacagaattatatatgtctgggggtgaaaaaacccttgcattccaaaggtccatactggttacttggtttcattgccaccacttagtggatgttcagtttagaaccattttgtctgctccctctggaagccttgcgcagagcttactttgtaattgttggagaataactgctgaatttttagctgttttgagttgattcgcaccactgcaccacaactcaatatgaaaactatttaacttatttattatcttgtgaaaagtatacaatgaaaattttgttcatactgtatttatcaagtatgatgaaaagcaatagatatatattcttttattatgttaaattatgattgccattattaatcggcaaaatgtggagtgtatgttcttttcacagtaatatatgccttttgtaacttcacttggttattttattgtaaatgagtacaaaattcttaatttaagagattgtatgtaatatttatttcattaatttctttccttgtttacgtaaattttgaaagattgcatgatttcttgacagaaatcgatcttgatgctgtggaagtagtttgaggaacatcctatgagttttcttagaatgtataaaggttgtagcccatccaacttcaaagaaaaaaatgaccacatactttgcaatcaggctgaaatgtggcatgcttttctaattccaactttataaactagcaaaaaagtgtttgcttattccaccagttctactgtgacatactcgagtataaagacatgtagcaataacggggagtgggggggggagtctcacagtgcctttggaagggcccgaacttgccttaaatcttcctcaaccaaataagtattttattagtgcttgagagaatctgaatgtaggatgggttcaactgcacaaaaggaaaagatttttaccactttttttatatagatataaagtgaagcaaccgccttagtgctgaaatatgtagtacatgaatatgccttgtttaattacagaaaattccaaaacttgtactatttttttttccatgtagaaaggcaggaatgtctcctaagctttcctggacagcagatgaatgagcggtagctttagtttgtacgtaggtacagttggagcactatatgtactctctggactactttggacagaagtaggtttttgaatgtaacaagataagtcaacttgagttgtaatatattttggggaatcagctcactacaaattgtgactgtaaacattgtactgtaaatgttttgtagttttcccccaataaaatttttgggaaataa

SEQ ID NO: 451487 - DNA, 3568 bp, Homo sapiens
agcggagttccagcagtccgcgagctgccgtcggctccgcggggggggcgggccgggcaccccggggcgcggaggagcgctcctcgcttctctccttcccccctgccgcactccgccggaccctcccgccggcccgcgccgctgcactcgccctctcctctcgccccccggcaaactttcggcccctccccgcccctcgcccgttattcgtcgtggctcaagcccggccacgccgccccaagggctcctcccgacctcccggcctgccgctccggccactgcgggatccagaaacatgtcgaccacacttctgtccgccttctacgatgtcgacttcttgtgcaagacagagaaatccctggccaacctcaacctgaacaacatgctggacaagaaggcggtggggacgcctgtggccgccgcccccagctcgggcttcgcgccgggattcctccgacggcactcggccagcaacctgcatgcactcgcccaccccgcgcccagccccggcagctgctcgcccaagttcccgggcgccgctaacggcagcagctgcggcagcgcggcggccggcggtccgacctcctacggcacccttaaggagccgtcggggggcggcggcacagccctgctcaacaaggagaacaaattccgggaccgctcgtttagcgagaacggcgatcgcagccagcacctcctgcacctgcagcagcagcagaaggggggcggcggctcccagatcaactccacgcgctacaagaccgagctgtgccggcccttcgaggagagcggcacgtgcaagtacggcgaaaagtgccagttcgcgcatggcttccacgagctgcgcagcctgactcgccatccgaagtacaagaccgagctgtgccgcacctttcataccatcggcttctgcccctatgggccgcgctgccacttcatccacaacgcggacgagcggcggcccgcgccgtcggggggcgcctccggggacctgcgtgcctttggcacgcgcgatgcgttgcacctgggcttcccgcgggagccgcggcccaagctgcaccacagcctcagcttctcgggcttcccgtcgggccaccatcagcccccgggcggcctcgagtcgccgctgctgctcgacagccccacgtcgcgcacgccgccgccgccctcctgctcttcggcctcgtcctgctcctcctccgcctcctcctgttcctcggcctccgcggcctccacgccctcgggcgccccgacatgctgcgcctccgcggcggccgcggctgcggccgctctgctgtacggcaccgggggcgccgaggacctgctggcgccgggggccccgtgcgcggcctgctcgtcggcctcgtgcgccaacaacgccttcgccttcggtccggagctcagcagcctcatcacgccgctcgccatccagacccacaactttgccgccgtggccgccgccgcctctgccgcgccgcctgtccgactcgcccgtgttcgacgcgccccccagccccccggactcgctgtcggaccgcgacagctacctaagcggctccctgagctccggcagcctcagcggctctgagtctcccagcctcgaccctggccgccgcctgccaatcttcagccgcctctccatctccgacgactgaggcaagagggcgccagtgaggaggaagggaaggcggttcagagatgttggaggacacccctcgccatctcgcccttgctgggggcacgggagtggggggggtgacatgggccctaggcagactgcaagcccgaccgagcacttggactcgaactctgtgccgggaggggcccccacccctcctttttcggtttcctcttgtctttttttttttatttttattacgaagtttcattctttttgagcaaaaaagtcgaactttttctgttgaacaaaatattcacaacagggcagttgtgatacgaatagaacaaaaaaaaaaaaaaaacacttaaactttgttaggactccgatgagtttgggacttcaggaaaaatcaacccagcaccagcagctaccaaccaccattccatctcttcacttgaacagcattagttaagtccagatgtgggaacccttctcttggaagaagttcctaattgtgtctcagaccggtgtaaacaaaccagccagccgccaccttgctaaacctataagctttttaaaatccaatatattctgccaagaatatgccttgatagttagccctcagcccataggtgttttttgttttttaacagaattatatatgtctgggggtgaaaaaacccttgcattccaaaggtccatactggttacttggtttcattgccaccacttagtggatgttcagtttagaaccattttgtctgctccctctggaagccttgcgcagagcttactttgtaattgttggagaataactgctgaatttttagctgttttgagttgattcgcaccactgcaccacaactcaatatgaaaactatttaacttatttattatcttgtgaaaagtatacaatgaaaattttgttcatactgtatttatcaagtatgatgaaaagcaatagatatatattcttttattatgttaaattatgattgccattattaatcggcaaaatgtggagtgtatgttcttttcacagtaatatatgccttttgtaacttcacttggttattttattgtaaatgagtacaaaattcttaatttaagagattgtatgtaatatttatttcattaatttctttccttgtttacgtaaattttgaaagattgcatgatttcttgacagaaatcgatcttgatgctgtggaagtagtttgaggaacatcctatgagttttcttagaatgtataaaggttgtagcccatccaacttcaaagaaaaaaatgaccacatactttgcaatcaggctgaaatgtggcatgcttttctaattccaactttataaactagcaaaaaagtgtttgcttattccaccagttctactgtgacatactcgagtataaagacatgtagcaataacggggagtgggggggggagtctcacagtgcctttggaagggcccgaacttgccttaaatcttcctcaaccaaataagtattttattagtgcttgagagaatctgaatgtaggatgggttcaactgcacaaaaggaaaagatttttaccactttttttatatagatataaagtgaagcaaccgccttagtgctgaaatatgtagtacatgaatatgccttgtttaattacagaaaattccaaaacttgtactatttttttttccatgtagaaaggcaggaatgtctcctaagctttcctggacagcagatgaatgagcggtagctttagtttgtacgtaggtacagttggagcactatatgtactctctggactactttggacagaagtaggtttttgaatgtaacaagataagtcaacttgagttgtaatatattttggggaatcagctcactacaaattgtgactgtaaacattgtactgtaaatgttttgtagttttcccccaataaaatttttgggaaataa

SEQ ID NO: 451488 - DNA, 3396 bp, Homo sapiens
agcggagttccagcagtccgcgagctgccgtcggctccgcggggggggcgggccgggcaccccggggcgcggaggagcgctcctcgcttctctccttcccccctgccgcactccgccggaccctcccgccggcccgcgccgctgcactcgccctctcctctcgccccccggcaaactttcggcccctccccgcccctcgcccgttattcgtcgtggctcaagcccggccacgccgccccaagggctcctcccgacctcccggcctgccgctccggccactgcgggatccagaaacatgtcgaccacacttctgtccgccttctacgatgtcgacttcttgtgcaagacagagaaatccctggccaacctcaacctgaacaacatgctggacaagaaggcggtggggacgcctgtggccgccgcccccagctcgggcttcgcgccgggattcctccgacggcactcggccagcaacctgcatgcactcgcccaccccgcgcccagccccggcagctgctcgcccaagttcccgggcgccgctaacggcagcagctgcggcagcgcggcggccggcggtccgacctcctacggcacccttaaggagccgtcggggggcggcggcacagccctgctcaacaaggagaacaaattccgggaccgctcgtttagcgagaacggcgatcgcagccagcacctcctgcacctgcagcagcagcagaaggggggcggcggctcccagatcaactccacgcgctacaagaccgagctgtgccggcccttcgaggagagcggcacgtgcaagtacggcgaaaagtgccagttcgcgcatggcttccacgagctgcgcagcctgactcgccatccgaagtacaagaccgagctgtgccgcacctttcataccatcggcttctgcccctatgggccgcgctgccacttcatccacaacgcggacgagcggcggcccgcgccgtcggggggcgcctccggggacctgcgtgcctttggcacgcgcgatgcgttgcacctgggcttcccgcgggagccgcggcccaagctgcaccacagcctcagcttctcgggcttcccgtcgggccaccatcagcccccgggcggcctcgagtcgccgctgctgctcgacagccccacgtcgcgcacgccgccgccgccctcctgctcttcggcctcgtcctgctcctcctccgcctcctcctgttcctcggcctccgcggcctccacgccctcgggcgccccgacatgctgcgcctccgcggcggccgcggctgcggccgctctgctgtacggcaccgggggcgccgaggacctgctggcgccgggggccccgtgcgcggcctgctcgtcggcctcgtgcgccaacaacgccttcgccctgagctccggcagcctcagcggctctgagtctcccagcctcgaccctggccgccgcctgccaatcttcagccgcctctccatctccgacgactgaggcaagagggcgccagtgaggaggaagggaaggcggttcagagatgttggaggacacccctcgccatctcgcccttgctgggggcacgggagtggggggggtgacatgggccctaggcagactgcaagcccgaccgagcacttggactcgaactctgtgccgggaggggcccccacccctcctttttcggtttcctcttgtctttttttttttatttttattacgaagtttcattctttttgagcaaaaaagtcgaactttttctgttgaacaaaatattcacaacagggcagttgtgatacgaatagaacaaaaaaaaaaaaaaaacacttaaactttgttaggactccgatgagtttgggacttcaggaaaaatcaacccagcaccagcagctaccaaccaccattccatctcttcacttgaacagcattagttaagtccagatgtgggaacccttctcttggaagaagttcctaattgtgtctcagaccggtgtaaacaaaccagccagccgccaccttgctaaacctataagctttttaaaatccaatatattctgccaagaatatgccttgatagttagccctcagcccataggtgttttttgttttttaacagaattatatatgtctgggggtgaaaaaacccttgcattccaaaggtccatactggttacttggtttcattgccaccacttagtggatgttcagtttagaaccattttgtctgctccctctggaagccttgcgcagagcttactttgtaattgttggagaataactgctgaatttttagctgttttgagttgattcgcaccactgcaccacaactcaatatgaaaactatttaacttatttattatcttgtgaaaagtatacaatgaaaattttgttcatactgtatttatcaagtatgatgaaaagcaatagatatatattcttttattatgttaaattatgattgccattattaatcggcaaaatgtggagtgtatgttcttttcacagtaatatatgccttttgtaacttcacttggttattttattgtaaatgagtacaaaattcttaatttaagagattgtatgtaatatttatttcattaatttctttccttgtttacgtaaattttgaaagattgcatgatttcttgacagaaatcgatcttgatgctgtggaagtagtttgaggaacatcctatgagttttcttagaatgtataaaggttgtagcccatccaacttcaaagaaaaaaatgaccacatactttgcaatcaggctgaaatgtggcatgcttttctaattccaactttataaactagcaaaaaagtgtttgcttattccaccagttctactgtgacatactcgagtataaagacatgtagcaataacggggagtgggggggggagtctcacagtgcctttggaagggcccgaacttgccttaaatcttcctcaaccaaataagtattttattagtgcttgagagaatctgaatgtaggatgggttcaactgcacaaaaggaaaagatttttaccactttttttatatagatataaagtgaagcaaccgccttagtgctgaaatatgtagtacatgaatatgccttgtttaattacagaaaattccaaaacttgtactatttttttttccatgtagaaaggcaggaatgtctcctaagctttcctggacagcagatgaatgagcggtagctttagtttgtacgtaggtacagttggagcactatatgtactctctggactactttggacagaagtaggtttttgaatgtaacaagataagtcaacttgagttgtaatatattttggggaatcagctcactacaaattgtgactgtaaacattgtactgtaaatgttttgtagttttcccccaataaaatttttgggaaataa

SEQ ID NO: 451489 - DNA, 3430 bp, Homo sapiens
agcggagttccagcagtccgcgagctgccgtcggctccgcggggggggcgggccgggcaccccggggcgcggaggagcgctcctcgcttctctccttcccccctgccgcactccgccggaccctcccgccggcccgcgccgctgcactcgccctctcctctcgccccccggcaaactttcggcccctccccgcccctcgcccgttattcgtcgtggctcaagcccggccacgccgccccaagggctcctcccgacctcccggcctgccgctccggccactgcgggatccagaaacatgtcgaccacacttctgtccgccttctacgatgtcgacttcttgtgcaagacagagaaatccctggccaacctcaacctgaacaacatgctggacaagaaggcggtggggacgcctgtggccgccgcccccagctcgggcttcgcgccgggattcctccgacggcactcggccagcaacctgcatgcactcgcccaccccgcgcccagccccggcagctgctcgcccaagttcccgggcgccgctaacggcagcagctgcggcagcgcggcggccggcggtccgacctcctacggcacccttaaggagccgtcggggggcggcggcacagccctgctcaacaaggagaacaaattccgggaccgctcgtttagcgagaacggcgatcgcagccagcacctcctgcacctgcagcagcagcagaaggggggcggcggctcccagatcaactccacgcgctacaagaccgagctgtgccggcccttcgaggagagcggcacgtgcaagtacggcgaaaagtgccagttcgcgcatggcttccacgagctgcgcagcctgactcgccatccgaagtacaagaccgagctgtgccgcacctttcataccatcggcttctgcccctatgggccgcgctgccacttcatccacaacgcggacgagcggcggcccgcgccgtcggggggcgcctccggggacctgcgtgcctttggcacgcgcgatgcgttgcacctgggcttcccgcgggagccgcggcccaagctgcaccacagcctcagcttctcgggcttcccgtcgggccaccatcagcccccgggcggcctcgagtcgccgctgctgctcgacagccccacgtcgcgcacgccgccgccgccctcctgctcttcggcctcgtcctgctcctcctccgcactaccgcagtcagcagcagcagcagcagcagggcctggcgccccccgcgcagccgccggcgccgcccagcgcgaccctccccgccggggccgccgcacctccctcgccgcccttcagcttccagctgccgcgccgcctgtccgactcgcccgtgttcgacgcgccccccagccccccggactcgctgtcggaccgcgacagctacctaagcggctccctgagctccggcagcctcagcggctctgagtctcccagcctcgaccctggccgccgcctgccaatcttcagccgcctctccatctccgacgactgaggcaagagggcgccagtgaggaggaagggaaggcggttcagagatgttggaggacacccctcgccatctcgcccttgctgggggcacgggagtggggggggtgacatgggccctaggcagactgcaagcccgaccgagcacttggactcgaactctgtgccgggaggggcccccacccctcctttttcggtttcctcttgtctttttttttttatttttattacgaagtttcattctttttgagcaaaaaagtcgaactttttctgttgaacaaaatattcacaacagggcagttgtgatacgaatagaacaaaaaaaaaaaaaaaacacttaaactttgttaggactccgatgagtttgggacttcaggaaaaatcaacccagcaccagcagctaccaaccaccattccatctcttcacttgaacagcattagttaagtccagatgtgggaacccttctcttggaagaagttcctaattgtgtctcagaccggtgtaaacaaaccagccagccgccaccttgctaaacctataagctttttaaaatccaatatattctgccaagaatatgccttgatagttagccctcagcccataggtgttttttgttttttaacagaattatatatgtctgggggtgaaaaaacccttgcattccaaaggtccatactggttacttggtttcattgccaccacttagtggatgttcagtttagaaccattttgtctgctccctctggaagccttgcgcagagcttactttgtaattgttggagaataactgctgaatttttagctgttttgagttgattcgcaccactgcaccacaactcaatatgaaaactatttaacttatttattatcttgtgaaaagtatacaatgaaaattttgttcatactgtatttatcaagtatgatgaaaagcaatagatatatattcttttattatgttaaattatgattgccattattaatcggcaaaatgtggagtgtatgttcttttcacagtaatatatgccttttgtaacttcacttggttattttattgtaaatgagtacaaaattcttaatttaagagattgtatgtaatatttatttcattaatttctttccttgtttacgtaaattttgaaagattgcatgatttcttgacagaaatcgatcttgatgctgtggaagtagtttgaggaacatcctatgagttttcttagaatgtataaaggttgtagcccatccaacttcaaagaaaaaaatgaccacatactttgcaatcaggctgaaatgtggcatgcttttctaattccaactttataaactagcaaaaaagtgtttgcttattccaccagttctactgtgacatactcgagtataaagacatgtagcaataacggggagtgggggggggagtctcacagtgcctttggaagggcccgaacttgccttaaatcttcctcaaccaaataagtattttattagtgcttgagagaatctgaatgtaggatgggttcaactgcacaaaaggaaaagatttttaccactttttttatatagatataaagtgaagcaaccgccttagtgctgaaatatgtagtacatgaatatgccttgtttaattacagaaaattccaaaacttgtactatttttttttccatgtagaaaggcaggaatgtctcctaagctttcctggacagcagatgaatgagcggtagctttagtttgtacgtaggtacagttggagcactatatgtactctctggactactttggacagaagtaggtttttgaatgtaacaagataagtcaacttgagttgtaatatattttggggaatcagctcactacaaattgtgactgtaaacattgtactgtaaatgttttgtagttttcccccaataaaatttttgggaaataa

SEQ ID NO: 451490 - DNA, 2184 bp, Homo sapiens
  misc_feature (1949)..(1950): n is a, c, g, or t
  misc_feature (1952)..(1952): n is a, c, g, or t
agcggagttccagcagtccgcgagctgccgtcggctccgcggggggggcgggccgggcaccccggggcgcggaggagcgctcctcgcttctctccttcccccctgccgcactccgccggaccctcccgccggcccgcgccgctgcactcgccctctcctctcgccccccggcaaactttcggcccctccccgcccctcgcccgttattcgtcgtggctcaagcccggccacgccgccccaagggctcctcccgacctcccggcctgccgctccggccactgcgggatccagaaacatgtcgaccacacttctgtccgccttctacgatgtcgacttcttgtgcaagacagagaaatccctggccaacctcaacctgaacaacatgctggacaagaaggcggtggggacgcctgtggccgccgcccccagctcgggcttcgcgccgggattcctccgacggcactcggccagcaacctgcatgcactcgcccaccccgcgcccagccccggcagctgctcgcccaagttcccgggcgccgctaacggcagcagctgcggcagcgcggcggccggcggtccgacctcctacggcacccttaaggagccgtcggggggcggcggcacagccctgctcaacaaggagaacaaattccgggaccgctcgtttagcgagaacggcgatcgcagccagcacctcctgcacctgcagcagcagcagaaggggggcggcggctcccagatcaactccacgcgctacaagaccgagctgtgccggcccttcgaggagagcggcacgtgcaagtacggcgaaaagtgccagttcgcgcatggcttccacgagctgcgcagcctgactcgccatccgaagtacaagaccgagctgtgccgcacctttcataccatcggcttctgcccctatgggccgcgctgccacttcatccacaacgcggacgagcggcggcccgcgccgtcggggggcgcctccggggacctgcgtgcctttggcacgcgcgatgcgttgcacctgggcttcccgcgggagccgcggcccaagctgcaccacagcctcagcttctcgggcttcccgtcgggccaccatcagcccccgggcggcctcgagtcgccgctgctgctcgacagccccacgtcgcgcacgccgccgccgccctcctgctcttcggcctcgtcctgctcctcctccgcctcctcctgttcctcggcctccgcggcctccacgccctcgggcgccccgacatgctgcgcctccgcggcggccgcggctgcggccgctctgctgtacggcaccgggggcgccgaggacctgctggcgccgggggccccgtgcgcggcctgctcgtcggcctcgtgcgccaacaacgccttcgccttcggtccggagctcagcagcctcatcacgccgctcgccatccagacccacaactttgccgccgtggccgccgccgcctactaccgcagtcagcagcagcagcagcagcagggcctggcgccccccgcgcagccgccggcgccgcccagcgcgaccctccccgccggggccgccgcacctccctcgccgcccttcagcttccagctgccgcgccgcctgtccgactcgcccgtgttcgacgcgccccccagccccccggactcgctgtcggaccgcgacagctacctaagcggctccctgagctccggcagcctcagcggctctgagtctcccagcctcgaccctggccgccgcctgccaatcttcagccgcctctccatctccgacgactgaggcaagagggcgccagtgaggaggaagggaaggcggttcagagatgttggaggacacccctcgccatctcgcccttgctgggggcacgggagtggggggggtgacatgggccctaggcagactgcaagcccgaccgagcacttggactcgaactctgtgccgggagggnngntatttgcaggaaatatatgattgaaatagtcaaaagagtgggtgacccggaagagaacggtgccgatcgtgtagcacagtgcaagaaaccttgcagagacacggagcacagtccggataggactgggcgatggccatgacattggcaattagggagcttaatcgcagcggcctttactttatccttttagagggtagccgcagttctttagataaccgtgttgtgggtctgg

SEQ ID NO: 451491 - DNA, 859 bp, Homo sapiens
agcggagttccagcagtccgcgagctgccgtcggctccgcggggggggcgggccgggcaccccggggcgcggaggagcgctcctcgcttctctccttcccccctgccgcactccgccggaccctcccgccggcccgcgccgctgcactcgccctctcctctcgccccccggcaaactttcggcccctccccgcccctcgcccgttattcgtcgtggctcaagcccggccacgccgccccaagggctcctcccgacctcccggcctgccgctccggccactgcgggatccagaaacatgtcgaccacacttctgtccgccttctacgatgtcgacttcttgtgcaagacagagaaatccctggccaacctcaacctgaacaacttgccttaaatcttcctcaaccaaataagtattttattagtgcttgagagaatctgaatgtaggatgggttcaactgcacaaaaggaaaagatttttaccactttttttatatagatataaagtgaagcaaccgccttagtgctgaaatatgtagtacatgaatatgccttgtttaattacagaaaattccaaaacttgtactatttttttttccatgtagaaaggcaggaatgtctcctaagctttcctggacagcagatgaatgagcggtagctttagtttgtacgtaggtacagttggagcactatatgtactctctggactactttggacagaagtaggtttttgaatgtaacaagataagtcaacttgagttgtaatatattttggggaatcagctcactacaaattgtgactgtaaacattgtactgtaaatgttttgtagttttcccccaataaaatttttgggaaataa

SEQ ID NO: 451492 - DNA, 686 bp, Homo sapiens
ggcgcggaggagcgctcctcgcttctctccttcccccctgccgcactccgccggaccctcccgccggcccgcgccgctgcactcgccctctcctctcgccccccggcaaactttcggcccctccccgcccctcgcccgttattcgtcgtggctcaagcccggccacgccgccccaagggctcctcccgacctcccggcctgccgctccggccactgcgggatccagaaacatgtcgaccacacttctgtccgccttctacgatgtcgacttcttgtgcaaggtaggccagggagcgggcccggccggcagcagccgttgtagttcttggactttgcctctgtccccaggttctgggggacgcccctcccgccctgcctttcaggtcgggaaagtcccggggtttgcaaaagagtgtccgagcgccctggaggcggggagggcggcaaggagggcgccggtgtcgcggttgagtttctccactgccgaccgcggccacgctgcccggggcttcccggacaggcttcgcgccgcccacctcggcagccggggcggaggatcacgtgtcgaaacccagcgcggcccacggtgggcgtcctcccctctcccgctccgtccagcaagatcttgctggttttgcgcgtgtataggtggagggtggaggccgagtcgggatccgccaagagtg

SEQ ID NO: 451493 - DNA, 3555 bp, Homo sapiens
gacaaaaacaacatgaaaacaacacatggcgggggaacttaggctaggttagcgaggccggggtgaatcggccgagggctcaagcccggccacgccgccccaagggctcctcccgacctcccggcctgccgctccggccactgcgggatccagaaacatgtcgaccacacttctgtccgccttctacgatgtcgacttcttgtgcaagacagagaaatccctggccaacctcaacctgaacaacatgctggacaagaaggcggtggggacgcctgtggccgccgcccccagctcgggcttcgcgccgggattcctccgacggcactcggccagcaacctgcatgcactcgcccaccccgcgcccagccccggcagctgctcgcccaagttcccgggcgccgctaacggcagcagctgcggcagcgcggcggccggcggtccgacctcctacggcacccttaaggagccgtcggggggcggcggcacagccctgctcaacaaggagaacaaattccgggaccgctcgtttagcgagaacggcgatcgcagccagcacctcctgcacctgcagcagcagcagaaggggggcggcggctcccagatcaactccacgcgctacaagaccgagctgtgccggcccttcgaggagagcggcacgtgcaagtacggcgaaaagtgccagttcgcgcatggcttccacgagctgcgcagcctgactcgccatccgaagtacaagaccgagctgtgccgcacctttcataccatcggcttctgcccctatgggccgcgctgccacttcatccacaacgcggacgagcggcggcccgcgccgtcggggggcgcctccggggacctgcgtgcctttggcacgcgcgatgcgttgcacctgggcttcccgcgggagccgcggcccaagctgcaccacagcctcagcttctcgggcttcccgtcgggccaccatcagcccccgggcggcctcgagtcgccgctgctgctcgacagccccacgtcgcgcacgccgccgccgccctcctgctcttcggcctcgtcctgctcctcctccgcctcctcctgttcctcggcctccgcggcctccacgccctcgggcgccccgacatgctgcgcctccgcggcggccgcggctgcggccgctctgctgtacggcaccgggggcgccgaggacctgctggcgccgggggccccgtgcgcggcctgctcgtcggcctcgtgcgccaacaacgccttcgccttcggtccggagctcagcagcctcatcacgccgctcgccatccagacccacaactttgccgccgtggccgccgccgcctactaccgcagtcagcagcagcagcagcagcagggcctggcgccccccgcgcagccgccggcgccgcccagcgcgaccctccccgccggggccgccgcacctccctcgccgcccttcagcttccagctgccgcgccgcctgtccgactcgcccgtgttcgacgcgccccccagccccccggactcgctgtcggaccgcgacagctacctaagcggctccctgagctccggcagcctcagcggctctgagtctcccagcctcgaccctggccgccgcctgccaatcttcagccgcctctccatctccgacgactgaggcaagagggcgccagtgaggaggaagggaaggcggttcagagatgttggaggacacccctcgccatctcgcccttgctgggggcacgggagtggggggggtgacatgggccctaggcagactgcaagcccgaccgagcacttggactcgaactctgtgccgggaggggcccccacccctcctttttcggtttcctcttgtctttttttttttatttttattacgaagtttcattctttttgagcaaaaaagtcgaactttttctgttgaacaaaatattcacaacagggcagttgtgatacgaatagaacaaaaaaaaaaaaaaaacacttaaactttgttaggactccgatgagtttgggacttcaggaaaaatcaacccagcaccagcagctaccaaccaccattccatctcttcacttgaacagcattagttaagtccagatgtgggaacccttctcttggaagaagttcctaattgtgtctcagaccggtgtaaacaaaccagccagccgccaccttgctaaacctataagctttttaaaatccaatatattctgccaagaatatgccttgatagttagccctcagcccataggtgttttttgttttttaacagaattatatatgtctgggggtgaaaaaacccttgcattccaaaggtccatactggttacttggtttcattgccaccacttagtggatgttcagtttagaaccattttgtctgctccctctggaagccttgcgcagagcttactttgtaattgttggagaataactgctgaatttttagctgttttgagttgattcgcaccactgcaccacaactcaatatgaaaactatttaacttatttattatcttgtgaaaagtatacaatgaaaattttgttcatactgtatttatcaagtatgatgaaaagcaatagatatatattcttttattatgttaaattatgattgccattattaatcggcaaaatgtggagtgtatgttcttttcacagtaatatatgccttttgtaacttcacttggttattttattgtaaatgagtacaaaattcttaatttaagagattgtatgtaatatttatttcattaatttctttccttgtttacgtaaattttgaaagattgcatgatttcttgacagaaatcgatcttgatgctgtggaagtagtttgaggaacatcctatgagttttcttagaatgtataaaggttgtagcccatccaacttcaaagaaaaaaatgaccacatactttgcaatcaggctgaaatgtggcatgcttttctaattccaactttataaactagcaaaaaagtgtttgcttattccaccagttctactgtgacatactcgagtataaagacatgtagcaataacggggagtgggggggggagtctcacagtgcctttggaagggcccgaacttgccttaaatcttcctcaaccaaataagtattttattagtgcttgagagaatctgaatgtaggatgggttcaactgcacaaaaggaaaagatttttaccactttttttatatagatataaagtgaagcaaccgccttagtgctgaaatatgtagtacatgaatatgccttgtttaattacagaaaattccaaaacttgtactatttttttttccatgtagaaaggcaggaatgtctcctaagctttcctggacagcagatgaatgagcggtagctttagtttgtacgtaggtacagttggagcactatatgtactctctggactactttggacagaagtaggtttttgaatgtaacaagataagtcaacttgagttgtaatatattttggggaatcagctcactacaaattgtgactgtaaacattgtactgtaaatgttttgtagttttcccccaataaaatttttgggaaataa

SEQ ID NO: 451494 - DNA, 3639 bp, Homo sapiens
agcggagttccagcagtccgcgagctgccgtcggctccgcggggggggcgggccgggcaccccggggcgcggaggagcgctcctcgcttctctccttcccccctgccgcactccgccggaccctcccgccggcccgcgccgctgcactcgccctctcctctcgccccccggcaaactttcggcccctccccgcccctcgcccgttattcgtcgtggctcaagcccggccacgccgccccaagggctcctcccgacctcccggcctgccgctccggccactgcgggatccagaaacatgtcgaccacacttctgtccgccttctacgatgtcgacttcttgtgcaagacagagaaatccctggccaacctcaacctgaacaacatgctggacaagaaggcggtggggacgcctgtggccgccgcccccagctcgggcttcgcgccgggattcctccgacggcactcggccagcaacctgcatgcactcgcccaccccgcgcccagccccggcagctgctcgcccaagttcccgggcgccgctaacggcagcagctgcggcagcgcggcggccggcggtccgacctcctacggcacccttaaggagccgtcggggggcggcggcacagccctgctcaacaaggagaacaaattccgggaccgctcgtttagcgagaacggcgatcgcagccagcacctcctgcacctgcagcagcagcagaaggggggcggcggctcccagatcaactccacgcgctacaagaccgagctgtgccggcccttcgaggagagcggcacgtgcaagtacggcgaaaagtgccagttcgcgcatggcttccacgagctgcgcagcctgactcgccatccgaagtacaagaccgagctgtgccgcacctttcataccatcggcttctgcccctatgggccgcgctgccacttcatccacaacgcggacgagcggcggcccgcgccgtcggggggcgcctccggggacctgcgtgcctttggcacgcgcgatgcgttgcacctgggcttcccgcgggagccgcggcccaagctgcaccacagcctcagcttctcgggcttcccgtcgggccaccatcagcccccgggcggcctcgagtcgccgctgctgctcgacagccccacgtcgcgcacgccgccgccgccctcctgctcttcggcctcgtcctgctcctcctccgcctcctcctgttcctcggcctccgcggcctccacgccctcgggcgccccgacatgctgcgcctccgcggcggccgcggctgcggccgctctgctgtacggcaccgggggcgccgaggacctgctggcgccgggggccccgtgcgcggcctgctcgtcggcctcgtgcgccaacaacgccttcgccttcggtccggagctcagcagcctcatcacgccgctcgccatccagacccacaactttgccgccgtggccgccgccgcctactaccgcagtcagcagcagcagcagcagcagggcctggcgccccccgcgcagccgccggcgccgcccagcgcgaccctccccgccggggccgccgcacctccctcgccgcccttcagcttccagctgccgcgccgcctgtccgactcgcccgtgttcgacgcgccccccagccccccggactcgctgtcggaccgcgacagctacctaagcggctccctgagctccggcagcctcagcggctctgagtctcccagcctcgaccctggccgccgcctgccaatcttcagccgcctctccatctccgacgactgaggcaagagggcgccagtgaggaggaagggaaggcggttcagagatgttggaggacacccctcgccatctcgcccttgctgggggcacgggagtggggggggtgacatgggccctaggcagactgcaagcccgaccgagcacttggactcgaactctgtgccgggaggggcccccacccctcctttttcggtttcctcttgtctttttttttttatttttattacgaagtttcattctttttgagcaaaaaagtcgaactttttctgttgaacaaaatattcacaacagggcagttgtgatacgaatagaacaaaaaaaaaaaaaaaacacttaaactttgttaggactccgatgagtttgggacttcaggaaaaatcaacccagcaccagcagctaccaaccaccattccatctcttcacttgaacagcattagttaagtccagatgtgggaacccttctcttggaagaagttcctaattgtgtctcagaccggtgtaaacaaaccagccagccgccaccttgctaaacctataagctttttaaaatccaatatattctgccaagaatatgccttgatagttagccctcagcccataggtgttttttgttttttaacagaattatatatgtctgggggtgaaaaaacccttgcattccaaaggtccatactggttacttggtttcattgccaccacttagtggatgttcagtttagaaccattttgtctgctccctctggaagccttgcgcagagcttactttgtaattgttggagaataactgctgaatttttagctgttttgagttgattcgcaccactgcaccacaactcaatatgaaaactatttaacttatttattatcttgtgaaaagtatacaatgaaaattttgttcatactgtatttatcaagtatgatgaaaagcaatagatatatattcttttattatgttaaattatgattgccattattaatcggcttggttattttattgtaaatgagtacaaaattcttaatttaagagattgtatgtaatatttatttcattaatttctttccttgtttacgtaaattttgaaagattgcatgatttcttgacagaaatcgatcttgatgctgtggaagtagtttgaggaacatcctatgagttttcttagaatgtataaaggttgtagcccatccaacttcaaagaaaaaaatgaccacatactttgcaatcaggctgaaatgtggcatgcttttctaattccaactttataaactagcaaaaaagtgtttgcttattccaccagttctactgtgacatactcgagtataaagacatgtagcaataacggggagtgggggggggagtctcacagtgcctttggaagggcccgaacttgccttaaatcttcctcaaccaaataagtattttattagtgcttgagagaatctgaatgtaggatgggttcaactgcacaaaaggaaaagatttttaccactttttttatatagatataaagtgaagcaaccgccttagtgctgaaatatgtagtacatgaatatgccttgtttaattacagaaaattccaaaacttgtactatttttttttccatgtagaaaggcaggaatgtctcctaagctttcctggacagcagatgaatgagcggtagctttagtttgtacgtaggtacagttggagcactatatgtactctctggactactttggacagaagtaggtttttgaatgtaacaagataagtcaacttgagttgtaatatattttggggaatcagctcactacaaattgtgactgtaaacattgtactgtaaatgttttgtagttttcccccaataaaatttttgggaaataa

SEQ ID NO: 451495 - DNA, 3511 bp, Homo sapiens
agcggagttccagcagtccgcgagctgccgtcggctccgcggggggggcgggccgggcaccccggggcgcggaggagcgctcctcgcttctctccttcccccctgccgcactccgccggaccctcccgccggcccgcgccgctgcactcgccctctcctctcgccccccggcaaactttcggcccctccccgcccctcgcccgttattcgtcgtggctcaagcccggccacgccgccccaagggctcctcccgacctcccggcctgccgctccggccactgcgggatccagaaacatgtcgaccacacttctgtccgccttctacgatgtcgacttcttgtgcaagacagagaaatccctggccaacctcaacctgaacaacatgctggacaagaaggcggtggggacgcctgtggccgccgcccccagctcgggcttcgcgccgggattcctccgacggcactcggccagcaacctgcatgcactcgcccaccccgcgcccagccccggcagctgctcgcccaagttcccgggcgccgctaacggcagcagctgcggcagcgcggcggccggcggtccgacctcctacggcacccttaaggagccgtcggggggcggcggcacagccctgctcaacaaggagaacaaattccgggaccgctcgtttagcgagaacggcgatcgcagccagcacctcctgcacctgcagcagcagcagaaggggggcggcggctcccagatcaactccacgcgctacaagaccgagctgtgccggcccttcgaggagagcggcacgtgcaagtacggcgaaaagtgcctttggcacgcgcgatgcgttgcacctgggcttcccgcgggagccgcggcccaagctgcaccacagcctcagcttctcgggcttcccgtcgggccaccatcagcccccgggcggcctcgagtcgccgctgctgctcgacagccccacgtcgcgcacgccgccgccgccctcctgctcttcggcctcgtcctgctcctcctccgcctcctcctgttcctcggcctccgcggcctccacgccctcgggcgccccgacatgctgcgcctccgcggcggccgcggctgcggccgctctgctgtacggcaccgggggcgccgaggacctgctggcgccgggggccccgtgcgcggcctgctcgtcggcctcgtgcgccaacaacgccttcgccttcggtccggagctcagcagcctcatcacgccgctcgccatccagacccacaactttgccgccgtggccgccgccgcctactaccgcagtcagcagcagcagcagcagcagggcctggcgccccccgcgcagccgccggcgccgcccagcgcgaccctccccgccggggccgccgcacctccctcgccgcccttcagcttccagctgccgcgccgcctgtccgactcgcccgtgttcgacgcgccccccagccccccggactcgctgtcggaccgcgacagctacctaagcggctccctgagctccggcagcctcagcggctctgagtctcccagcctcgaccctggccgccgcctgccaatcttcagccgcctctccatctccgacgactgaggcaagagggcgccagtgaggaggaagggaaggcggttcagagatgttggaggacacccctcgccatctcgcccttgctgggggcacgggagtggggggggtgacatgggccctaggcagactgcaagcccgaccgagcacttggactcgaactctgtgccgggaggggcccccacccctcctttttcggtttcctcttgtctttttttttttatttttattacgaagtttcattctttttgagcaaaaaagtcgaactttttctgttgaacaaaatattcacaacagggcagttgtgatacgaatagaacaaaaaaaaaaaaaaaacacttaaactttgttaggactccgatgagtttgggacttcaggaaaaatcaacccagcaccagcagctaccaaccaccattccatctcttcacttgaacagcattagttaagtccagatgtgggaacccttctcttggaagaagttcctaattgtgtctcagaccggtgtaaacaaaccagccagccgccaccttgctaaacctataagctttttaaaatccaatatattctgccaagaatatgccttgatagttagccctcagcccataggtgttttttgttttttaacagaattatatatgtctgggggtgaaaaaacccttgcattccaaaggtccatactggttacttggtttcattgccaccacttagtggatgttcagtttagaaccattttgtctgctccctctggaagccttgcgcagagcttactttgtaattgttggagaataactgctgaatttttagctgttttgagttgattcgcaccactgcaccacaactcaatatgaaaactatttaacttatttattatcttgtgaaaagtatacaatgaaaattttgttcatactgtatttatcaagtatgatgaaaagcaatagatatatattcttttattatgttaaattatgattgccattattaatcggcaaaatgtggagtgtatgttcttttcacagtaatatatgccttttgtaacttcacttggttattttattgtaaatgagtacaaaattcttaatttaagagattgtatgtaatatttatttcattaatttctttccttgtttacgtaaattttgaaagattgcatgatttcttgacagaaatcgatcttgatgctgtggaagtagtttgaggaacatcctatgagttttcttagaatgtataaaggttgtagcccatccaacttcaaagaaaaaaatgaccacatactttgcaatcaggctgaaatgtggcatgcttttctaattccaactttataaactagcaaaaaagtgtttgcttattccaccagttctactgtgacatactcgagtataaagacatgtagcaataacggggagtgggggggggagtctcacagtgcctttggaagggcccgaacttgccttaaatcttcctcaaccaaataagtattttattagtgcttgagagaatctgaatgtaggatgggttcaactgcacaaaaggaaaagatttttaccactttttttatatagatataaagtgaagcaaccgccttagtgctgaaatatgtagtacatgaatatgccttgtttaattacagaaaattccaaaacttgtactatttttttttccatgtagaaaggcaggaatgtctcctaagctttcctggacagcagatgaatgagcggtagctttagtttgtacgtaggtacagttggagcactatatgtactctctggactactttggacagaagtaggtttttgaatgtaacaagataagtcaacttgagttgtaatatattttggggaatcagctcactacaaattgtgactgtaaacattgtactgtaaatgttttgtagttttcccccaataaaatttttgggaaataa

SEQ ID NO: 451496 - DNA, 3868 bp, Homo sapiens
agcggagttccagcagtccgcgagctgccgtcggctccgcggggggggcgggccgggcaccccggggcgcggaggagcgctcctcgcttctctccttcccccctgccgcactccgccggaccctcccgccggcccgcgccgctgcactcgccctctcctctcgccccccggcaaactttcggcccctccccgcccctcgcccgttattcgtcgtggctcaagcccggccacgccgccccaagggctcctcccgacctcccggcctgccgctccggccactgcgggatccagaaacatgtcgaccacacttctgtccgccttctacgatgtcgacttcttgtgcaagacagagaaatccctggccaacctcaacctgaacaacatgctggacaagaaggcggtggggacgcctgtggccgccgcccccagctcgggcttcgcgccgggattcctccgacggcactcggccagcaacctgcatgcactcgcccaccccgcgcccagccccggcagctgctcgcccaagttcccgggcgccgctaacggcagcagctgcggcagcgcggcggccggcggtccgacctcctacggcacccttaaggagccgtcggggggcggcggcacagccctgctcaacaaggagaacaaattccgggaccgctcgtttagcgagaacggcgatcgcagccagcacctcctgcacctgcagcagcagcagaaggggggcggcggctcccagatcaactccacgcgctacaagaccgagctgtgccggcccttcgaggagagcggcacgtgcaagtacggcgaaaagtgccagttcgcgcatggcttccacgagctgcgcagcctgactcgccatccgaagtacaagaccgagctgtgccgcacctttcataccatcggcttctgcccctatgggccgcgctgccacttcatccacaacgcggacgagcggcggcccgcgccgtcggggggcgcctccggggacctgcgtgcctttggcacgcgcgatgcgttgcacctgggcttcccgcgggagccgcggcccaagctgcaccacagcctcagcttctcgggcttcccgtcgggccaccatcagcccccgggcggcctcgagtcgccgctgctgctcgacagccccacgtcgcgcacgccgccgccgccctcctgctcttcggcctcgtcctgctcctcctccgcctcctcctgttcctcggcctccgcggcctccacgccctcgggcgccccgacatgctgcgcctccgcggcggccgcggctgcggccgctctgctgtacggcaccgggggcgccgaggacctgctggcgccgggggccccgtgcgcggcctgctcgtcggcctcgtgcgccaacaacgccttcgccttcggtccggagctcagcagcctcatcacgccgctcgccatccagacccacaactttgccgccgtggccgccgccgcctactaccgcagtcagcagcagcagcagcagcagggcctggcgccccccgcgcagccgccggcgccgcccagcgcgaccctccccgccggggccgccgcacctccctcgccgcccttcagcttccagctgccgcgccgcctgtccgactcgcccgtgttcgacgcgccccccagccccccggactcgctgtcggaccgcgacagctacctaagcggctccctgagctccggcagcctcagcggctctgagtctcccagcctcgaccctggccgccgcctgccaatcttcagccgcctctccatctccgacgactgaggcaagagggcgccagtgaggaggaagggaaggcggttcagagatgttggaggacacccctcgccatctcgcccttgctgggggcacgggagtggggggggtgacatgggccctaggcagactgcaagcccgaccgagcacttggactcgaactctgtgccgggaggggcccccacccctcctttttcggtttcctcttgtctttttttttttatttttattacgaagtttcattctttttgagcaaaaaagtcgaactttttctgttgaacaaaatattcacaacagggcagttgtgatacgaatagaacaaaaaaaaaaaaaaaacacttaaactttgttaggactccgatgagtttgggacttcaggaaaaatcaacccagcaccagcagctaccaaccaccattccatctcttcacttgaacagcattagttaagtccagatgtgggaacccttctcttggaagaagttcctaattgtgtctcagaccggtgtaaacaaaccagccagccgccaccttgctaaacctataagctttttaaaatccaatatattctgccaagaatatgccttgatagttagccctcagcccataggtgttttttgttttttaacagaattatatatgtctgggggtgaaaaaacccttgcattccaaaggtccatactggttacttggtttcattgccaccacttagtggatgttcagtttagaaccattttgtctgctccctctggaagccttgcgcagagcttactttgtaattgttggagaataactgctgaatttttagctgttttgagttgattcgcaccactgcaccacaactcaatatgaaaactatttaacttatttattatcttgtgaaaagtatacaatgaaaattttgttcatactgtatttatcaagtatgatgaaaagcaatagatatatattcttttattatgttaaattatgattgccattattaatcggcaaaatgtggagtgtatgttcttttcacagtaatatatgccttttgtaacttcacttggttattttattgtaaatgagtacaaaattcttaatttaagagattgtatgtaatatttatttcattaatttctttccttgtttacgtaaattttgaaagattgcatgatttcttgacagaaatcgatcttgatgctgtggaagtagtttgaggaacatcctatgagttttcttagaatgtataaaggttgtagcccatccaacttcaaagaaaaaaatgaccacatactttgcaatcaggctgaaatgtggcatgcttttctaattccaactttataaactagcaaaaaagtgtttgcttattccaccagttctactgtgacatactcgagtataaagacatgtagcaataacggggagtgggggggggagtctcacagtgcctttggaagggcccgaacttgccttaaatcttcctcaaccaaataagtattttattagtgcttgagagaatctgaatgtaggatgggttcaactgcacaaaaggaaaagatttttaccactttttttatatagatataaagtgaagcaaccgccttagtgctgaaatatgtagtacatgaatatgccttgtttaattacagaaaattccctggacagcagatgaatgagcggtagctttagtttgtacgtaggtacagttggagcactatatgtactctctggactactttggacagaagtaggtttttgaatgtaacaagataagtcaacttgagttgtaatatattttggggaatcagctcactacaaattgtgactgtaaacattgtactgtaaatgttttgtagttttcccccaataaaatttttgggaaataaaaagtattaatatgtaagagctttctttttaaacaggaatgtcttagctttctagcttcccagctaaccatgtctgccattccccaggtcttggcatggtgggggaggacttggagagctggcagagccagagttcagaagagcctgcgtcctctcagcccgtatatattttataagcaagttcttctaatgaaagaaagtaattatttggactgtcaagggcattagttag

SEQ ID NO: 451497 - DNA, 3824 bp, Homo sapiens
  misc_feature (3368)..(3368): n is a, c, g, or t
  misc_feature (3486)..(3486): n is a, c, g, or t
  misc_feature (3494)..(3494): n is a, c, g, or t
  misc_feature (3525)..(3525): n is a, c, g, or t
  misc_feature (3540)..(3540): n is a, c, g, or t
  misc_feature (3558)..(3558): n is a, c, g, or t
  misc_feature (3565)..(3565): n is a, c, g, or t
  misc_feature (3573)..(3573): n is a, c, g, or t
  misc_feature (3594)..(3594): n is a, c, g, or t
  misc_feature (3605)..(3606): n is a, c, g, or t
  misc_feature (3621)..(3622): n is a, c, g, or t
  misc_feature (3643)..(3644): n is a, c, g, or t
  misc_feature (3678)..(3679): n is a, c, g, or t
agcggagttccagcagtccgcgagctgccgtcggctccgcggggggggcgggccgggcaccccggggcgcggaggagcgctcctcgcttctctccttcccccctgccgcactccgccggaccctcccgccggcccgcgccgctgcactcgccctctcctctcgccccccggcaaactttcggcccctccccgcccctcgcccgttattcgtcgtggctcaagcccggccacgccgccccaagggctcctcccgacctcccggcctgccgctccggccactgcgggatccagaaacatgtcgaccacacttctgtccgccttctacgatgtcgacttcttgtgcaagacagagaaatccctggccaacctcaacctgaacaacatgctggacaagaaggcggtggggacgcctgtggccgccgcccccagctcgggcttcgcgccgggattcctccgacggcactcggccagcaacctgcatgcactcgcccaccccgcgcccagccccggcagctgctcgcccaagttcccgggcgccgctaacggcagcagctgcggcagcgcggcggccggcggtccgacctcctacggcacccttaaggagccgtcggggggcggcggcacagccctgctcaacaaggagaacaaattccgggaccgctcgtttagcgagaacggcgatcgcagccagcacctcctgcacctgcagcagcagcagaaggggggcggcggctcccagatcaactccacgcgctacaagaccgagctgtgccggcccttcgaggagagcggcacgtgcaagtacggcgaaaagtgccagttcgcgcatggcttccacgagctgcgcagcctgactcgccatccgaagtacaagaccgagctgtgccgcacctttcataccatcggcttctgcccctatgggccgcgctgccacttcatccacaacgcggacgagcggcggcccgcgccgtcggggggcgcctccggggacctgcgtgcctttggcacgcgcgatgcgttgcacctgggcttcccgcgggagccgcggcccaagctgcaccacagcctcagcttctcgggcttcccgtcgggccaccatcagcccccgggcggcctcgagtcgccgctgctgctcgacagccccacgtcgcgcacgccgccgccgccctcctgctcttcggcctcgtcctgctcctcctccgcctcctcctgttcctcggcctccgcggcctccacgccctcgggcgccccgacatgctgcgcctccgcggcggccgcggctgcggccgctctgctgtacggcaccgggggcgccgaggacctgctggcgccgggggccccgtgcgcggcctgctcgtcggcctcgtgcgccaacaacgccttcgccttcggtccggagctcagcagcctcatcacgccgctcgccatccagacccacaactttgccgccgtggccgccgccgcctactaccgcagtcagcagcagcagcagcagcagggcctggcgccccccgcgcagccgccggcgccgcccagcgcgaccctccccgccggggccgccgcacctccctcgccgcccttcagcttccagctgccgcgccgcctgtccgactcgcccgtgttcgacgcgccccccagccccccggactcgctgtcggaccgcgacagctacctaagcggctccctgagctccggcagcctcagcggctctgagtctcccagcctcgaccctggccgccgcctgccaatcttcagccgcctctccatctccgacgactgaggcaagagggcgccagtgaggaggaagggaaggcggttcagagatgttggaggacacccctcgccatctcgcccttgctgggggcacgggagtggggggggtgacatgggccctaggcagactgcaagcccgaccgagcacttggactcgaactctgtgccgggaggggcccccacccctcctttttcggtttcctcttgtctttttttttttatttttattacgaagtttcattctttttgagcaaaaaagtcgaactttttctgttgaacaaaatattcacaacagggcagttgtgatacgaatagaacaaaaaaaaaaaaaaaacacttaaactttgttaggactccgatgagtttgggacttcaggaaaaatcaacccagcaccagcagctaccaaccaccattccatctcttcacttgaacagcattagttaagtccagatgtgggaacccttctcttggaagaagttcctaattgtgtctcagaccggtgtaaacaaaccagccagccgccaccttgctaaacctataagctttttaaaatccaatatattctgccaagaatatgccttgatagttagccctcagcccataggtgttttttgttttttaacagaattatatatgtctgggggtgaaaaaacccttgcattccaaaggtccatactggttacttggtttcattgccaccacttagtggatgttcagtttagaaccattttgtctgctccctctggaagccttgcgcagagcttactttgtaattgttggagaataactgctgaatttttagctgttttgagttgattcgcaccactgcaccacaactcaatatgaaaactatttaacttatttattatcttgtgaaaagtatacaatgaaaattttgttcatactgtatttatcaagtatgatgaaaagcaatagatatatattcttttattatgttaaattatgattgccattattaatcggcaaaatgtggagtgtatgttcttttcacagtaatatatgccttttgtaacttcacttggttattttattgtaaatgagtacaaaattcttaatttaagagattgtatgtaatatttatttcattaatttctttccttgtttacgtaaattttgaaagattgcatgatttcttgacagaaatcgatcttgatgctgtggaagtagtttgaggaacatcctatgagttttcttagaatgtataaaggttgtagcccatccaacttcaaagaaaaaaatgaccacatactttgcaatcaggctgaaatgtggcatgcttttctaattccaactttataaactagcaaaaaagtgtttgcttattccaccagttctactgtgacatactcgagtataaagacatgtagcaataacggggagtgggggggggagtctcacagtgcctttggaagggcccgaacttgccttaaatcttcctcaaccaaataagtattttattagtgcttgagagaatctgaatgtaggatgggttcaactgcacaaaaggaaaagatttttaccacgttcatactataaataccaagattgttttcctaataacatatgtttcttnggtaacacactactagaatcaacataagctgaacaccaacgttcttatctttgacggactaggcaagtacggataggattctctacggtttgctttaaaaccttttaacgcaacctgngttgccangttacgtcatcaacacactcgacgtgtcacnttgacattgtgactngttatgacgctggcgctngctgcangtttggcnatttccctacttcatcctcangtgagcttcanngcacaggttcggaanncctcccaaccggccaaaatgnncaggcctgaggacgggttcaatcactgcagtaannattcgtcgatgcgcaaacatccccaaggttggaaatactaaaagatcctccttggtattcttcaggcaacaattttccatctcttgctttctttaatagagcctttacagagtcagcaatttcctggatacctttagcagcagca

SEQ ID NO: 451498 - DNA, 3615 bp, Homo sapiens
agcggagttccagcagtccgcgagctgccgtcggctccgcggggggggcgggccgggcaccccggggcgcggaggagcgctcctcgcttctctccttcccccctgccgcactccgccggaccctcccgccggcccgcgccgctgcactcgccctctcctctcgccccccggcaaactttcggcccctccccgcccctcgcccgttattcgtcgtggctcaagcccggccacgccgccccaagggctcctcccgacctcccggcctgccgctccggccactgcgggatccagaaacatgtcgaccacacttctgtccgccttctacgatgtcgacttcttgtgcaagacagagaaatccctggccaacctcaacctgaacaacatgctggacaagaaggcggtggggacgcctgtggccgccgcccccagctcgggcttcgcgccgggattcctccgacggcactcggccagcaacctgcatgcactcgcccaccccgcgcccagccccggcagctgctcgcccaagttcccgggcgccgctaacggcagcagctgcggcagcgcggcggccggcggtccgacctcctacggcacccttaaggagccgtcggggggcggcggcacagccctgctcaacaaggagaacaaattccgggaccgctcgtttagcgagaacggcgatcgcagccagcacctcctgcacctgcagcagcagcagaaggggggcggcggctcccagatcaactccacgcgctacaagaccgagctgtgccggcccttcgaggagagcggcacgtgcaagtacggcgaaaagtgccagttcgcgcatggcttccacgagctgcgcagcctgactcgccatccgaagtacaagaccgagctgtgccgcacctttcataccatcggcttctgcccctatgggccgcgctgccacttcatccacaacgcggacgagcggcggcccgcgccgtcggggggcgcctccggggacctgcgtgcctttggcacgcgcgatgcgttgcacctgggcttcccgcgggagccgcggcccaagctgcaccacagcctcagcttctcgggcttcccgtcgggccaccatcagcccccgggcggcctcgagtcgccgctgctgctcgacagccccacgtcgcgcacgccgccgccgccctcctgctcttcggcctcgtcctgctcctcctccgcctcctcctgttcctcggcctccgcggcctccacgccctcgggcgccccgacatgctgcgcctccgcggcggccgcggctgcggccgctctgctgtacggcaccgggggcgccgaggacctgctggcgccgggggccccgtgcgcggcctgctcgtcggcctcgtgcgccaacaacgccttcgccttcggtccggagctcagcagcctcatcacgccgctcgccatccagacccacaactttgccgccgtggccgccgccgcctactaccgcagtcagcagcagcagcagcagcagggcctggcgccccccgcgcagccgccggcgccgcccagcgcgaccctccccgccggggccgccgcacctccctcgccgcccttcagcttccagctgccgcgccgcctgtccgactcgcccgtgttcgacgcgccccccagcccccccctcgaccctggccgccgcctgccaatcttcagccgcctctccatctccgacgactgaggcaagagggcgccagtgaggaggaagggaaggcggttcagagatgttggaggacacccctcgccatctcgcccttgctgggggcacgggagtggggggggtgacatgggccctaggcagactgcaagcccgaccgagcacttggactcgaactctgtgccgggaggggcccccacccctcctttttcggtttcctcttgtctttttttttttatttttattacgaagtttcattctttttgagcaaaaaagtcgaactttttctgttgaacaaaatattcacaacagggcagttgtgatacgaatagaacaaaaaaaaaaaaaaaacacttaaactttgttaggactccgatgagtttgggacttcaggaaaaatcaacccagcaccagcagctaccaaccaccattccatctcttcacttgaacagcattagttaagtccagatgtgggaacccttctcttggaagaagttcctaattgtgtctcagaccggtgtaaacaaaccagccagccgccaccttgctaaacctataagctttttaaaatccaatatattctgccaagaatatgccttgatagttagccctcagcccataggtgttttttgttttttaacagaattatatatgtctgggggtgaaaaaacccttgcattccaaaggtccatactggttacttggtttcattgccaccacttagtggatgttcagtttagaaccattttgtctgctccctctggaagccttgcgcagagcttactttgtaattgttggagaataactgctgaatttttagctgttttgagttgattcgcaccactgcaccacaactcaatatgaaaactatttaacttatttattatcttgtgaaaagtatacaatgaaaattttgttcatactgtatttatcaagtatgatgaaaagcaatagatatatattcttttattatgttaaattatgattgccattattaatcggcaaaatgtggagtgtatgttcttttcacagtaatatatgccttttgtaacttcacttggttattttattgtaaatgagtacaaaattcttaatttaagagattgtatgtaatatttatttcattaatttctttccttgtttacgtaaattttgaaagattgcatgatttcttgacagaaatcgatcttgatgctgtggaagtagtttgaggaacatcctatgagttttcttagaatgtataaaggttgtagcccatccaacttcaaagaaaaaaatgaccacatactttgcaatcaggctgaaatgtggcatgcttttctaattccaactttataaactagcaaaaaagtgtttgcttattccaccagttctactgtgacatactcgagtataaagacatgtagcaataacggggagtgggggggggagtctcacagtgcctttggaagggcccgaacttgccttaaatcttcctcaaccaaataagtattttattagtgcttgagagaatctgaatgtaggatgggttcaactgcacaaaaggaaaagatttttaccactttttttatatagatataaagtgaagcaaccgccttagtgctgaaatatgtagtacatgaatatgccttgtttaattacagaaaattccaaaacttgtactatttttttttccatgtagaaaggcaggaatgtctcctaagctttcctggacagcagatgaatgagcggtagctttagtttgtacgtaggtacagttggagcactatatgtactctctggactactttggacagaagtaggtttttgaatgtaacaagataagtcaacttgagttgtaatatattttggggaatcagctcactacaaattgtgactgtaaacattgtactgtaaatgttttgtagttttcccccaataaaatttttgggaaataa

SEQ ID NO: 451499 - DNA, 3575 bp, Homo sapiens
agcggagttccagcagtccgcgagctgccgtcggctccgcggggggggcgggccgggcaccccggggcgcggaggagcgctcctcgcttctctccttcccccctgccgcactccgccggaccctcccgccggcccgcgccgctgcactcgccctctcctctcgccccccggcaaactttcggcccctccccgcccctcgcccgttattcgtcgtggctcaagcccggccacgccgccccaagggctcctcccgacctcccggcctgccgctccggccactgcgggatccagaaacatgtcgaccacacttctgtccgccttctacgatgtcgacttcttgtgcaagacagagaaatccctggccaacctcaacctgaacaacatgctggacaagaaggcggtggggacgcctgtggccgccgcccccagctcgggcttcgcgccgggattcctccgacggcactcggccagcaacctgcatgcactcgcccaccccgcgcccagccccggcagctgctcgcccaagttcccgggcgccgctaacggcagcagctgcggcagcgcggcggccggcggtccgacctcctacggcacccttaaggagccgtcggggggcggcggcacagccctgctcaacaaggagaacaaattccgggaccgctcgtttagcgagaacggcgatcgcagccagcacctcctgcacctgcagcagcagcagaaggggggcggcggctcccagatcaactccacgcgctacaagaccgagctgtgccggcccttcgaggagagcggcacgtgcaagtacggcgaaaagtgccagttcgcgcatggcttccacgagctgcgcagcctgactcgccatccgaagtacaagaccgagctgtgccgcacctttcataccatcggcttctgcccctatgggccgcgctgccacttcatccacaacgcggacgagcggcggcccgcgccgtcggggggcgcctccggggacctgcgtgcctttggcacgcgcgatgcgttgcacctgggcttcccgcgggagccgcggcccaagctgcaccacagcctcagcttctcgggcttcccgtcgggccaccatcagcccccgggcggcctcgagtcgccgctgctgctcgacagccccacgtcgcgcacgccgccgccgccctcctgctcttcggcctcgtcctgctcctcctccgcctcctcctgttcctcggcctccgcggcctccacgccctcgggcgccccgacatgctgcgcctccgcggcggccgcggctgcggccgctctgctgtacggcaccgggggcgccgaggacctgctggcgccgggggccccgtgcgcggcctgctcgtcggcctcgtgcgccaacaacgccttcgccttcggtccggagctcagcagcctcatcacgccgctcgccatccagacccacaactttgccgccgtggccgccgccgcctactaccgcagtcagcagcagcagcagcagcagggcctggcgccccccgcgcagccgccggcgccgcccagcgcgaccctccccgccggggccgccgcaccctgagctccggcagcctcagcggctctgagtctcccagcctcgaccctggccgccgcctgccaatcttcagccgcctctccatctccgacgactgaggcaagagggcgccagtgaggaggaagggaaggcggttcagagatgttggaggacacccctcgccatctcgcccttgctgggggcacgggagtggggggggtgacatgggccctaggcagactgcaagcccgaccgagcacttggactcgaactctgtgccgggaggggcccccacccctcctttttcggtttcctcttgtctttttttttttatttttattacgaagtttcattctttttgagcaaaaaagtcgaactttttctgttgaacaaaatattcacaacagggcagttgtgatacgaatagaacaaaaaaaaaaaaaaaacacttaaactttgttaggactccgatgagtttgggacttcaggaaaaatcaacccagcaccagcagctaccaaccaccattccatctcttcacttgaacagcattagttaagtccagatgtgggaacccttctcttggaagaagttcctaattgtgtctcagaccggtgtaaacaaaccagccagccgccaccttgctaaacctataagctttttaaaatccaatatattctgccaagaatatgccttgatagttagccctcagcccataggtgttttttgttttttaacagaattatatatgtctgggggtgaaaaaacccttgcattccaaaggtccatactggttacttggtttcattgccaccacttagtggatgttcagtttagaaccattttgtctgctccctctggaagccttgcgcagagcttactttgtaattgttggagaataactgctgaatttttagctgttttgagttgattcgcaccactgcaccacaactcaatatgaaaactatttaacttatttattatcttgtgaaaagtatacaatgaaaattttgttcatactgtatttatcaagtatgatgaaaagcaatagatatatattcttttattatgttaaattatgattgccattattaatcggcaaaatgtggagtgtatgttcttttcacagtaatatatgccttttgtaacttcacttggttattttattgtaaatgagtacaaaattcttaatttaagagattgtatgtaatatttatttcattaatttctttccttgtttacgtaaattttgaaagattgcatgatttcttgacagaaatcgatcttgatgctgtggaagtagtttgaggaacatcctatgagttttcttagaatgtataaaggttgtagcccatccaacttcaaagaaaaaaatgaccacatactttgcaatcaggctgaaatgtggcatgcttttctaattccaactttataaactagcaaaaaagtgtttgcttattccaccagttctactgtgacatactcgagtataaagacatgtagcaataacggggagtgggggggggagtctcacagtgcctttggaagggcccgaacttgccttaaatcttcctcaaccaaataagtattttattagtgcttgagagaatctgaatgtaggatgggttcaactgcacaaaaggaaaagatttttaccactttttttatatagatataaagtgaagcaaccgccttagtgctgaaatatgtagtacatgaatatgccttgtttaattacagaaaattccaaaacttgtactatttttttttccatgtagaaaggcaggaatgtctcctaagctttcctggacagcagatgaatgagcggtagctttagtttgtacgtaggtacagttggagcactatatgtactctctggactactttggacagaagtaggtttttgaatgtaacaagataagtcaacttgagttgtaatatattttggggaatcagctcactacaaattgtgactgtaaacattgtactgtaaatgttttgtagttttcccccaataaaatttttgggaaataa

SEQ ID NO: 451500 - DNA, 2999 bp, Homo sapiens
agcggagttccagcagtccgcgagctgccgtcggctccgcggggggggcgggccgggcaccccggggcgcggaggagcgctcctcgcttctctccttcccccctgccgcactccgccggaccctcccgccggcccgcgccgctgcactcgccctctcctctcgccccccggcaaactttcggcccctccccgcccctcgcccgttattcgtcgtggctcaagcccggccacgccgccccaagggctcctcccgacctcccggcctgccgctccggccactgcgggatccagaaacatgtcgaccacacttctgtccgccttctacgatgtcgacttcttgtgcaagacagagaaatccctggccaacctcaacctgaacaacatgctggacaagaaggcggtggggacgcctgtggccgccgcccccagctcgggcttcgcgccgggattcctccgacggcactcggccagcaacctgcatgcactcgcccaccccgcgcccagccccggcagctgctcgcccaagttcccgggcgccgctaacggcagcagctgcggcagcgcggcggccggcggtccgacctcctacggcacccttaaggagccgtcggggggcggcggcacagccctgctcaacaaggagaacaaattccgggaccgctcgtttagcgagaacggcgatcgcagccagcacctcctgcacctgcagcagcagcagaaggggggcggcggctcccagatcaactccacgcgctacaagaccgagctgtgccggcccttcgaggagagcggcacgtgcaagtacggcgaaaagtgccagttcgcgcatggcttccacgagctgcgcagcctgactcgccatccgaagtacaagaccgagctgtgccgcacctttcataccatcggcttctgcccctatgggccgcgctgccacttcatccacaacgcggacgagcggcggcccgcgccgtcggggggcgcctccggggacctgcgtgcctttggcacgcgcgatgcgttgcacctgggcttcccgcgggagccgcggcccaagctgcaccacagcctcagcttctcgggcttcccgtcgggccaccatcagcccccgggcggcctcgagtcgccgctgctgctcgacagccccacgtcgcgcacgccgccgccgccctcctgctcttcggcctcgtcctgctcctcctccgcctcctcctgttcctcggcctccgcggcctccacgccctcgggcgccccgacatgctgcgcctccgcggcggccgcggctgcggccgctctgctgtacggcaccgggggcgccgaggacctgctggcgccgggggccccgtgcgcggcctgctcgtcggcctcgtgcgccaacaacgccttcgccttcggtccggagctcagcagcctcatcacgccgctcgccatccagacccacaactttgccgccgtggccgccgccgcctccagcaccagcagctaccaaccaccattccatctcttcacttgaacagcattagttaagtccagatgtgggaacccttctcttggaagaagttcctaattgtgtctcagaccggtgtaaacaaaccagccagccgccaccttgctaaacctataagctttttaaaatccaatatattctgccaagaatatgccttgatagttagccctcagcccataggtgttttttgttttttaacagaattatatatgtctgggggtgaaaaaacccttgcattccaaaggtccatactggttacttggtttcattgccaccacttagtggatgttcagtttagaaccattttgtctgctccctctggaagccttgcgcagagcttactttgtaattgttggagaataactgctgaatttttagctgttttgagttgattcgcaccactgcaccacaactcaatatgaaaactatttaacttatttattatcttgtgaaaagtatacaatgaaaattttgttcatactgtatttatcaagtatgatgaaaagcaatagatatatattcttttattatgttaaattatgattgccattattaatcggcaaaatgtggagtgtatgttcttttcacagtaatatatgccttttgtaacttcacttggttattttattgtaaatgagtacaaaattcttaatttaagagattgtatgtaatatttatttcattaatttctttccttgtttacgtaaattttgaaagattgcatgatttcttgacagaaatcgatcttgatgctgtggaagtagtttgaggaacatcctatgagttttcttagaatgtataaaggttgtagcccatccaacttcaaagaaaaaaatgaccacatactttgcaatcaggctgaaatgtggcatgcttttctaattccaactttataaactagcaaaaaagtgtttgcttattccaccagttctactgtgacatactcgagtataaagacatgtagcaataacggggagtgggggggggagtctcacagtgcctttggaagggcccgaacttgccttaaatcttcctcaaccaaataagtattttattagtgcttgagagaatctgaatgtaggatgggttcaactgcacaaaaggaaaagatttttaccactttttttatatagatataaagtgaagcaaccgccttagtgctgaaatatgtagtacatgaatatgccttgtttaattacagaaaattccaaaacttgtactatttttttttccatgtagaaaggcaggaatgtctcctaagctttcctggacagcagatgaatgagcggtagctttagtttgtacgtaggtacagttggagcactatatgtactctctggactactttggacagaagtaggtttttgaatgtaacaagataagtcaacttgagttgtaatatattttggggaatcagctcactacaaattgtgactgtaaacattgtactgtaaatgttttgtagttttcccccaataaaatttttgggaaataa

SEQ ID NO: 451501 - DNA, 1778 bp, Homo sapiens
agcagccgttgtagttcttggactttgcctctgtccccaggttctgggggacgcccctcccgccctgcctttcaggtcgggaaagtcccggggtttgcaaaagagtgtccgagcgccctggaggcggggagggcggcaaggagggcgccggtgtcgcggttgagtttctccactgccgaccgcggccacgctgcccggggcttcccggacaggcttcgcgccgcccacctcggcagccggggcggaggatcacgtgtcgaaacccagcgcggcccacggtgggcgtcctcccctctcccgctcctccagatgtgggaacccttctcttggaagaagttcctaattgtgtctcagaccggtgtaaacaaaccagccagccgccaccttgctaaacctataagctttttaaaatccaatatattctgccaagaatatgccttgatagttagccctcagcccataggtgttttttgttttttaacagaattatatatgtctgggggtgaaaaaacccttgcattccaaaggtccatactggttacttggtttcattgccaccacttagtggatgttcagtttagaaccattttgtctgctccctctggaagccttgcgcagagcttactttgtaattgttggagaataactgctgaatttttagctgttttgagttgattcgcaccactgcaccacaactcaatatgaaaactatttaacttatttattatcttgtgaaaagtatacaatgaaaattttgttcatactgtatttatcaagtatgatgaaaagcaatagatatatattcttttattatgttaaattatgattgccattattaatcggcaaaatgtggagtgtatgttcttttcacagtaatatatgccttttgtaacttcacttggttattttattgtaaatgagtacaaaattcttaatttaagagattgtatgtaatatttatttcattaatttctttccttgtttacgtaaattttgaaagattgcatgatttcttgacagaaatcgatcttgatgctgtggaagtagtttgaggaacatcctatgagttttcttagaatgtataaaggttgtagcccatccaacttcaaagaaaaaaatgaccacatactttgcaatcaggctgaaatgtggcatgcttttctaattccaactttataaactagcaaaaaagtgtttgcttattccaccagttctactgtgacatactcgagtataaagacatgtagcaataacggggagtgggggggggagtctcacagtgcctttggaagggcccgaacttgccttaaatcttcctcaaccaaataagtattttattagtgcttgagagaatctgaatgtaggatgggttcaactgcacaaaaggaaaagatttttaccactttttttatatagatataaagtgaagcaaccgccttagtgctgaaatatgtagtacatgaatatgccttgtttaattacagaaaattccaaaacttgtactatttttttttccatgtagaaaggcaggaatgtctcctaagctttcctggacagcagatgaatgagcggtagctttagtttgtacgtaggtacagttggagcactatatgtactctctggactactttggacagaagtaggtttttgaatgtaacaagataagtcaacttgagttgtaatatattttggggaatcagctcactacaaattgtgactgtaaacattgtactgtaaatgttttgtagttttcccccaataaaatttttgggaaataa

SEQ ID NO: 451502 - DNA, 1091 bp, Homo sapiens
agcggagttccagcagtccgcgagctgccgtcggctccgcggggggggcgggccgggcaccccggggcgcggaggagcgctcctcgcttctctccttcccccctgccgcactccgccggaccctcccgccggcccgcgccgctgcactcgccctctcctctcgccccccggcaaactttcggcccctccccgcccctcgcccgttattcgtcgtggctcaagcccggccacgccgccccaagggctcctcccgacctcccggcctgccgctccggccactgcgggatccagaaacatgtcgaccacacttctgtccgccttctacgatgtcgacttcttgtgcaagacagagaaatccctggccaacctcaacctgaacaacttgccttaaatcttcctcaaccaaataagtattttattagtgcttgagagaatctgaatgtaggatgggttcaactgcacaaaaggaaaagatttttaccactttttttatatagatataaagtgaagcaaccgccttagtgctgaaatatgtagtacatgaatatgccttgtttaattacagaaaattccaaaacttgtactatttttttttccatgtagaaaggcaggaatgtctcctaagctttcctggacagcagatgaatgagcggtagctttagtttgtacgtaggtacagttggagcactatatgtactctctggactactttggacagaagtaggtttttgaatgtaacaagataagtcaacttgagttgtaatatattttggggaatcagctcactacaaattgtgactgtaaacattgtactgtaaatgttttgtagttttcccccaataaaatttttgggaaataaaaagtattaatatgtaagagctttctttttaaacaggaatgtcttagctttctagcttcccagctaaccatgtctgccattccccaggtcttggcatggtgggggaggacttggagagctggcagagccagagttcagaagagcctgcgtcctctcagcccgtatatattttataagcaagttcttctaatgaaagaaagtaattatttggactgtcaagggcattagttag

SEQ ID NO: 451503 - DNA, 2360 bp, Homo sapiens
gcgcttccggggactggagcgtgcgtgctgaggtatgcgcaacgcgtgcggggtctcttccggagtcttttcctggacggggtccctgcggtgggtgtgtttcggcctggcctgggcaggcgcttgtgctgccagggcgccgggcccggggaggccggggtctcgggtggccgccggcccaggcgctggacggcagcaggatggggaaggcgaaggtccccgcctccaagcgcgccccgagcagccccgtggctaagccgggtcctgtcaagacgctcactcggaagaaaaacaagaagaaaaaaaggttttggaaaagcaaggcgcgggaagtaagcaagaagccagcaagcggccccggtgctgtggtgcgacctccaaaggcaccagaagacttttctcaaaactggaaggcgctgcaagagtggctgctgaaacaaaaatctcaggccccagaaaagcctcttgtcatctctcagatgggttccaaaaagaagcccaaaattatccagcaaaacaaaaaagagacctcgcctcaagtgaagggagaggagatgccggcaggaaaagaccaggaggccagcaggggctctgttccttcaggttccaagatggacaggagggcgccagtacctcgcaccaaggccagtggaacagagcacaataagaaaggaaccaaggaaaggacaaatggtgatattgttccagaacgaggggacatcgagcataagaagcggaaagctaaggaggcagccccagccccacccaccgaggaagacatctggtttgacgacgtggacccagcggatatcgaagctgccataggtccagaggcggccaagatagcgaggaaacagttgggtcagagcgagggcagcgtcagcctcagcctcgtgaaagagcaggccttcggcggcctgacaagagccttagccttggactgtgagatggtgggcgtgggccctaagggggaggagagcatggccgcccgtgtgtccatcgtgaaccagtatgggaagtgcgtttatgacaagtacgtcaaaccaaccgagcccgtgacggactataggacagcggtcagtgggattcggcctgagaacctcaagcagggagaagagcttgaagttgttcagaaggaagtggcagagatgctgaagggcagaattctagtggggcacgctctgcataatgacctaaaggtactatttcttgatcatccaaaaaagaagattcgggacacacagaaatataaacctttcaagagtcaagtaaagagtggaaggccgtctctgagactactttcagagaagatccttgggctccaggtccagcaggcggagcactgttcaattcaggatgcccaggcagcaatgaggctgtacgtcatggtgaagaaggagtgggagagcatggcccgagacaggcgccccctgctgactgctccagaccactgcagtgacgacgcctagcagtcctgccctgctgctgctgccgccccgctacagaggcaatgtgaccagtcacagggacagatcacatctccccagagtggcaactctggtgaaaccttttcagaatcatggcagaggggcgtggcgtggtgctactgagaaggtcctccttcctcttgactttgtggtctgaaacctggtcttactgtccatgtgtgtttgggcccggatggtcagggtggggagcagggacggccatgggcacgcctggccacgctttaccgactgctgaccccctgggccaggtgaggttggggcctgtgggccgccagtccatacggtgctgtcactgcccatcttcggtgacaccctggggtgaggtgctcagcaccttcctctcgaggagccacattttcctcctttgtgttaggggacataacaagctctgctgggcttgagggacccagaccaggtgtctgcagtcagctcctgagacacagctggccggcacaacaggtgttacatcaggggtttcctgtggccgtttgaactttgagcatttatctaaattaaattggcccagggttggctggtgggtcacccagcagaggcttctccccatagcacgaggatgtgttgcctgggcacggtgactgcggttattcctggaggtcggcagacatgccaaccttgggctatttgagctggagaagctatgtgatgctagccggtggctttctgggctaggccccagtttgaggctcccctgggaactagagccaggaacagccagtggcactgacaaggggacggagtccaaggcgttattgggccacctgacagctggacagaaaaggggcagacacaccgaggatgcgatttaaaataaatgcagatgtttacttggaa

SEQ ID NO: 451504 - DNA, 3057 bp, Homo sapiens
  misc_feature (2214)..(2214): n is a, c, g, or t
gcgcttccggggactggagcgtgcgtgctgaggtatgcgcaacgcgtgcggggtctcttccggagtcttttcctggacggggtccctgcggtgggtgtgtttcggcctggcctgggcaggcgcttgtgctgccagggcgccgggcccggggaggccggggtctcgggtggccgccggcccaggcgctggacggcagcaggatggggaaggcgaaggtccccgcctccaagcgcgccccgagcagccccgtggctaagccgggtcctgtcaagacgctcactcggaagaaaaacaagaagaaaaaaaggttttggaaaagcaaggcgcgggaagtaagcaagaagccagcaagcggccccggtgctgtggtgcgacctccaaaggcaccagaagacttttctcaaaactggaaggcgctgcaagaggatggacaggagggcgccagtacctcgcaccaaggccagtggaacagagcacaataagaaaggaaccaaggaaaggacaaatggtgatattgttccagaacgaggggacatcgagcataagaagcggaaagctaaggaggcagccccagccccacccaccgaggaagacatctggtttgacgacgtggacccagcggatatcgaagctgccataggtccagaggcggccaagatagcgaggaaacagttgggtcagagcgagggcagcgtcagcctcagcctcgtgaaagagcaggccttcggcggcctgacaagagccttagccttggactgtgagatggtgggcgtgggccctaagggggaggagagcatggccgcccgtgtgtccatcgtgaaccagtatgggaagtgcgtttatgacaagtacgtcaaaccaaccgagcccgtgacggactataggacagcggtcagtgggattcggcctgagaacctcaagcagggagaagagcttgaagttgttcagaaggaagtggcagagatgctgaagggcagaattctagtggggcacgctctgcataatgacctaaaggtactatttcttgatcatccaaaaaagaagattcgggacacacagaaatataaacctttcaagagtcaagtaaagagtggaaggccgtctctgagactactttcagagaagatccttgggctccaggtccagcaggcggagcactgttcaattcaggatgcccaggcagcaatgaggctgtacgtcatggtgaagaaggagtgggagagcatggcccgagacaggcgccccctgctgactgctccagaccactgcagtgacgacgcctagcagtcctgccctgctgctgctgccgccccgctacagaggcaatgtgaccagtcacagggacagatcacatctccccagagtggcaactctggtgaaaccttttcagaatcatggcagaggggcgtggcgtggtgctactgagaaggtcctccttcctcttgactttgtggtctgaaacctggtcttactgtccatgtgtgtttgggcccggatggtcagggtggggagcagggacggccatgggcacgcctggccacgctttaccgactgctgaccccctgggccaggtgaggttggggcctgtgggccgccagtccatacggtgctgtcactgcccatcttcggtgacaccctggggtgaggtgctcagcaccttcctctcgaggagccacattttcctcctttgtgttaggggacataacaagctctgctgggcttgagggacccagaccaggtgtctgcagtcagctcctgagacacagctggccggcacaacaggtgttacatcaggggtttcctgtggccgtttgaactttgagcatttatctaaattaaattggcccagggttggctggtgggtcacccagcagaggcttctccccatagcacgaggatgtgttgcctgggcacggtgactgcggttattcctggaggtcggcagacatgccaaccttgggctatttgagctggagaagctatgtgatgctagccggtggctttctgggctaggccccagtttgaggctcccctgggaactagagccaggaacagccagtggcactgacaaggggacggagtccaaggcgttattgggccacctgacagctggacagaaaaggggcagacacaccgaggatgcgatttaaaataaatgcagatgtttacttggaaaaaaacacaacaaaaaaaaaaaaaaaaaaaaaaaaaaanaaaaaaaaaaaaaaaaaaaaaaaaaaaaaaaaaaaaaaaagggggggggggccaaaaagtacaccccggggggggcaccaaaattaaggagcgcacgccgggttttttagacaaagagggggccccaattaaggaggggcgaaaataataagagggagagaggagcagggccgggggatataaacaacacgggtgggaggggggaaaaacaccgtggctaacgcgagagatcaactcgtagggagagaagaccccccacctaaacagcgcggggggggggagacacacaagtgtgggtgagcacacacccccacccaccaagaagaaatatatgaggcacctcactacgaggagaacacaatataacatcacaaccacgagggcgtacacaacacgggcgtgtgaaaacaagcagagatgagtgaaatataatgcttgactggagtgggtgaggaagaagttgttggtcgaacagtggcgagattgatagtgttggttgaggagagaaattatttaaaggaggggggggatcttgttattaatctataaaatccatggaggggagggcgagaaccgtgccgagccgcgggagacgacggcccgaggcggcgcggggacgacagaccaacgaagggagacgaaacgagggagcgcgcgggcggcgcgagggccgggcgcggcggagaggcgagagcgcagtggggcctctaggggacggagagggcggggcagacgcagggagagggaggacgggagagacgaagacggcgtcgggagcagacaagagacacgaaaagcaacagacacgaacgagccagaagcggagcaaaggaaacagaggag

SEQ ID NO: 451505 - DNA, 2911 bp, Homo sapiens
  misc_feature (2068)..(2068): n is a, c, g, or t
gcgcttccggggactggagcgtgcgtgctgaggtatgcgcaacgcgtgcggggtctcttccggagtcttttcctggacggggtccctgcggtgggtgtgtttcggcctggcctgggcaggcgcttgtgctgccagggcgccgggcccggggaggccggggtctcgggtggccgccggcccaggcgctggacggcagcaggatggggaaggcgaaggtccccgcctccaagcgcgccccgagcagccccgtggctaagccgggtcctgtcaagacgctcactcggaagaaaaacaagaagaaaaaaaggttttggaaaagcaaggcgcgggaagtaagcaagaagccagcaagcggccccggtgctgtggtgcgacctccaaaggcaccagaagacttttctcaaaactggaaggcgctgcaagagtggctgctgaaacaaaaatctcaggccccagaaaagcctcttgtcatctctcagatgggttccaaaaagaagcccaaaattatccagcaaaacaaaaaagagacctcgcctcaagtgaagggagaggagatgccggcaggaaaagaccaggaggccagcaggggctctgttccttcaggttccaatgtgagatggtgggcgtgggccctaagggggaggagagcatggccgcccgtgtgtccatcgtgaaccagtatgggaagtgcgtttatgacaagtacgtcaaaccaaccgagcccgtgacggactataggacagcggtcagtgggattcggcctgagaacctcaagcagggagaagagcttgaagttgttcagaaggaagtggcagagatgctgaagggcagaattctagtggggcacgctctgcataatgacctaaaggtactatttcttgatcatccaaaaaagaagattcgggacacacagaaatataaacctttcaagagtcaagtaaagagtggaaggccgtctctgagactactttcagagaagatccttgggctccaggtccagcaggcggagcactgttcaattcaggatgcccaggcagcaatgaggctgtacgtcatggtgaagaaggagtgggagagcatggcccgagacaggcgccccctgctgactgctccagaccactgcagtgacgacgcctagcagtcctgccctgctgctgctgccgccccgctacagaggcaatgtgaccagtcacagggacagatcacatctccccagagtggcaactctggtgaaaccttttcagaatcatggcagaggggcgtggcgtggtgctactgagaaggtcctccttcctcttgactttgtggtctgaaacctggtcttactgtccatgtgtgtttgggcccggatggtcagggtggggagcagggacggccatgggcacgcctggccacgctttaccgactgctgaccccctgggccaggtgaggttggggcctgtgggccgccagtccatacggtgctgtcactgcccatcttcggtgacaccctggggtgaggtgctcagcaccttcctctcgaggagccacattttcctcctttgtgttaggggacataacaagctctgctgggcttgagggacccagaccaggtgtctgcagtcagctcctgagacacagctggccggcacaacaggtgttacatcaggggtttcctgtggccgtttgaactttgagcatttatctaaattaaattggcccagggttggctggtgggtcacccagcagaggcttctccccatagcacgaggatgtgttgcctgggcacggtgactgcggttattcctggaggtcggcagacatgccaaccttgggctatttgagctggagaagctatgtgatgctagccggtggctttctgggctaggccccagtttgaggctcccctgggaactagagccaggaacagccagtggcactgacaaggggacggagtccaaggcgttattgggccacctgacagctggacagaaaaggggcagacacaccgaggatgcgatttaaaataaatgcagatgtttacttggaaaaaaacacaacaaaaaaaaaaaaaaaaaaaaaaaaaaanaaaaaaaaaaaaaaaaaaaaaaaaaaaaaaaaaaaaaaaagggggggggggccaaaaagtacaccccggggggggcaccaaaattaaggagcgcacgccgggttttttagacaaagagggggccccaattaaggaggggcgaaaataataagagggagagaggagcagggccgggggatataaacaacacgggtgggaggggggaaaaacaccgtggctaacgcgagagatcaactcgtagggagagaagaccccccacctaaacagcgcggggggggggagacacacaagtgtgggtgagcacacacccccacccaccaagaagaaatatatgaggcacctcactacgaggagaacacaatataacatcacaaccacgagggcgtacacaacacgggcgtgtgaaaacaagcagagatgagtgaaatataatgcttgactggagtgggtgaggaagaagttgttggtcgaacagtggcgagattgatagtgttggttgaggagagaaattatttaaaggaggggggggatcttgttattaatctataaaatccatggaggggagggcgagaaccgtgccgagccgcgggagacgacggcccgaggcggcgcggggacgacagaccaacgaagggagacgaaacgagggagcgcgcgggcggcgcgagggccgggcgcggcggagaggcgagagcgcagtggggcctctaggggacggagagggcggggcagacgcagggagagggaggacgggagagacgaagacggcgtcgggagcagacaagagacacgaaaagcaacagacacgaacgagccagaagcggagcaaaggaaacagaggag

SEQ ID NO: 451506 - DNA, 1312 bp, Homo sapiens
gcgcttccggggactggagcgtgcgtgctgaggtatgcgcaacgcgtgcggggtctcttccggagtcttttcctggacggggtccctgcggtgggtgtgtttcggcctggcctgggcaggcgcttgtgctgccagggcgccgggcccggggaggccggggtctcgggtggccgccggcccaggcgctggacggcagcaggatggggaaggcgaaggtccccgcctccaagcgcgccccgagcagccccgtggctaagccgggtcctgtcaagacgctcactcggaagaaaaacaagaagaaaaaaaggttttggaaaagcaaggcgcgggaagtaagcaagaagccagcaagcggccccggtgctgtggtgcgacctccaaaggcaccagaagacttttctcaaaactggaaggcgctgcaagagtggctgctgaaacaaaaatctcaggccccagaaaagcctcttgtcatctctcagatgggttccaaaaagaagcccaaaattatccagcaaaacaaaaaagagacctcgcctcaagtgaagggagaggagatgccggcaggaaaagaccaggaggccagcaggggctctgttccttcaggttccaagatggacaggagggcgccagtacctcgcaccaaggccagtggaacagagcacaataagaaaggaaccaaggaaaggacaaatggtgatattgttccagaacgaggggacatcgagcataagaagcggaaagctaaggaggcagccccagccccacccaccgaggaagacatctggtttgacgacgtggacccagcggatatcgaagctgccataggtccagaggcggccaagatagcgaggaaacagttgggtcagagcgagggcagcgtcagcctcagcctcgtgaaagagcaggccttcggcggcctgacaagagccttagccttggactgtgagatggtgggcgtgggccctaagggggaggagagcatggccgcccgtgtgtccatcgtgaaccagtatgggaagtgcgtttatgacaagtacgtcaaaccaaccgagcccgtgacggactataggacagcggtcagtgggattcggcctgagaacctcaagcagggagaagctatgtgatgctagccggtggctttctgggctaggccccagtttgaggctcccctgggaactagagccaggaacagccagtggcactgacaaggggacggagtccaaggcgttattgggccacctgacagctggacagaaaaggggcagacacaccgaggatgcgatttaaaataaatgcagatgtttacttggaa

SEQ ID NO: 451507 - DNA, 3242 bp, Homo sapiens
  misc_feature (2399)..(2399): n is a, c, g, or t
gcgcttccggggactggagcgtgcgtgctgaggtatgcgcaacgcgtgcggggtctcttccggagtcttttcctggacggggtccctgcggtgggtgtgtttcggcctggcctgggcaggcgcttgtgctgccagggcgccgggcccggggaggccggggtctcgggtggccgccggcccaggcgctggacggcagcaggatggggaaggcgaaggtccccgcctccaagcgcgccccgagcagccccgtggctaagccgggtcctgtcaagacgctcactcggaagaaaaacaagaagaaaaaaaggttttggaaaagcaaggcgcgggaagtaagcaagaagccagcaagcggccccggtgctgtggtgcgacctccaaaggcaccagaagacttttctcaaaactggaaggcgctgcaagagtggctgctgaaacaaaaatctcaggccccagaaaagcctcttgtcatctctcagatgggttccaaaaagaagcccaaaattatccagcaaaacaaaaaagagacctcgcctcaagtgaagggagaggagatgccggcaggaaaagaccaggaggccagcaggggctctgttccttcaggttccaagatggacaggagggcgccagtacctcgcaccaaggccagtggaacagagcacaataagaaaggaaccaaggaaaggacaaatggtgatattgttccagaacgaggggacatcgagcataagaagcggaaagctaaggaggcagccccagccccacccaccgaggaagacatctggtttgacgacgtggacccagcggatatcgaagctgccataggtccagaggcggccaagatagcgaggaaacagttgggtcagagcgagggcagcgtcagcctcagcctcgtgaaagagcaggccttcggcggcctgacaagagccttagccttggactgtgagatggtgggcgtgggccctaagggggaggagagcatggccgcccgtgtgtccatcgtgaaccagtatgggaagtgcgtttatgacaagtacgtcaaaccaaccgagcccgtgacggactataggacagcggtcagtgggattcggcctgagaacctcaagcagggagaagagcttgaagttgttcagaaggaagtggcagagatgctgaagggcagaattctagtggggcacgctctgcataatgacctaaaggtactatttcttgatcatccaaaaaagaagattcgggacacacagaaatataaacctttcaagagtcaagtaaagagtggaaggccgtctctgagactactttcagagaagatccttgggctccaggtccagcaggcggagcactgttcaattcaggatgcccaggcagcaatgaggctgtacgtcatggtgaagaaggagtgggagagcatggcccgagacaggcgccccctgctgactgctccagaccactgcagtgacgacgcctagcagtcctgccctgctgctgctgccgccccgctacagaggcaatgtgaccagtcacagggacagatcacatctccccagagtggcaactctggtgaaaccttttcagaatcatggcagaggggcgtggcgtggtgctactgagaaggtcctccttcctcttgactttgtggtctgaaacctggtcttactgtccatgtgtgtttgggcccggatggtcagggtggggagcagggacggccatgggcacgcctggccacgctttaccgactgctgaccccctgggccaggtgaggttggggcctgtgggccgccagtccatacggtgctgtcactgcccatcttcggtgacaccctggggtgaggtgctcagcaccttcctctcgaggagccacattttcctcctttgtgttaggggacataacaagctctgctgggcttgagggacccagaccaggtgtctgcagtcagctcctgagacacagctggccggcacaacaggtgttacatcaggggtttcctgtggccgtttgaactttgagcatttatctaaattaaattggcccagggttggctggtgggtcacccagcagaggcttctccccatagcacgaggatgtgttgcctgggcacggtgactgcggttattcctggaggtcggcagacatgccaaccttgggctatttgagctggagaagctatgtgatgctagccggtggctttctgggctaggccccagtttgaggctcccctgggaactagagccaggaacagccagtggcactgacaaggggacggagtccaaggcgttattgggccacctgacagctggacagaaaaggggcagacacaccgaggatgcgatttaaaataaatgcagatgtttacttggaaaaaaacacaacaaaaaaaaaaaaaaaaaaaaaaaaaaanaaaaaaaaaaaaaaaaaaaaaaaaaaaaaaaaaaaaaaaagggggggggggccaaaaagtacaccccggggggggcaccaaaattaaggagcgcacgccgggttttttagacaaagagggggccccaattaaggaggggcgaaaataataagagggagagaggagcagggccgggggatataaacaacacgggtgggaggggggaaaaacaccgtggctaacgcgagagatcaactcgtagggagagaagaccccccacctaaacagcgcggggggggggagacacacaagtgtgggtgagcacacacccccacccaccaagaagaaatatatgaggcacctcactacgaggagaacacaatataacatcacaaccacgagggcgtacacaacacgggcgtgtgaaaacaagcagagatgagtgaaatataatgcttgactggagtgggtgaggaagaagttgttggtcgaacagtggcgagattgatagtgttggttgaggagagaaattatttaaaggaggggggggatcttgttattaatctataaaatccatggaggggagggcgagaaccgtgccgagccgcgggagacgacggcccgaggcggcgcggggacgacagaccaacgaagggagacgaaacgagggagcgcgcgggcggcgcgagggccgggcgcggcggagaggcgagagcgcagtggggcctctaggggacggagagggcggggcagacgcagggagagggaggacgggagagacgaagacggcgtcgggagcagacaagagacacgaaaagcaacagacacgaacgagccagaagcggagcaaaggaaacagaggag

SEQ ID NO: 451508 - DNA, 3188 bp, Homo sapiens
  misc_feature (2345)..(2345): n is a, c, g, or t
gcgcttccggggactggagcgtgcgtgctgaggtatgcgcaacgcgtgcggggtctcttccggagtcttttcctggacggggtccctgcggtgggtgtgtttcggcctggcctgggcaggcgcttgtgctgccagggcgccgggcccggggaggccggggtctcgggtggccgccggcccaggcgctggacggcagcaggatggggaaggcgaaggtccccgcctccaagcgcgccccgagcagccccgtggctaagccgggtcctgtcaagacgctcactcggaagaaaaacaagaagaaaaaaaggttttggaaaagcaaggcgcgggaagtaagcaagaagccagcaagcggccccggtgctgtggtgcgacctccaaaggcaccagaagacttttctcaaaactggaaggcgctgcaagagatgggttccaaaaagaagcccaaaattatccagcaaaacaaaaaagagacctcgcctcaagtgaagggagaggagatgccggcaggaaaagaccaggaggccagcaggggctctgttccttcaggttccaagatggacaggagggcgccagtacctcgcaccaaggccagtggaacagagcacaataagaaaggaaccaaggaaaggacaaatggtgatattgttccagaacgaggggacatcgagcataagaagcggaaagctaaggaggcagccccagccccacccaccgaggaagacatctggtttgacgacgtggacccagcggatatcgaagctgccataggtccagaggcggccaagatagcgaggaaacagttgggtcagagcgagggcagcgtcagcctcagcctcgtgaaagagcaggccttcggcggcctgacaagagccttagccttggactgtgagatggtgggcgtgggccctaagggggaggagagcatggccgcccgtgtgtccatcgtgaaccagtatgggaagtgcgtttatgacaagtacgtcaaaccaaccgagcccgtgacggactataggacagcggtcagtgggattcggcctgagaacctcaagcagggagaagagcttgaagttgttcagaaggaagtggcagagatgctgaagggcagaattctagtggggcacgctctgcataatgacctaaaggtactatttcttgatcatccaaaaaagaagattcgggacacacagaaatataaacctttcaagagtcaagtaaagagtggaaggccgtctctgagactactttcagagaagatccttgggctccaggtccagcaggcggagcactgttcaattcaggatgcccaggcagcaatgaggctgtacgtcatggtgaagaaggagtgggagagcatggcccgagacaggcgccccctgctgactgctccagaccactgcagtgacgacgcctagcagtcctgccctgctgctgctgccgccccgctacagaggcaatgtgaccagtcacagggacagatcacatctccccagagtggcaactctggtgaaaccttttcagaatcatggcagaggggcgtggcgtggtgctactgagaaggtcctccttcctcttgactttgtggtctgaaacctggtcttactgtccatgtgtgtttgggcccggatggtcagggtggggagcagggacggccatgggcacgcctggccacgctttaccgactgctgaccccctgggccaggtgaggttggggcctgtgggccgccagtccatacggtgctgtcactgcccatcttcggtgacaccctggggtgaggtgctcagcaccttcctctcgaggagccacattttcctcctttgtgttaggggacataacaagctctgctgggcttgagggacccagaccaggtgtctgcagtcagctcctgagacacagctggccggcacaacaggtgttacatcaggggtttcctgtggccgtttgaactttgagcatttatctaaattaaattggcccagggttggctggtgggtcacccagcagaggcttctccccatagcacgaggatgtgttgcctgggcacggtgactgcggttattcctggaggtcggcagacatgccaaccttgggctatttgagctggagaagctatgtgatgctagccggtggctttctgggctaggccccagtttgaggctcccctgggaactagagccaggaacagccagtggcactgacaaggggacggagtccaaggcgttattgggccacctgacagctggacagaaaaggggcagacacaccgaggatgcgatttaaaataaatgcagatgtttacttggaaaaaaacacaacaaaaaaaaaaaaaaaaaaaaaaaaaaanaaaaaaaaaaaaaaaaaaaaaaaaaaaaaaaaaaaaaaaagggggggggggccaaaaagtacaccccggggggggcaccaaaattaaggagcgcacgccgggttttttagacaaagagggggccccaattaaggaggggcgaaaataataagagggagagaggagcagggccgggggatataaacaacacgggtgggaggggggaaaaacaccgtggctaacgcgagagatcaactcgtagggagagaagaccccccacctaaacagcgcggggggggggagacacacaagtgtgggtgagcacacacccccacccaccaagaagaaatatatgaggcacctcactacgaggagaacacaatataacatcacaaccacgagggcgtacacaacacgggcgtgtgaaaacaagcagagatgagtgaaatataatgcttgactggagtgggtgaggaagaagttgttggtcgaacagtggcgagattgatagtgttggttgaggagagaaattatttaaaggaggggggggatcttgttattaatctataaaatccatggaggggagggcgagaaccgtgccgagccgcgggagacgacggcccgaggcggcgcggggacgacagaccaacgaagggagacgaaacgagggagcgcgcgggcggcgcgagggccgggcgcggcggagaggcgagagcgcagtggggcctctaggggacggagagggcggggcagacgcagggagagggaggacgggagagacgaagacggcgtcgggagcagacaagagacacgaaaagcaacagacacgaacgagccagaagcggagcaaaggaaacagaggag

SEQ ID NO: 451509 - DNA, 2895 bp, Homo sapiens
  misc_feature (2052)..(2052): n is a, c, g, or t
gcgcttccggggactggagcgtgcgtgctgaggtatgcgcaacgcgtgcggggtctcttccggagtcttttcctggacggggtccctgcggtgggtgtgtttcggcctggcctgggcaggcgcttgtgctgccagggcgccgggcccggggaggccggggtctcgggtggccgccggcccaggcgctggacggcagcaggatggggaaggcgaaggtccccgcctccaagcgcgccccgagcagccccgtggctaagccgggtcctgtcaagacgctcactcggaagaaaaacaagaagaaaaaaaggttttggaaaagcaaggcgcgggaagtaagcaagaagccagcaagcggccccggtgctgtggtgcgacctccaaaggcaccagaagacttttctcaaaactggaaggcgctgcaagagggaagacatctggtttgacgacgtggacccagcggatatcgaagctgccataggtccagaggcggccaagatagcgaggaaacagttgggtcagagcgagggcagcgtcagcctcagcctcgtgaaagagcaggccttcggcggcctgacaagagccttagccttggactgtgagatggtgggcgtgggccctaagggggaggagagcatggccgcccgtgtgtccatcgtgaaccagtatgggaagtgcgtttatgacaagtacgtcaaaccaaccgagcccgtgacggactataggacagcggtcagtgggattcggcctgagaacctcaagcagggagaagagcttgaagttgttcagaaggaagtggcagagatgctgaagggcagaattctagtggggcacgctctgcataatgacctaaaggtactatttcttgatcatccaaaaaagaagattcgggacacacagaaatataaacctttcaagagtcaagtaaagagtggaaggccgtctctgagactactttcagagaagatccttgggctccaggtccagcaggcggagcactgttcaattcaggatgcccaggcagcaatgaggctgtacgtcatggtgaagaaggagtgggagagcatggcccgagacaggcgccccctgctgactgctccagaccactgcagtgacgacgcctagcagtcctgccctgctgctgctgccgccccgctacagaggcaatgtgaccagtcacagggacagatcacatctccccagagtggcaactctggtgaaaccttttcagaatcatggcagaggggcgtggcgtggtgctactgagaaggtcctccttcctcttgactttgtggtctgaaacctggtcttactgtccatgtgtgtttgggcccggatggtcagggtggggagcagggacggccatgggcacgcctggccacgctttaccgactgctgaccccctgggccaggtgaggttggggcctgtgggccgccagtccatacggtgctgtcactgcccatcttcggtgacaccctggggtgaggtgctcagcaccttcctctcgaggagccacattttcctcctttgtgttaggggacataacaagctctgctgggcttgagggacccagaccaggtgtctgcagtcagctcctgagacacagctggccggcacaacaggtgttacatcaggggtttcctgtggccgtttgaactttgagcatttatctaaattaaattggcccagggttggctggtgggtcacccagcagaggcttctccccatagcacgaggatgtgttgcctgggcacggtgactgcggttattcctggaggtcggcagacatgccaaccttgggctatttgagctggagaagctatgtgatgctagccggtggctttctgggctaggccccagtttgaggctcccctgggaactagagccaggaacagccagtggcactgacaaggggacggagtccaaggcgttattgggccacctgacagctggacagaaaaggggcagacacaccgaggatgcgatttaaaataaatgcagatgtttacttggaaaaaaacacaacaaaaaaaaaaaaaaaaaaaaaaaaaaanaaaaaaaaaaaaaaaaaaaaaaaaaaaaaaaaaaaaaaaagggggggggggccaaaaagtacaccccggggggggcaccaaaattaaggagcgcacgccgggttttttagacaaagagggggccccaattaaggaggggcgaaaataataagagggagagaggagcagggccgggggatataaacaacacgggtgggaggggggaaaaacaccgtggctaacgcgagagatcaactcgtagggagagaagaccccccacctaaacagcgcggggggggggagacacacaagtgtgggtgagcacacacccccacccaccaagaagaaatatatgaggcacctcactacgaggagaacacaatataacatcacaaccacgagggcgtacacaacacgggcgtgtgaaaacaagcagagatgagtgaaatataatgcttgactggagtgggtgaggaagaagttgttggtcgaacagtggcgagattgatagtgttggttgaggagagaaattatttaaaggaggggggggatcttgttattaatctataaaatccatggaggggagggcgagaaccgtgccgagccgcgggagacgacggcccgaggcggcgcggggacgacagaccaacgaagggagacgaaacgagggagcgcgcgggcggcgcgagggccgggcgcggcggagaggcgagagcgcagtggggcctctaggggacggagagggcggggcagacgcagggagagggaggacgggagagacgaagacggcgtcgggagcagacaagagacacgaaaagcaacagacacgaacgagccagaagcggagcaaaggaaacagaggag

SEQ ID NO: 451510 - DNA, 4792 bp, Homo sapiens
ggcttgtgtctcctctcttgctcttgatacatgtggactttttgcctttcctctctctcctcatttcagtgaagagagaagtcagaaatatggaatatattatttttctatgaagtgagattatactatacatgtaccttcaggctctataaaactcactaaaattgtgaaccatgcctttagtgaagaggaacattgagccccggcacttgtgccggggagctctgcctgaagggattaccagcgaacttgaatgtgtaaccaatagtactcttgccgctatcatacgccagctgagcagtctgagcaaacatgctgaagacatatttggtgagttgtttaatgaggctaacaacttctacatcagagcaaattctcttcaagacagaattgatcgccttgctgtcaaagtcacccagctggattcaacagtggaagaggtctcactacaggatatcaacatgaaaaaagctttcaaaagttccacagtccaagaccagcaagtggtttcaaagaacagcattcctaatcctgttgctgatatttacaaccagagtgataagccaccgcctctgaacatcctgacaccatacagagatgacaagaaggatgggctgaagttctatactgatccttcctatttctttgacctctggaaagaaaaaatgctacaggacacagaagacaaaaggaaagagaaaaggcgtcaaaaggagcaaaagcgtatagatggcaccacccgtgaggtgaaaaaggttagaaaagccagaaacaggcgccaggagtggaatatgatggcatatgacaaagagcttagacccgacaacaggttgtctcagagtgtgtaccatggagcgtcttccgagggatccctgtccccagatactaggtcacatgcatcggacgttacggattactcttacccggctactcccaaccattctctgcacccccagcctgtgaccccttcctatgcagctggtgacgtgccaccacacgggcctgcaagccaggctgcggagcatgagtaccggcccccatctgcctcggcgaggcacatggccctcaacagacctcagcagccgccccccccgcctccccctcaggccccagaggggtcccaggcctctgcaccgatggctccagcagactacgggatgctcccagcgcagataattgagtattacaacccatccggaccacctcctccgccacctcctcctgtgattccctcagcacaaactgccttcgtcagccctctccagatgcccatgcagcccccgttccctgcatcagccagctccacgcacgcagctcctcctcacccaccctccaccgggctcctggtcacagccccgccacccccgggcccaccacctcccccgccaggccctcctggtcccgggtcttctctttcgtcctccccaatgcatggccccccagtagctgaggcgaagcggcaagagcctgcacagccaccaatcagtgatgctcgaagcgacctcctcgctgctattcgaatgggaattcaactgaaaaaggtgcaggagcagcgggagcaggaggcccaagcgggagccagtggtgaatgacgtggccacgatcctgtcccggcgcattgccgtggagtacagcgactctgacgacgactcagagttcgacgagaacgactggtccgactgagcaaaggccggcggagaggccgcgtgtgggagcgtgttgaagattttaagtggtctctacacccaaatagtggtattctaatcccgtagcatagcaccttttgtataaacaatgtgatattgcttctgcacatccaaaaattctgggtcttttcagtatttactgtgtaatacttaagtgccactaaacatagcaaattgtgctgcacatgaggaaataggctgtcactatcacattgtcctgaaaacagcatctgctttcctcttggccatgagagtatttagtgcagtttgggtttactcttactgatcaatataactctgcagacttgctgtgtgtttgtgaagctgcctggtgttaggtctctgcaagactaatgactatgtcagagtgatgtcttccaaccagtaagtgatattgtttcaccgctttggtttttccttttgtttttttaaaggatgtgtttctgaataagttggttttagagggaaaggttcaacaaacagggagaatccagtgtttctgctttcagtttcttggcttggtagcctctgagtgaatctgatgctctgctgaataatttcattacctctgcacatgcctgtcaaatatgaaattggaagggcccttttcaggctgggttccctgtgggcatttgcttagtaaatgcctgttgatggtttttgcaagagaattcagcagctcaacagtaatgaaagtgaagaacagagtccattttccttcctggggccattggggatgacactcaagatacttgccagtctctccagtgtgggcaccagccggccagaacagatgcgagcagtccatgactctgggagctacaccgctgagctgggcagagctgcggcacagggcctgggctgcaaaggagccctgctcctttagtttcctgacacctgtgtcctgagtgagccgcaggagttcttagctcctcagcgagcaacagagagcactttagatggcacctttcaccacttggtcagaattttaaaagcttaggtttaggtgaaagtagatattgacagctattcacctttcacggtgctggggccagattagggatcactcccgtgaggagggccttcaccctgttctagaagcacatggttgtcctcctgttgttggcacattaaatgataaaaagcacctcatgagattcccttgatcagccctgcagctgtagtacagtgctgtgccctcacctccacccttcctgttgttcccacgtgggcaataccagggacccatggggaaactcaagaatgacagcttctatattttgtaattctggatgaaagataactgtgttgaacaaacaggtgctccaggctttgattatagatacgacttcaaaaatatgctaagacgcttgacttattaaggactttaacctactcaacagtatttcatatccattgtggttagttactcagttatgttgagaagaatctggagctaaaagcagagatgtttgaggtgacggtaggaatgtgagcaggatggtgatgggggtttttgttaaaatgcatctgagcaagtcagccagccccgaagtcccctcagtgtgtgtgtctcgagtggctacctgttgggcttgtgggcagtgattgtacagagcctgtccattgggtgcagtcatgtagatctgaagccctgaaaagcctcatgtctgcatcccctttccaaggctgcttccctggtgtgtctgttctctcctctgtcccaggtgctgggagcgtcctcttcagcgtcttttcctagagctggtcaccactaggctgtcactataaattccttgaatataagtaacagttattaatgaacttctaaatttctaatttctctctctctctctctttttttttttttttgttgttgttaaaaagggcctactacattggcgctattcttaggacttctgcaacttttaaagtcttacttgtctttcttgttgcttttgtattaggagttccccgtgtgggtctagaactcccctttggtaatgcttctttgtttttttatggcccttctgttctcaggatggagagaacacagaagctactatccatgtcaggatttattctatttatatcttattacaataaaattagtggcactttattcataaatattcatgagcctgttaattgttagttgtcttcctgtagctgaatcaacaagttattttcaactcaattttatgacttgcgaaaaagcttttgccctgttgtgtaccataacatttaaaagaatggaaaatgactgaaatccaatttagattatttttagagtatttttccagcaaattcaatttattctgaaatttaaatccagatcttttctaatatggtattacaatgaaaagaataaagagaagatttgaattttcagtttcattttcaaaaactatttaccaaaacaaatggagaagaaacatccaaaagcacatttcatttctccaaactttgtgttttaaattatagttataaattgtaaggtaattttaaattgtccctcgtattatttctccacgtctgttttagtttaatgtctcctaagcttttctctcatagcgtagacctagggaagggatgggaagattgcccagtccccgatggctgcgcacacaggaggcggcggagcacaaggcaagtgagtttgcactgtcagccccagaccgtaagcttggctacactgatgtttttctttactaaggatactattcaaaaattaacattttcatctcagtaagtttttagaacatcaaaatgttttctgagctccaagtggctaggttgtaaaagttttataataatttgcaattaaaatacatgatacatattaatccattaaagactagtgggaatgtatcagccagagtagcaagtaatttttgttttataaatcatagtatctgtcatcttgcagtattaccaatgctgttgtaaattgaatttaaagtggtattaaaaaaaactgttaaacaatttttatctgtttgtatatcttactatagattatgtacaagtaacatctaaataaaattacacttttaaccctaaaaggttttgcttattaataacag

SEQ ID NO: 451511 - DNA, 3261 bp, Homo sapiens
  misc_feature (10)..(10): n is a, c, g, or t
agatacttcngcttgagctgcttcgggagtcgcgatgcaagcgggagccagtggtgaatgacgtggccacgatcctgtcccggcgcattgccgtggagtacagcgactctgacgacgactcagagttcgacgagaacgactggtccgactgagcaaaggccggcggagaggccgcgtgtgggagcgtgttgaagattttaagtggtctctacacccaaatagtggtattctaatcccgtagcatagcaccttttgtataaacaatgtgatattgcttctgcacatccaaaaattctgggtcttttcagtatttactgtgtaatacttaagtgccactaaacatagcaaattgtgctgcacatgaggaaataggctgtcactatcacattgtcctgaaaacagcatctgctttcctcttggccatgagagtatttagtgcagtttgggtttactcttactgatcaatataactctgcagacttgctgtgtgtttgtgaagctgcctggtgttaggtctctgcaagactaatgactatgtcagagtgatgtcttccaaccagtaagtgatattgtttcaccgctttggtttttccttttgtttttttaaaggatgtgtttctgaataagttggttttagagggaaaggttcaacaaacagggagaatccagtgtttctgctttcagtttcttggcttggtagcctctgagtgaatctgatgctctgctgaataatttcattacctctgcacatgcctgtcaaatatgaaattggaagggcccttttcaggctgggttccctgtgggcatttgcttagtaaatgcctgttgatggtttttgcaagagaattcagcagctcaacagtaatgaaagtgaagaacagagtccattttccttcctggggccattggggatgacactcaagatacttgccagtctctccagtgtgggcaccagccggccagaacagatgcgagcagtccatgactctgggagctacaccgctgagctgggcagagctgcggcacagggcctgggctgcaaaggagccctgctcctttagtttcctgacacctgtgtcctgagtgagccgcaggagttcttagctcctcagcgagcaacagagagcactttagatggcacctttcaccacttggtcagaattttaaaagcttaggtttaggtgaaagtagatattgacagctattcacctttcacggtgctggggccagattagggatcactcccgtgaggagggccttcaccctgttctagaagcacatggttgtcctcctgttgttggcacattaaatgataaaaagcacctcatgagattcccttgatcagccctgcagctgtagtacagtgctgtgccctcacctccacccttcctgttgttcccacgtgggcaataccagggacccatggggaaactcaagaatgacagcttctatattttgtaattctggatgaaagataactgtgttgaacaaacaggtgctccaggctttgattatagatacgacttcaaaaatatgctaagacgcttgacttattaaggactttaacctactcaacagtatttcatatccattgtggttagttactcagttatgttgagaagaatctggagctaaaagcagagatgtttgaggtgacggtaggaatgtgagcaggatggtgatgggggtttttgttaaaatgcatctgagcaagtcagccagccccgaagtcccctcagtgtgtgtgtctcgagtggctacctgttgggcttgtgggcagtgattgtacagagcctgtccattgggtgcagtcatgtagatctgaagccctgaaaagcctcatgtctgcatcccctttccaaggctgcttccctggtgtgtctgttctctcctctgtcccaggtgctgggagcgtcctcttcagcgtcttttcctagagctggtcaccactaggctgtcactataaattccttgaatataagtaacagttattaatgaacttctaaatttctaatttctctctctctctctctttttttttttttttgttgttgttaaaaagggcctactacattggcgctattcttaggacttctgcaacttttaaagtcttacttgtctttcttgttgcttttgtattaggagttccccgtgtgggtctagaactcccctttggtaatgcttctttgtttttttatggcccttctgttctcaggatggagagaacacagaagctactatccatgtcaggatttattctatttatatcttattacaataaaattagtggcactttattcataaatattcatgagcctgttaattgttagttgtcttcctgtagctgaatcaacaagttattttcaactcaattttatgacttgcgaaaaagcttttgccctgttgtgtaccataacatttaaaagaatggaaaatgactgaaatccaatttagattatttttagagtatttttccagcaaattcaatttattctgaaatttaaatccagatcttttctaatatggtattacaatgaaaagaataaagagaagatttgaattttcagtttcattttcaaaaactatttaccaaaacaaatggagaagaaacatccaaaagcacatttcatttctccaaactttgtgttttaaattatagttataaattgtaaggtaattttaaattgtccctcgtattatttctccacgtctgttttagtttaatgtctcctaagcttttctctcatagcgtagacctagggaagggatgggaagattgcccagtccccgatggctgcgcacacaggaggcggcggagcacaaggcaagtgagtttgcactgtcagccccagaccgtaagcttggctacactgatgtttttctttactaaggatactattcaaaaattaacattttcatctcagtaagtttttagaacatcaaaatgttttctgagctccaagtggctaggttgtaaaagttttataataatttgcaattaaaatacatgatacatattaatccattaaagactagtgggaatgtatcagccagagtagcaagtaatttttgttttataaatcatagtatctgtcatcttgcagtattaccaatgctgttgtaaattgaatttaaagtggtattaaaaaaaactgttaaacaatttttatctgtttgtatatcttactatagattatgtacaagtaacatctaaataaaattacacttttaaccctaaaaggttttgcttattaataacag

SEQ ID NO: 451512 - DNA, 4414 bp, Homo sapiens
cacagaaatgtacacttaaaaatgatcaaaaaggtaaattttatgttgtatatattttcctactctcactacaggatatcaacatgaaaaaagctttcaaaagttccacagtccaagaccagcaagtggtttcaaagaacagcattcctaatcctgttgctgatatttacaaccagagtgataagccaccgcctctgaacatcctgacaccatacagagatgacaagaaggatgggctgaagttctatactgatccttcctatttctttgacctctggaaagaaaaaatgctacaggacacagaagacaaaaggaaagagaaaaggcgtcaaaaggagcaaaagcgtatagatggcaccacccgtgaggtgaaaaaggttagaaaagccagaaacaggcgccaggagtggaatatgatggcatatgacaaagagcttagacccgacaacaggttgtctcagagtgtgtaccatggagcgtcttccgagggatccctgtccccagatactaggtcacatgcatcggacgttacggattactcttacccggctactcccaaccattctctgcacccccagcctgtgaccccttcctatgcagctggtgacgtgccaccacacgggcctgcaagccaggctgcggagcatgagtaccggcccccatctgcctcggcgaggcacatggccctcaacagacctcagcagccgccccccccgcctccccctcaggccccagaggggtcccaggcctctgcaccgatggctccagcagactacgggatgctcccagcgcagataattgagtattacaacccatccggaccacctcctccgccacctcctcctgtgattccctcagcacaaactgccttcgtcagccctctccagatgcccatgcagcccccgttccctgcatcagccagctccacgcacgcagctcctcctcacccaccctccaccgggctcctggtcacagccccgccacccccgggcccaccacctcccccgccaggccctcctggtcccgggtcttctctttcgtcctccccaatgcatggccccccagtagctgaggcgaagcggcaagagcctgcacagccaccaatcagtgatgctcgaagcgacctcctcgctgctattcgaatgggaattcaactgaaaaaggtgcaggagcagcgggagcaggaggcccaagcgggagccagtggtgaatgacgtggccacgatcctgtcccggcgcattgccgtggagtacagcgactctgacgacgactcagagttcgacgagaacgactggtccgactgagcaaaggccggcggagaggccgcgtgtgggagcgtgttgaagattttaagtggtctctacacccaaatagtggtattctaatcccgtagcatagcaccttttgtataaacaatgtgatattgcttctgcacatccaaaaattctgggtcttttcagtatttactgtgtaatacttaagtgccactaaacatagcaaattgtgctgcacatgaggaaataggctgtcactatcacattgtcctgaaaacagcatctgctttcctcttggccatgagagtatttagtgcagtttgggtttactcttactgatcaatataactctgcagacttgctgtgtgtttgtgaagctgcctggtgttaggtctctgcaagactaatgactatgtcagagtgatgtcttccaaccagtaagtgatattgtttcaccgctttggtttttccttttgtttttttaaaggatgtgtttctgaataagttggttttagagggaaaggttcaacaaacagggagaatccagtgtttctgctttcagtttcttggcttggtagcctctgagtgaatctgatgctctgctgaataatttcattacctctgcacatgcctgtcaaatatgaaattggaagggcccttttcaggctgggttccctgtgggcatttgcttagtaaatgcctgttgatggtttttgcaagagaattcagcagctcaacagtaatgaaagtgaagaacagagtccattttccttcctggggccattggggatgacactcaagatacttgccagtctctccagtgtgggcaccagccggccagaacagatgcgagcagtccatgactctgggagctacaccgctgagctgggcagagctgcggcacagggcctgggctgcaaaggagccctgctcctttagtttcctgacacctgtgtcctgagtgagccgcaggagttcttagctcctcagcgagcaacagagagcactttagatggcacctttcaccacttggtcagaattttaaaagcttaggtttaggtgaaagtagatattgacagctattcacctttcacggtgctggggccagattagggatcactcccgtgaggagggccttcaccctgttctagaagcacatggttgtcctcctgttgttggcacattaaatgataaaaagcacctcatgagattcccttgatcagccctgcagctgtagtacagtgctgtgccctcacctccacccttcctgttgttcccacgtgggcaataccagggacccatggggaaactcaagaatgacagcttctatattttgtaattctggatgaaagataactgtgttgaacaaacaggtgctccaggctttgattatagatacgacttcaaaaatatgctaagacgcttgacttattaaggactttaacctactcaacagtatttcatatccattgtggttagttactcagttatgttgagaagaatctggagctaaaagcagagatgtttgaggtgacggtaggaatgtgagcaggatggtgatgggggtttttgttaaaatgcatctgagcaagtcagccagccccgaagtcccctcagtgtgtgtgtctcgagtggctacctgttgggcttgtgggcagtgattgtacagagcctgtccattgggtgcagtcatgtagatctgaagccctgaaaagcctcatgtctgcatcccctttccaaggctgcttccctggtgtgtctgttctctcctctgtcccaggtgctgggagcgtcctcttcagcgtcttttcctagagctggtcaccactaggctgtcactataaattccttgaatataagtaacagttattaatgaacttctaaatttctaatttctctctctctctctctttttttttttttttgttgttgttaaaaagggcctactacattggcgctattcttaggacttctgcaacttttaaagtcttacttgtctttcttgttgcttttgtattaggagttccccgtgtgggtctagaactcccctttggtaatgcttctttgtttttttatggcccttctgttctcaggatggagagaacacagaagctactatccatgtcaggatttattctatttatatcttattacaataaaattagtggcactttattcataaatattcatgagcctgttaattgttagttgtcttcctgtagctgaatcaacaagttattttcaactcaattttatgacttgcgaaaaagcttttgccctgttgtgtaccataacatttaaaagaatggaaaatgactgaaatccaatttagattatttttagagtatttttccagcaaattcaatttattctgaaatttaaatccagatcttttctaatatggtattacaatgaaaagaataaagagaagatttgaattttcagtttcattttcaaaaactatttaccaaaacaaatggagaagaaacatccaaaagcacatttcatttctccaaactttgtgttttaaattatagttataaattgtaaggtaattttaaattgtccctcgtattatttctccacgtctgttttagtttaatgtctcctaagcttttctctcatagcgtagacctagggaagggatgggaagattgcccagtccccgatggctgcgcacacaggaggcggcggagcacaaggcaagtgagtttgcactgtcagccccagaccgtaagcttggctacactgatgtttttctttactaaggatactattcaaaaattaacattttcatctcagtaagtttttagaacatcaaaatgttttctgagctccaagtggctaggttgtaaaagttttataataatttgcaattaaaatacatgatacatattaatccattaaagactagtgggaatgtatcagccagagtagcaagtaatttttgttttataaatcatagtatctgtcatcttgcagtattaccaatgctgttgtaaattgaatttaaagtggtattaaaaaaaactgttaaacaatttttatctgtttgtatatcttactatagattatgtacaagtaacatctaaataaaattacacttttaaccctaaaaggttttgcttattaataacag

SEQ ID NO: 451513 - DNA, 3299 bp, Homo sapiens
  misc_feature (66)..(66): n is a, c, g, or t
  misc_feature (73)..(73): n is a, c, g, or t
gtgattgtatgctgtatctgaggttcacgcgggaatatttggggctatgcatgtcttcgggagttngatggcnggcaagcgggagccagtggtgaatgacgtggccacgatcctgtcccggcgcattgccgtggagtacagcgactctgacgacgactcagagttcgacgagaacgactggtccgactgagcaaaggccggcggagaggccgcgtgtgggagcgtgttgaagattttaagtggtctctacacccaaatagtggtattctaatcccgtagcatagcaccttttgtataaacaatgtgatattgcttctgcacatccaaaaattctgggtcttttcagtatttactgtgtaatacttaagtgccactaaacatagcaaattgtgctgcacatgaggaaataggctgtcactatcacattgtcctgaaaacagcatctgctttcctcttggccatgagagtatttagtgcagtttgggtttactcttactgatcaatataactctgcagacttgctgtgtgtttgtgaagctgcctggtgttaggtctctgcaagactaatgactatgtcagagtgatgtcttccaaccagtaagtgatattgtttcaccgctttggtttttccttttgtttttttaaaggatgtgtttctgaataagttggttttagagggaaaggttcaacaaacagggagaatccagtgtttctgctttcagtttcttggcttggtagcctctgagtgaatctgatgctctgctgaataatttcattacctctgcacatgcctgtcaaatatgaaattggaagggcccttttcaggctgggttccctgtgggcatttgcttagtaaatgcctgttgatggtttttgcaagagaattcagcagctcaacagtaatgaaagtgaagaacagagtccattttccttcctggggccattggggatgacactcaagatacttgccagtctctccagtgtgggcaccagccggccagaacagatgcgagcagtccatgactctgggagctacaccgctgagctgggcagagctgcggcacagggcctgggctgcaaaggagccctgctcctttagtttcctgacacctgtgtcctgagtgagccgcaggagttcttagctcctcagcgagcaacagagagcactttagatggcacctttcaccacttggtcagaattttaaaagcttaggtttaggtgaaagtagatattgacagctattcacctttcacggtgctggggccagattagggatcactcccgtgaggagggccttcaccctgttctagaagcacatggttgtcctcctgttgttggcacattaaatgataaaaagcacctcatgagattcccttgatcagccctgcagctgtagtacagtgctgtgccctcacctccacccttcctgttgttcccacgtgggcaataccagggacccatggggaaactcaagaatgacagcttctatattttgtaattctggatgaaagataactgtgttgaacaaacaggtgctccaggctttgattatagatacgacttcaaaaatatgctaagacgcttgacttattaaggactttaacctactcaacagtatttcatatccattgtggttagttactcagttatgttgagaagaatctggagctaaaagcagagatgtttgaggtgacggtaggaatgtgagcaggatggtgatgggggtttttgttaaaatgcatctgagcaagtcagccagccccgaagtcccctcagtgtgtgtgtctcgagtggctacctgttgggcttgtgggcagtgattgtacagagcctgtccattgggtgcagtcatgtagatctgaagccctgaaaagcctcatgtctgcatcccctttccaaggctgcttccctggtgtgtctgttctctcctctgtcccaggtgctgggagcgtcctcttcagcgtcttttcctagagctggtcaccactaggctgtcactataaattccttgaatataagtaacagttattaatgaacttctaaatttctaatttctctctctctctctctttttttttttttttgttgttgttaaaaagggcctactacattggcgctattcttaggacttctgcaacttttaaagtcttacttgtctttcttgttgcttttgtattaggagttccccgtgtgggtctagaactcccctttggtaatgcttctttgtttttttatggcccttctgttctcaggatggagagaacacagaagctactatccatgtcaggatttattctatttatatcttattacaataaaattagtggcactttattcataaatattcatgagcctgttaattgttagttgtcttcctgtagctgaatcaacaagttattttcaactcaattttatgacttgcgaaaaagcttttgccctgttgtgtaccataacatttaaaagaatggaaaatgactgaaatccaatttagattatttttagagtatttttccagcaaattcaatttattctgaaatttaaatccagatcttttctaatatggtattacaatgaaaagaataaagagaagatttgaattttcagtttcattttcaaaaactatttaccaaaacaaatggagaagaaacatccaaaagcacatttcatttctccaaactttgtgttttaaattatagttataaattgtaaggtaattttaaattgtccctcgtattatttctccacgtctgttttagtttaatgtctcctaagcttttctctcatagcgtagacctagggaagggatgggaagattgcccagtccccgatggctgcgcacacaggaggcggcggagcacaaggcaagtgagtttgcactgtcagccccagaccgtaagcttggctacactgatgtttttctttactaaggatactattcaaaaattaacattttcatctcagtaagtttttagaacatcaaaatgttttctgagctccaagtggctaggttgtaaaagttttataataatttgcaattaaaatacatgatacatattaatccattaaagactagtgggaatgtatcagccagagtagcaagtaatttttgttttataaatcatagtatctgtcatcttgcagtattaccaatgctgttgtaaattgaatttaaagtggtattaaaaaaaactgttaaacaatttttatctgtttgtatatcttactatagattatgtacaagtaacatctaaataaaattacacttttaaccctaaaaggttttgcttattaataacag

SEQ ID NO: 451514 - DNA, 1244 bp, Homo sapiens
aggcggcgtcgctcgcgccgctgcgtgcggtgtggtgcgaggcgggtgcgccgggcggccgcggcgcggcgggaccatggagctcagagcgcagccccggcgccggcggcgggaccgcggaccgttttagttttgattgctgttaactactactgataactgagccaaagtggtgatgctacttgaggggaatttctgcaacccatagtcaacgattacatgattgtgaaccatgcctttagtgaagaggaacattgagccccggcacttgtgccggggagctctgcctgaagggattaccagcgaacttgaatgtgtaaccaatagtactcttgccgctatcatacgccagctgagcagtctgagcaaacatgctgaagacatatttggtgagttgtttaatgaggctaacaacttctacatcagagcaaattctcttcaagacagaattgatcgccttgctgtcaaagtcacccagctggattcaacagtggaagaggtctcactacaggatatcaacatgaaaaaagctttcaaaagttccacagtccaagaccagcaagtggtttcaaagaacagcattcctaatcctgttgctgatatttacaaccagagtgataagccaccgcctctgaacatcctgacaccatacagagatgacaagaaggatgggctgaagttctatactgatccttcctatttctttgacctctggaaagaaaaaatgctacaggacacagaagacaaaaggaaagagaaaaggcgtcaaaaggagcaaaagcgtatagatggcaccacccgtgaggtgaaaaaggttagaaaagccagaaacaggcgccaggagtggaatatgatggcatatgacaaagagcttagacccgacaacaggttgtctcagagtgtgtaccatggagcgtcttccgagggatccctgtccccagatactaggtgtgtgtgtgtcactgctccctcagccctgatgcttgggcaactgggtactacctggttttattatcatttgaaatgcatcaatagcttcggggtttatatggcccttgatgtcttaagattttccttaaaaattgtttatctgtattttgattttgaaataatacttgaagacagtgttattttacattgggttcctttgattttagaaaatctctctgacttaaaatgtattgttgagttcatctagatgtagtgttttaacactgattctgaatttggggtaactgcttatg

SEQ ID NO: 451515 - DNA, 443 bp, Homo sapiens
cagtcagctgctttattctgcctttcttcaggaagtgctgcactttttgagtggtcctccttttggcacatttcagtagcagatcttgacttctgtcataatgaataatgtcaaactgtgaaaataactgacccaaggtgtgcatgtttgcatcctgccatgattgaagttcaggtgacaatacgtgttgtgtctggggatggctccgttaggtgtctaagagctcccaggacgtgaccctctcttgttcccttggtgactatgtgcctcatatctctctcaggatgctcccagcgcagataattgagtattacaacccatccggaccacctcctccgccacctcctcctgtgattccctcagcacaaactgccttcgtcagccctctccagatgcccatgcagcccccgttccctgcatcagccagctccacgcacgcagct

SEQ ID NO: 451516 - DNA, 4851 bp, Homo sapiens
aggcggcgtcgctcgcgccgctgcgtgcggtgtggtgcgaggcgggtgcgccgggcggccgcggcgcggcgggaccatggagctcagagcgcagccccggcgccggcggcgggaccgcggaccgttttagttttgattgctgttaactactactgataactgagccaaagtggtgatgctacttgaggggaatttctgcaacccatagtcaacgattacatgattgtgaaccatgcctttagtgaagaggaacattgagccccggcacttgtgccggggagctctgcctgaagggattaccagcgaacttgaatgtgtaaccaatagtactcttgccgctatcatacgccagctgagcagtctgagcaaacatgctgaagacatatttggtgagttgtttaatgaggctaacaacttctacatcagagcaaattctcttcaagacagaattgatcgccttgctgtcaaagtcacccagctggattcaacagtggaagaggtctcactacaggatatcaacatgaaaaaagctttcaaaagttccacagtccaagaccagcaagtggtttcaaagaacagcattcctaatcctgttgctgatatttacaaccagagtgataagccaccgcctctgaacatcctgacaccatacagagatgacaagaaggatgggctgaagttctatactgatccttcctatttctttgacctctggaaagaaaaaatgctacaggacacagaagacaaaaggaaagagaaaaggcgtcaaaaggagcaaaagcgtatagatggcaccacccgtgaggtgaaaaaggttagaaaagccagaaacaggcgccaggagtggaatatgatggcatatgacaaagagcttagacccgacaacaggttgtctcagagtgtgtaccatggagcgtcttccgagggatccctgtccccagatactaggtcacatgcatcggacgttacggattactcttacccggctactcccaaccattctctgcacccccagcctgtgaccccttcctatgcagctggtgacgtgccaccacacgggcctgcaagccaggctgcggagcatgagtaccggcccccatctgcctcggcgaggcacatggccctcaacagacctcagcagccgccccccccgcctccccctcaggccccagaggggtcccaggcctctgcaccgatggctccagcagactacgggatgctcccagcgcagataattgagtattacaacccatccggaccacctcctccgccacctcctcctgtgattccctcagcacaaactgccttcgtcagccctctccagatgcccatgcagcccccgttccctgcatcagccagctccacgcacgcagctcctcctcacccaccctccaccgggctcctggtcacagccccgccacccccgggcccaccacctcccccgccaggccctcctggtcccgggtcttctctttcgtcctccccaatgcatggccccccagtagctgaggcgaagcggcaagagcctgcacagccaccaatcagtgatgctcgaagcgacctcctcgctgctattcgaatgggaattcaactgaaaaaggtgcaggagcagcgggagcaggaggcccaagcgggagccagtggtgaatgacgtggccacgatcctgtcccggcgcattgccgtggagtacagcgactctgacgacgactcagagttcgacgagaacgactggtccgactgagcaaaggccggcggagaggccgcgtgtgggagcgtgttgaagattttaagtggtctctacacccaaatagtggtattctaatcccgtagcatagcaccttttgtataaacaatgtgatattgcttctgcacatccaaaaattctgggtcttttcagtatttactgtgtaatacttaagtgccactaaacatagcaaattgtgctgcacatgaggaaataggctgtcactatcacattgtcctgaaaacagcatctgctttcctcttggccatgagagtatttagtgcagtttgggtttactcttactgatcaatataactctgcagacttgctgtgtgtttgtgaagctgcctggtgttaggtctctgcaagactaatgactatgtcagagtgatgtcttccaaccagtaagtgatattgtttcaccgctttggtttttccttttgtttttttaaaggatgtgtttctgaataagttggttttagagggaaaggttcaacaaacagggagaatccagtgtttctgctttcagtttcttggcttggtagcctctgagtgaatctgatgctctgctgaataatttcattacctctgcacatgcctgtcaaatatgaaattggaagggcccttttcaggctgggttccctgtgggcatttgcttagtaaatgcctgttgatggtttttgcaagagaattcagcagctcaacagtaatgaaagtgaagaacagagtccattttccttcctggggccattggggatgacactcaagatacttgccagtctctccagtgtgggcaccagccggccagaacagatgcgagcagtccatgactctgggagctacaccgctgagctgggcagagctgcggcacagggcctgggctgcaaaggagccctgctcctttagtttcctgacacctgtgtcctgagtgagccgcaggagttcttagctcctcagcgagcaacagagagcactttagatggcacctttcaccacttggtcagaattttaaaagcttaggtttaggtgaaagtagatattgacagctattcacctttcacggtgctggggccagattagggatcactcccgtgaggagggccttcaccctgttctagaagcacatggttgtcctcctgttgttggcacattaaatgataaaaagcacctcatgagattcccttgatcagccctgcagctgtagtacagtgctgtgccctcacctccacccttcctgttgttcccacgtgggcaataccagggacccatggggaaactcaagaatgacagcttctatattttgtaattctggatgaaagataactgtgttgaacaaacaggtgctccaggctttgattatagatacgacttcaaaaatatgctaagacgcttgacttattaaggactttaacctactcaacagtatttcatatccattgtggttagttactcagttatgttgagaagaatctggagctaaaagcagagatgtttgaggtgacggtaggaatgtgagcaggatggtgatgggggtttttgttaaaatgcatctgagcaagtcagccagccccgaagtcccctcagtgtgtgtgtctcgagtggctacctgttgggcttgtgggcagtgattgtacagagcctgtccattgggtgcagtcatgtagatctgaagccctgaaaagcctcatgtctgcatcccctttccaaggctgcttccctggtgtgtctgttctctcctctgtcccaggtgctgggagcgtcctcttcagcgtcttttcctagagctggtcaccactaggctgtcactataaattccttgaatataagtaacagttattaatgaacttctaaatttctaatttctctctctctctctctttttttttttttttgttgttgttaaaaagggcctactacattggcgctattcttaggacttctgcaacttttaaagtcttacttgtctttcttgttgcttttgtattaggagttccccgtgtgggtctagaactcccctttggtaatgcttctttgtttttttatggcccttctgttctcaggatggagagaacacagaagctactatccatgtcaggatttattctatttatatcttattacaataaaattagtggcactttattcataaatattcatgagcctgttaattgttagttgtcttcctgtagctgaatcaacaagttattttcaactcaattttatgacttgcgaaaaagcttttgccctgttgtgtaccataacatttaaaagaatggaaaatgactgaaatccaatttagattatttttagagtatttttccagcaaattcaatttattctgaaatttaaatccagatcttttctaatatggtattacaatgaaaagaataaagagaagatttgaattttcagtttcattttcaaaaactatttaccaaaacaaatggagaagaaacatccaaaagcacatttcatttctccaaactttgtgttttaaattatagttataaattgtaaggtaattttaaattgtccctcgtattatttctccacgtctgttttagtttaatgtctcctaagcttttctctcatagcgtagacctagggaagggatgggaagattgcccagtccccgatggctgcgcacacaggaggcggcggagcacaaggcaagtgagtttgcactgtcagccccagaccgtaagcttggctacactgatgtttttctttactaaggatactattcaaaaattaacattttcatctcagtaagtttttagaacatcaaaatgttttctgagctccaagtggctaggttgtaaaagttttataataatttgcaattaaaatacatgatacatattaatccattaaagactagtgggaatgtatcagccagagtagcaagtaatttttgttttataaatcatagtatctgtcatcttgcagtattaccaatgctgttgtaaattgaatttaaagtggtattaaaaaaaactgttaaacaatttttatctgtttgtatatcttactatagattatgtacaagtaacatctaaataaaattacacttttaaccctaaaaggttttgcttattaataacag

SEQ ID NO: 451517 - DNA, 3518 bp, Homo sapiens
aggcggcgtcgctcgcgccgctgcgtgcggtgtggtgcgaggcgggtgcgccgggcggccgcggcgcggcgggaccatggagctcagagcgcagccccggcgccggcggcgggaccgcggaccgttttagttttgattgctgttaactactactgataactgagccaaagtggtgatgctacttgaggggaatttctgcaacccatagtcaacgattacatgattgtgaaccatgcctttagtgaagaggaacattgagccccggcacttgtgccggggagctctgcctgaagggattaccagcgaacttgaatgtgtaaccaatagtactcttgccgctatcatacgccagctgagcagtctgagcaaacatgctgaagacatatttggtgagttgtttaatgaggctaacaacttctacatcagagcaaattctcttcaagacagaattgatcgccttgctgtcaaagtcacccagctggattcaacagtggaagaggtctcactacaggatatcaacatgaaaaaagctttcaaaagttccacagtccaagaccagcaagtggtttcaaagaacagcattcctaatcctgttgctgatatttacaaccagagtgataagccaccgcctctgaacatcctgacaccatacagagatgacaagaaggatgggctgaagttctatactgatccttcctatttctttgacctctggaaagaaaaaatgctacaggacacagaagacaaaaggaaagagaaaaggcgtcaaaaggagcaaaagcgtatagatggcaccacccgtgaggtgaaaaaggttagaaaagccagaaacaggcgccaggagtggaatatgatggcatatgacaaagagcttagacccgacaacaggttgtctcagagtgtgtaccatggagcgtcttccgagggatccctgtccccagatactaggtcacatgcatcggacgttacggattactcttacccggctactcccaaccattcttctgctgaataatttcattacctctgcacatgcctgtcaaatatgaaattggaagggcccttttcaggctgggttccctgtgggcatttgcttagtaaatgcctgttgatggtttttgcaagagaattcagcagctcaacagtaatgaaagtgaagaacagagtccattttccttcctggggccattggggatgacactcaagatacttgccagtctctccagtgtgggcaccagccggccagaacagatgcgagcagtccatgactctgggagctacaccgctgagctgggcagagctgcggcacagggcctggtttcctgacacctgtgtcctgagtgagccgcaggagttcttagctcctcagcgagcaacagagagcactttagatggcacctttcaccacttggtcagaattttaaaagcttaggtttaggtgaaagtagatattgacagctattcacctttcacggtgctggggccagattagggatcactcccgtgaggagggccttcaccctgttctagaagcacatggttgtcctcctgttgttggcacattaaatgataaaaagcacctcatgagattcccttgatcagccctgcagctgtagtacagtgctgtgccctcacctccacccttcctgttgttcccacgtgggcaataccagggacccatggggaaactcaagaatgacagcttctatattttgtaattctggatgaaagataactgtgttgaacaaacaggtgctccaggctttgattatagatacgacttcaaaaatatgctaagacgcttgacttattaaggactttaacctactcaacagtatttcatatccattgtggttagttactcagttatgttgagaagaatctggagctaaaagcagagatgtttgaggtgacggtaggaatgtgagcaggatggtgatgggggtttttgttaaaatgcatctgagcaagtcagccagccccgaagtcccctcagtgtgtgtgtctcgagtggctacctgttgggcttgtgggcagtgattgtacagagcctgtccattgggtgcagtcatgtagatctgaagccctgaaaagcctcatgtctgcatcccctttccaaggctgcttccctggtgtgtctgttctctcctctgtcccaggtgctgggagcgtcctcttcagcgtcttttcctagagctggtcaccactaggctgtcactataaattccttgaatataagtaacagttattaatgaacttctaaatttctaatttctctctctctctctctttttttttttttttgttgttgttaaaaagggcctactacattggcgctattcttaggacttctgcaacttttaaagtcttacttgtctttcttgttgcttttgtattaggagttccccgtgtgggtctagaactcccctttggtaatgcttctttgtttttttatggcccttctgttctcaggatggagagaacacagaagctactatccatgtcaggatttattctatttatatcttattacaataaaattagtggcactttattcataaatattcatgagcctgttaattgttagttgtcttcctgtagctgaatcaacaagttattttcaactcaattttatgacttgcgaaaaagcttttgccctgttgtgtaccataacatttaaaagaatggaaaatgactgaaatccaatttagattatttttagagtatttttccagcaaattcaatttattctgaaatttaaatccagatcttttctaatatggtattacaatgaaaagaataaagagaagatttgaattttcagtttcattttcaaaaactatttaccaaaacaaatggagaagaaacatccaaaagcacatttcatttctccaaactttgtgttttaaattatagttataaattgtaaggtaattttaaattgtccctcgtattatttctccacgtctgttttagtttaatgtctcctaagcttttctctcatagcgtagacctagggaagggatgggaagattgcccagtccccgatggctgcgcacacaggaggcggcggagcacaaggcaagtgagtttgcactgtcagccccagaccgtaagcttggctacactgatgtttttctttactaaggatactattcaaaaattaacattttcatctcagtaagtttttagaacatcaaaatgttttctgagctccaagtggctaggttgtaaaagttttataataatttgcaattaaaatacatgatacatattaatccattaaagactagtgggaatgtatcagccagagtagcaagtaatttttgttttataaatcatagtatctgtcatcttgcagtattaccaatgctgttgtaaattgaatttaaagtggtattaaaaaaaactgttaaacaatttttatctgtttgtatatcttactatagattatgtacaagtaacatctaaataaaattacacttttaaccctaaaaggttttgcttattaataacag

SEQ ID NO: 451518 - DNA, 794 bp, Homo sapiens
aggcggcgtcgctcgcgccgctgcgtgcggtgtggtgcgaggcgggtgcgccgggcggccgcggcgcggcgggaccatggagctcagagcgcagccccggcgccggcggcgggaccgcggaccgttttagttttgattgctgttaactactactgataactgagccaaagtggtgatgctacttgaggggaatttctgcaacccatagtcaacgattacatgattgtgaaccatgcctttagtgaagaggaacattgagccccggcacttgtgccggggagctctgcctgaagggattaccagcgaacttgaatgtgtaaccaatagtactcttgccgctatcatacgccagctgagcagtctgagcaaacatgctgaagacatatttggtgagttgtttaatgaggctaacaacttctacatcagagcaaattctcttcaagacagaattgatcgccttgctgtcaaagtcacccagctggattcaacagtggaagaggtctcactacaggatatcaacatgaaaaaagctttcaaaagttccacagtccaagaccagcaagtggtttcaaagaacagcattcctaatcctgttgctgatatttacaaccagagtgataagccaccgcctctgaacatcctgacaccatacagagatgacaagaaggatgggctgaagttctatactgatccttcctatttctttgacctctggaaagaaaaaatgctacaggacacagaagacaaaaggaaagagaaaaggcgtcaaaaggtaaataatttcagtatgggaa

SEQ ID NO: 451519 - DNA, 5821 bp, Homo sapiens
aggttcaagtggagctctcctaaccgacgcgcgtctgtggagaagcggcttggtcgggggtggtctcgtggggtcctgcctgtttagtcgctttcagggttcttgagccccttcacgaccgtcaccatggaagtgtcaccattgcagcctgtaaatgaaaatatgcaagtcaacaaaataaagaaaaatgaagatgctaagaaaagactgtctgttgaaagaatctatcaaaagaaaacacaattggaacatattttgctccgcccagacacctacattggttctgtggaattagtgacccagcaaatgtgggtttacgatgaagatgttggcattaactatagggaagtcacttttgttcctggtttgtacaaaatctttgatgagattctagttaatgctgcggacaacaaacaaagggacccaaaaatgtcttgtattagagtcacaattgatccggaaaacaatttaattagtatatggaataatggaaaaggtattcctgttgttgaacacaaagttgaaaagatgtatgtcccagctctcatatttggacagctcctaacttctagtaactatgatgatgatgaaaagaaagtgacaggtggtcgaaatggctatggagccaaattgtgtaacatattcagtaccaaatttactgtggaaacagccagtagagaatacaagaaaatgttcaaacagacatggatggataatatgggaagagctggtgagatggaactcaagcccttcaatggagaagattatacatgtatcacctttcagcctgatttgtctaagtttaaaatgcaaagcctggacaaagatattgttgcactaatggtcagaagagcatatgatattgctggatccaccaaagatgtcaaagtctttcttaatggaaataaactgccagtaaaaggatttcgtagttatgtggacatgtatttgaaggacaagttggatgaaactggtaactccttgaaagtaatacatgaacaagtaaaccacaggtgggaagtgtgtttaactatgagtgaaaaaggctttcagcaaattagctttgtcaacagcattgctacatccaagggtggcagacatgttgattatgtagctgatcagattgtgactaaacttgttgatgttgtgaagaagaagaacaagggtggtgttgcagtaaaagcacatcaggtgaaaaatcacatgtggatttttgtaaatgccttaattgaaaacccaacctttgactctcagacaaaagaaaacatgactttacaacccaagagctttggatcaacatgccaattgagtgaaaaatttatcaaagctgccattggctgtggtattgtagaaagcatactaaactgggtgaagtttaaggcccaagtccagttaaacaagaagtgttcagctgtaaaacataatagaatcaagggaattcccaaactcgatgatgccaatgatgcagggggccgaaactccactgagtgtacgcttatcctgactgagggagattcagccaaaactttggctgtttcaggccttggtgtggttgggagagacaaatatggggttttccctcttagaggaaaaatactcaatgttcgagaagcttctcataagcagatcatggaaaatgctgagattaacaatatcatcaagattgtgggtcttcagtacaagaaaaactatgaagatgaagattcattgaagacgcttcgttatgggaagataatgattatgacagatcaggaccaagatggttcccacatcaaaggcttgctgattaattttatccatcacaactggccctctcttctgcgacatcgttttctggaggaatttatcactcccattgtaaaggtatctaaaaacaagcaagaaatggcattttacagccttcctgaatttgaagagtggaagagttctactccaaatcataaaaaatggaaagtcaaatattacaaaggtttgggcaccagcacatcaaaggaagctaaagaatactttgcagatatgaaaagacatcgtatccagttcaaatattctggtcctgaagatgatgctgctatcagcctggcctttagcaaaaaacagatagatgatcgaaaggaatggttaactaatttcatggaggatagaagacaacgaaagttacttgggcttcctgaggattacttgtatggacaaactaccacatatctgacatataatgacttcatcaacaaggaacttatcttgttctcaaattctgataacgagagatctatcccttctatggtggatggtttgaaaccaggtcagagaaaggttttgtttacttgcttcaaacggaatgacaagcgagaagtaaaggttgcccaattagctggatcagtggctgaaatgtcttcttatcatcatggtgagatgtcactaatgatgaccattatcaatttggctcagaattttgtgggtagcaataatctaaacctcttgcagcccattggtcagtttggtaccaggctacatggtggcaaggattctgctagtccacgatacatctttacaatgctcagctctttggctcgattgttatttccaccaaaagatgatcacacgttgaagtttttatatgatgacaaccagcgtgttgagcctgaatggtacattcctattattcccatggtgctgataaatggtgctgaaggaatcggtactgggtggtcctgcaaaatccccaactttgatgtgcgtgaaattgtaaataacatcaggcgtttgatggatggagaagaacctttgccaatgcttccaagttacaagaacttcaagggtactattgaagaactggctccaaatcaatatgtgattagtggtgaagtagctattcttaattctacaaccattgaaatctcagagcttcccgtcagaacatggacccagacatacaaagaacaagttctagaacccatgttgaatggcaccgagaagacacctcctctcataacagactatagggaataccatacagataccactgtgaaatttgttgtgaagatgactgaagaaaaactggcagaggcagagagagttggactacacaaagtcttcaaactccaaactagtctcacatgcaactctatggtgctttttgaccacgtaggctgtttaaagaaatatgacacggtgttggatattctaagagacttttttgaactcagacttaaatattatggattaagaaaagaatggctcctaggaatgcttggtgctgaatctgctaaactgaataatcaggctcgctttatcttagagaaaatagatggcaaaataatcattgaaaataagcctaagaaagaattaattaaagttctgattcagaggggatatgattcggatcctgtgaaggcctggaaagaagcccagcaaaaggttccagatgaagaagaaaatgaagagagtgacaacgaaaaggaaactgaaaagagtgactccgtaacagattctggaccaaccttcaactatcttcttgatatgcccctttggtatttaaccaaggaaaagaaagatgaactctgcaggctaagaaatgaaaaagaacaagagctggacacattaaaaagaaagagtccatcagatttgtggaaagaagacttggctacatttattgaagaattggaggctgttgaagccaaggaaaaacaagatgaacaagtcggacttcctgggaaaggggggaaggccaaggggaaaaaaacacaaatggctgaagttttgccttctccgcgtggtcaaagagtcattccacgaataaccatagaaatgaaagcagaggcagaaaagaaaaataaaaagaaaattaagaatgaaaatactgaaggaagccctcaagaagatggtgtggaactagaaggcctaaaacaaagattagaaaagaaacagaaaagagaaccaggtacaaagacaaagaaacaaactacattggcatttaagccaatcaaaaaaggaaagaagagaaatccctggtctgattcagaatcagataggagcagtgacgaaagtaattttgatgtccctccacgagaaacagagccacggagagcagcaacaaaaacaaaattcacaatggatttggattcagatgaagatttctcagattttgatgaaaaaactgatgatgaagattttgtcccatcagatgctagtccacctaagaccaaaacttccccaaaacttagtaacaaagaactgaaaccacagaaaagtgtcgtgtcagaccttgaagctgatgatgttaagggcagtgtaccactgtcttcaagccctcctgctacacatttcccagatgaaactgaaattacaaacccagttcctaaaaagaatgtgacagtgaagaagacagcagcaaaaagtcagtcttccacctccactaccggtgccaaaaaaagggctgccccaaaaggaactaaaagggatccagctttgaattctggtgtctctcaaaagcctgatcctgccaaaaccaagaatcgccgcaaaaggaagccatccacttctgatgattctgactctaattttgagaaaattgtttcgaaagcagtcacaagcaagaaatccaagggggagagtgatgacttccatatggactttgactcagctgtggctcctcgggcaaaatctgtacgggcaaagaaacctataaagtacctggaagagtcagatgaagatgatctgttttaaaatgtgaggcgattattttaagtaattatcttaccaagcccaagactggttttaaagttacctgaagctcttaacttcctcccctctgaatttagtttggggaaggtgtttttagtacaagacatcaaagtgaagtaaagcccaagtgttctttagctttttataatactgtctaaatagtgaccatctcatgggcattgttttcttctctgctttgtctgtgttttgagtctgctttcttttgtctttaaaacctgatttttaagttcttctgaactgtagaaatagctatctgatcacttcagcgtaaagcagtgtgtttattaaccatccactaagctaaaactagagcagtttgatttaaaagtgtcactcttcctccttttctactttcagtagatatgagatagagcataattatctgttttatcttagttttatacataatttaccatcagatagaactttatggttctagtacagatactctactacactcagcctcttatgtgccaagtttttctttaagcaatgagaaattgctcatgttcttcatcttctcaaatcatcagaggccgaagaaaaacactttggctgtgtctataacttgacacagtcaatagaatgaagaaaattagagtagttatgtgattatttcagctcttgacctgtcccctctggctgcctctgagtctgaatctcccaaagagagaaaccaatttctaagaggactggattgcagaagactcggggacaacatttgatccaagatcttaaatgttatattgataaccatgctcagcaatgagctattagattcattttgggaaatctccataatttcaatttgtaaactttgttaagacctgtctacattgttatatgtgtgtgacttgagtaatgttatcaacgtttttgtaaatatttactatgtttttctattagctaaattccaacaattttgtactttaataaaatgttctaaacattgcaaaaaaaaaaaaggggggggtaaaaaacccgaggggcaagttaggtaccagttttggcaaagggccaaagggggaaaaaaaagaggggggtaaaagggggaagtggt

SEQ ID NO: 451520 - DNA, 5717 bp, Homo sapiens
aggttcaagtggagctctcctaaccgacgcgcgtctgtggagaagcggcttggtcgggggtggtctcgtggggtcctgcctgtttagtcgctttcagggttcttgagccccttcacgaccgtcaccatggaagtgtcaccattgcagcctgtaaatgaaaatatgcaagtcaacaaaataaagaaaaatgaagatgctaagaaaagactgtctgttgaaagaatctatcaaaagaaaacacaattggaacatattttgctccgcccagacacctacattggttctgtggaattagtgacccagcaaatgtgggtttacgatgaagatgttggcattaactatagggaagtcacttttgttcctggtttgtacaaaatctttgatgagattctagttaatgctgcggacaacaaacaaagggacccaaaaatgtcttgtattagagtcacaattgatccggaaaacaatttaattagtatatggaataatggaaaaggtattcctgttgttgaacacaaagttgaaaagatgtatgtcccagctctcatatttggacagctcctaacttctagtaactatgatgatgatgaaaagaaagtgacaggtggtcgaaatggctatggagccaaattgtgtaacatattcagtaccaaatttactgtggaaacagccagtagagaatacaagaaaatgttcaaacagacatggatggataatatgggaagagctggtgagatggaactcaagcccttcaatggagaagattatacatgtatcacctttcagcctgatttgtctaagtttaaaatgcaaagcctggacaaagatattgttgcactaatggtcagaagagcatatgatattgctggatccaccaaagatgtcaaagtctttcttaatggaaataaactgccagtaaaaggatttcgtagttatgtggacatgtatttgaaggacaagttggatgaaactggtaactccttgaaagtaatacatgaacaagtaaaccacaggtgggaagtgtgtttaactatgagtgaaaaaggctttcagcaaattagctttgtcaacagcattgctacatccaagggtggcagacatgttgattatgtagctgatcagattgtgactaaacttgttgatgttgtgaagaagaagaacaagggtggtgttgcagtaaaagcacatcaggtgaaaaatcacatgtggatttttgtaaatgccttaattgaaaacccaacctttgactctcagacaaaagaaaacatgactttacaacccaagagctttggatcaacatgccaattgagtgaaaaatttatcaaagctgccattggctgtggtattgtagaaagcatactaaactgggtgaagtttaaggcccaagtccagttaaacaagaagtgttcagctgtaaaacataatagaatcaagggaattcccaaactcgatgatgccaatgatgcagggggccgaaactccactgagtgtacgcttatcctgactgagggagattcagccaaaactttggctgtttcaggccttggtgtggttgggagagacaaatatggggttttccctcttagaggaaaaatactcaatgttcgagaagcttctcataagcagatcatggaaaatgctgagattaacaatatcatcaagattgtgggtcttcagtacaagaaaaactatgaagatgaagattcattgaagacgcttcgttatgggaagataatgattatgacagatcaggaccaagatggttcccacatcaaaggcttgctgattaattttatccatcacaactggccctctcttctgcgacatcgttttctggaggaatttatcactcccattgtaaaggtatctaaaaacaagcaagaaatggcattttacagccttcctgaatttgaagagtggaagagttctactccaaatcataaaaaatggaaagtcaaatattacaaaggtttgggcaccagcacatcaaaggaagctaaagaatactttgcagatatgaaaagacatcgtatccagttcaaatattctggtcctgaagatgatgctgctatcagcctggcctttagcaaaaaacagatagatgatcgaaaggaatggttaactaatttcatggaggatagaagacaacgaaagttacttgggcttcctgaggattacttgtatggacaaactaccacatatctgacatataatgacttcatcaacaaggaacttatcttgttctcaaattctgataacgagagatctatcccttctatggtggatggtttgaaaccaggtcagagaaaggttttgtttacttgcttcaaacggaatgacaagcgagaagtaaaggttgcccaattagctggatcagtggctgaaatgtcttcttatcatcatggtgagatgtcactaatgatgaccattatcaatttggctcagaattttgtgggtagcaataatctaaacctcttgcagcccattggtcagtttggtaccaggctacatggtggcaaggattctgctagtccacgatacatctttacaatgctcagctctttggctcgattgttatttccaccaaaagatgatcacacgttgaagtttttatatgatgacaaccagcgtgttgagcctgaatggtacattcctattattcccatggtgctgataaatggtgctgaaggaatcggtactgggtggtcctgcaaaatccccaactttgatgtgcgtgaaattgtaaataacatcaggcgtttgatggatggagaagaacctttgccaatgcttccaagttacaagaacttcaagggtactattgaagaactggctccaaatcaatatgtgattagtggtgaagtagctattcttaattctacaaccattgaaatctcagagcttcccgtcagaacatggacccagacatacaaagaacaagttctagaacccatgttgaatggcaccgagaagacacctcctctcataacagactatagggaataccatacagataccactgtgaaatttgttgtgaagatgactgaagaaaaactggcagaggcagagagagttggactacacaaagtcttcaaactccaaactagtctcacatgcaactctatggtgctttttgaccacgtaggctgtttaaagaaatatgacacggtgttggatattctaagagacttttttgaactcagacttaaatattatggattaagaaaagaatggctcctaggaatgcttggtgctgaatctgctaaactgaataatcaggctcgctttatcttagagaaaatagatggcaaaataatcattgaaaataagcctaagaaagaattaattaaagttctgattcagaggggatatgattcggatcctgtgaaggcctggaaagaagcccagcaaaaggttccagatgaagaagaaaatgaagagagtgacaacgaaaaggaaactgaaaagagtgactccgtaacagattctggaccaaccttcaactatcttcttgatatgcccctttggtatttaaccaaggaaaagaaagatgaactctgcaggctaagaaatgaaaaagaacaagagctggacacattaaaaagaaagagtccatcagatttgtggaaagaagacttggctacatttattgaagaattggaggctgttgaagccaaggaaaaacaagatgaacaagtcggacttcctgggaaaggggggaaggccaaggggaaaaaaacacaaatggctgaagttttgccttctccgcgtggtcaaagagtcattccacgaataaccatagaaatgaaagcagaggcagaaaagaaaaataaaaagaaaattaagaatgaaaatactgaaggaagccctcaagaagatggtgtggaactagaaggcctaaaacaaagattagaaaagaaacagaaaagagaaccaggtacaaagacaaagaaacaaactacattggcatttaagccaatcaaaaaaggaaagaagagaaatccctggtctgattcagaatcagataggagcagtgacgaaagtaattttgatgtccctccacgagaaacagagccacggagagcagcaacaaaaacaaaattcacaatggatttggattcagatgaagatttctcagattttgatgaaaaaactgatgatgaagattttgtcccatcagatgctagtccacctaagaccaaaacttccccaaaacttagtaacaaagaactgaaaccacagaaaagtgtcgtgtcagaccttgaagctgatgatgttaagggcagtgtaccactgtcttcaagccctcctgctacacatttcccagatgaaactgaaattacaaacccagttcctaaaaagaatgtgacagtgaagaagacagcagcaaaaagtcagtcttccacctccactaccggtgccaaaaaaagggctgccccaaaaggaactaaaagggatccagctttgaattctggtgtctctcaaaagcctgatcctgccaaaaccaagaatcgccgcaaaaggaagccatccacttctgatgattctgactctaattttgagaaaattgtttcgaaagcagtcacaagcaagaaatccaagggggagagtgatgacttccatatggactttgactcagctgtggctcctcgggcaaaatctgtacgggcaaagaaacctataaagtacctggaagagtcagatgaagatgatctgttttaaaatgtgaggcgattattttaagtaattatcttaccaagcccaagactggttttaaagttacctgaagctcttaacttcctcccctctgaatttagtttggggaaggtgtttttagtacaagacatcaaagtgaagtaaagcccaagtgttctttagctttttataatactgtctaaatagtgaccatctcatgggcattgttttcttctctgctttgtctgtgttttgagtctgctttcttttgtctttaaaacctgatttttaagttcttctgaactgtagaaatagctatctgatcacttcagcgtaaagcagtgtgtttattaaccatccactaagctaaaactagagcagtttgatttaaaagtgtcactcttcctccttttctactttcagtagatatgagatagagcataattatctgttttatcttagttttatacataatttaccatcagatagaactttatggttctagtacagatactctactacactcagcctcttatgtgccaagtttttctttaagcaatgagaaattgctcatgttcttcatcttctcaaatcatcagaggccgaagaaaaacactttggctgtgtctataacttgacacagtcaatagaatgaagaaaattagagtagttatgtgattatttcagctcttgacctgtcccctctggctgcctctgagtgtggggggggggggggggagaggggggggtggggggggggggggttgcagaacactcttttttaatatttgatccaagatcttaaatgttatattgataaccatgctcagcaatgagctattagattcattttgggaaatctccataatttcaatttgtaaactttgttaagacctgtctacattgttatatgtgtgtgacttgagtaatgttatcaacgtttttgtaaatatttactatgtttttctattagctaaattccaacaattttgtactttaataaaatgttctaaacattgcaa

SEQ ID NO: 451521 - DNA, 5792 bp, Homo sapiens
aggttcaagtggagctctcctaaccgacgcgcgtctgtggagaagcggcttggtcgggggtggtctcgtggggtcctgcctgtttagtcgctttcagggttcttgagccccttcacgaccgtcaccatggaagtgtcaccattgcagcctgtaaatgaaaatatgcaagtcaacaaaataaagaaaaatgaagatgctaagaaaagactgtctgttgaaagaatctatcaaaagaaaacacaattggaacatattttgctccgcccagacacctacattggttctgtggaattagtgacccagcaaatgtgggtttacgatgaagatgttggcattaactatagggaagtcacttttgttcctggtttgtacaaaatctttgatgagattctagttaatgctgcggacaacaaacaaagggacccaaaaatgtcttgtattagagtcacaattgatccggaaaacaatttaattagtatatggaataatggaaaaggtattcctgttgttgaacacaaagttgaaaagatgtatgtcccagctctcatatttggacagctcctaacttctagtaactatgatgatgatgaaaagaaagtgacaggtggtcgaaatggctatggagccaaattgtgtaacatattcagtaccaaatttactgtggaaacagccagtagagaatacaagaaaatgttcaaacagacatggatggataatatgggaagagctggtgagatggaactcaagcccttcaatggagaagattatacatgtatcacctttcagcctgatttgtctaagtttaaaatgcaaagcctggacaaagatattgttgcactaatggtcagaagagcatatgatattgctggatccaccaaagatgtcaaagtctttcttaatggaaataaactgccagtaaaaggatttcgtagttatgtggacatgtatttgaaggacaagttggatgaaactggtaactccttgaaagtaatacatgaacaagtaaaccacaggtgggaagtgtgtttaactatgagtgaaaaaggctttcagcaaattagctttgtcaacagcattgctacatccaagggtggcagacatgttgattatgtagctgatcagattgtgactaaacttgttgatgttgtgaagaagaagaacaagggtggtgttgcagtaaaagcacatcaggtgaaaaatcacatgtggatttttgtaaatgccttaattgaaaacccaacctttgactctcagacaaaagaaaacatgactttacaacccaagagctttggatcaacatgccaattgagtgaaaaatttatcaaagctgctcatttgtattctagatttctgatagatcccttcttccctaatatgatccctaatatgatcttctcgttttcaggccattggctgtggtattgtagaaagcatactaaactgggtgaagtttaaggcccaagtccagttaaacaagaagtgttcagctgtaaaacataatagaatcaagggaattcccaaactcgatgatgccaatgatgcagggggccgaaactccactgagtgtacgcttatcctgactgagggagattcagccaaaactttggctgtttcaggccttggtgtggttgggagagacaaatatggggttttccctcttagaggaaaaatactcaatgttcgagaagcttctcataagcagatcatggaaaatgctgagattaacaatatcatcaagattgtgggtcttcagtacaagaaaaactatgaagatgaagattcattgaagacgcttcgttatgggaagataatgattatgacagatcaggaccaagatggttcccacatcaaaggcttgctgattaattttatccatcacaactggccctctcttctgcgacatcgttttctggaggaatttatcactcccattgtaaaggtatctaaaaacaagcaagaaatggcattttacagccttcctgaatttgaagagtggaagagttctactccaaatcataaaaaatggaaagtcaaatattacaaaggtttgggcaccagcacatcaaaggaagctaaagaatactttgcagatatgaaaagacatcgtatccagttcaaatattctggtcctgaagatgatgctgctatcagcctggcctttagcaaaaaacagatagatgatcgaaaggaatggttaactaatttcatggaggatagaagacaacgaaagttacttgggcttcctgaggattacttgtatggacaaactaccacatatctgacatataatgacttcatcaacaaggaacttatcttgttctcaaattctgataacgagagatctatcccttctatggtggatggtttgaaaccaggtcagagaaaggttttgtttacttgcttcaaacggaatgacaagcgagaagtaaaggttgcccaattagctggatcagtggctgaaatgtcttcttatcatcatggtgagatgtcactaatgatgaccattatcaatttggctcagaattttgtgggtagcaataatctaaacctcttgcagcccattggtcagtttggtaccaggctacatggtggcaaggattctgctagtccacgatacatctttacaatgctcagctctttggctcgattgttatttccaccaaaagatgatcacacgttgaagtttttatatgatgacaaccagcgtgttgagcctgaatggtacattcctattattcccatggtgctgataaatggtgctgaaggaatcggtactgggtggtcctgcaaaatccccaactttgatgtgcgtgaaattgtaaataacatcaggcgtttgatggatggagaagaacctttgccaatgcttccaagttacaagaacttcaagggtactattgaagaactggctccaaatcaatatgtgattagtggtgaagtagctattcttaattctacaaccattgaaatctcagagcttcccgtcagaacatggacccagacatacaaagaacaagttctagaacccatgttgaatggcaccgagaagacacctcctctcataacagactatagggaataccatacagataccactgtgaaatttgttgtgaagatgactgaagaaaaactggcagaggcagagagagttggactacacaaagtcttcaaactccaaactagtctcacatgcaactctatggtgctttttgaccacgtaggctgtttaaagaaatatgacacggtgttggatattctaagagacttttttgaactcagacttaaatattatggattaagaaaagaatggctcctaggaatgcttggtgctgaatctgctaaactgaataatcaggctcgctttatcttagagaaaatagatggcaaaataatcattgaaaataagcctaagaaagaattaattaaagttctgattcagaggggatatgattcggatcctgtgaaggcctggaaagaagcccagcaaaaggttccagatgaagaagaaaatgaagagagtgacaacgaaaaggaaactgaaaagagtgactccgtaacagattctggaccaaccttcaactatcttcttgatatgcccctttggtatttaaccaaggaaaagaaagatgaactctgcaggctaagaaatgaaaaagaacaagagctggacacattaaaaagaaagagtccatcagatttgtggaaagaagacttggctacatttattgaagaattggaggctgttgaagccaaggaaaaacaagatgaacaagtcggacttcctgggaaaggggggaaggccaaggggaaaaaaacacaaatggctgaagttttgccttctccgcgtggtcaaagagtcattccacgaataaccatagaaatgaaagcagaggcagaaaagaaaaataaaaagaaaattaagaatgaaaatactgaaggaagccctcaagaagatggtgtggaactagaaggcctaaaacaaagattagaaaagaaacagaaaagagaaccaggtacaaagacaaagaaacaaactacattggcatttaagccaatcaaaaaaggaaagaagagaaatccctggtctgattcagaatcagataggagcagtgacgaaagtaattttgatgtccctccacgagaaacagagccacggagagcagcaacaaaaacaaaattcacaatggatttggattcagatgaagatttctcagattttgatgaaaaaactgatgatgaagattttgtcccatcagatgctagtccacctaagaccaaaacttccccaaaacttagtaacaaagaactgaaaccacagaaaagtgtcgtgtcagaccttgaagctgatgatgttaagggcagtgtaccactgtcttcaagccctcctgctacacatttcccagatgaaactgaaattacaaacccagttcctaaaaagaatgtgacagtgaagaagacagcagcaaaaagtcagtcttccacctccactaccggtgccaaaaaaagggctgccccaaaaggaactaaaagggatccagctttgaattctggtgtctctcaaaagcctgatcctgccaaaaccaagaatcgccgcaaaaggaagccatccacttctgatgattctgactctaattttgagaaaattgtttcgaaagcagtcacaagcaagaaatccaagggggagagtgatgacttccatatggactttgactcagctgtggctcctcgggcaaaatctgtacgggcaaagaaacctataaagtacctggaagagtcagatgaagatgatctgttttaaaatgtgaggcgattattttaagtaattatcttaccaagcccaagactggttttaaagttacctgaagctcttaacttcctcccctctgaatttagtttggggaaggtgtttttagtacaagacatcaaagtgaagtaaagcccaagtgttctttagctttttataatactgtctaaatagtgaccatctcatgggcattgttttcttctctgctttgtctgtgttttgagtctgctttcttttgtctttaaaacctgatttttaagttcttctgaactgtagaaatagctatctgatcacttcagcgtaaagcagtgtgtttattaaccatccactaagctaaaactagagcagtttgatttaaaagtgtcactcttcctccttttctactttcagtagatatgagatagagcataattatctgttttatcttagttttatacataatttaccatcagatagaactttatggttctagtacagatactctactacactcagcctcttatgtgccaagtttttctttaagcaatgagaaattgctcatgttcttcatcttctcaaatcatcagaggccgaagaaaaacactttggctgtgtctataacttgacacagtcaatagaatgaagaaaattagagtagttatgtgattatttcagctcttgacctgtcccctctggctgcctctgagtctgaatctcccaaagagagaaaccaatttctaagaggactggattgcagaagactcggggacaacatttgatccaagatcttaaatgttatattgataaccatgctcagcaatgagctattagattcattttgggaaatctccataatttcaatttgtaaactttgttaagacctgtctacattgttatatgtgtgtgacttgagtaatgttatcaacgtttttgtaaatatttactatgtttttctattagctaaattccaacaattttgtactttaataaaatgttctaaacattgcaa

SEQ ID NO: 451522 - DNA, 5716 bp, Homo sapiens
ggcccgggcatctctctggccgcccgtgacgggtgaagctctggggctgcggtcaggccggcgaccggcttgggagcccatattctccattcccggttccggggtgatcgtggagaggcggaagccccttctggtgctagtagtgaacctgtaaatgaaaatatgcaagtcaacaaaataaagaaaaatgaagatgctaagaaaagactgtctgttgaaagaatctatcaaaagaaaacacaattggaacatattttgctccgcccagacacctacattggttctgtggaattagtgacccagcaaatgtgggtttacgatgaagatgttggcattaactatagggaagtcacttttgttcctggtttgtacaaaatctttgatgagattctagttaatgctgcggacaacaaacaaagggacccaaaaatgtcttgtattagagtcacaattgatccggaaaacaatttaattagtatatggaataatggaaaaggtattcctgttgttgaacacaaagttgaaaagatgtatgtcccagctctcatatttggacagctcctaacttctagtaactatgatgatgatgaaaagaaagtgacaggtggtcgaaatggctatggagccaaattgtgtaacatattcagtaccaaatttactgtggaaacagccagtagagaatacaagaaaatgttcaaacagacatggatggataatatgggaagagctggtgagatggaactcaagcccttcaatggagaagattatacatgtatcacctttcagcctgatttgtctaagtttaaaatgcaaagcctggacaaagatattgttgcactaatggtcagaagagcatatgatattgctggatccaccaaagatgtcaaagtctttcttaatggaaataaactgccagtaaaaggatttcgtagttatgtggacatgtatttgaaggacaagttggatgaaactggtaactccttgaaagtaatacatgaacaagtaaaccacaggtgggaagtgtgtttaactatgagtgaaaaaggctttcagcaaattagctttgtcaacagcattgctacatccaagggtggcagacatgttgattatgtagctgatcagattgtgactaaacttgttgatgttgtgaagaagaagaacaagggtggtgttgcagtaaaagcacatcaggtgaaaaatcacatgtggatttttgtaaatgccttaattgaaaacccaacctttgactctcagacaaaagaaaacatgactttacaacccaagagctttggatcaacatgccaattgagtgaaaaatttatcaaagctgccattggctgtggtattgtagaaagcatactaaactgggtgaagtttaaggcccaagtccagttaaacaagaagtgttcagctgtaaaacataatagaatcaagggaattcccaaactcgatgatgccaatgatgcagggggccgaaactccactgagtgtacgcttatcctgactgagggagattcagccaaaactttggctgtttcaggccttggtgtggttgggagagacaaatatggggttttccctcttagaggaaaaatactcaatgttcgagaagcttctcataagcagatcatggaaaatgctgagattaacaatatcatcaagattgtgggtcttcagtacaagaaaaactatgaagatgaagattcattgaagacgcttcgttatgggaagataatgattatgacagatcaggaccaagatggttcccacatcaaaggcttgctgattaattttatccatcacaactggccctctcttctgcgacatcgttttctggaggaatttatcactcccattgtaaaggtatctaaaaacaagcaagaaatggcattttacagccttcctgaatttgaagagtggaagagttctactccaaatcataaaaaatggaaagtcaaatattacaaaggtttgggcaccagcacatcaaaggaagctaaagaatactttgcagatatgaaaagacatcgtatccagttcaaatattctggtcctgaagatgatgctgctatcagcctggcctttagcaaaaaacagatagatgatcgaaaggaatggttaactaatttcatggaggatagaagacaacgaaagttacttgggcttcctgaggattacttgtatggacaaactaccacatatctgacatataatgacttcatcaacaaggaacttatcttgttctcaaattctgataacgagagatctatcccttctatggtggatggtttgaaaccaggtcagagaaaggttttgtttacttgcttcaaacggaatgacaagcgagaagtaaaggttgcccaattagctggatcagtggctgaaatgtcttcttatcatcatggtgagatgtcactaatgatgaccattatcaatttggctcagaattttgtgggtagcaataatctaaacctcttgcagcccattggtcagtttggtaccaggctacatggtggcaaggattctgctagtccacgatacatctttacaatgctcagctctttggctcgattgttatttccaccaaaagatgatcacacgttgaagtttttatatgatgacaaccagcgtgttgagcctgaatggtacattcctattattcccatggtgctgataaatggtgctgaaggaatcggtactgggtggtcctgcaaaatccccaactttgatgtgcgtgaaattgtaaataacatcaggcgtttgatggatggagaagaacctttgccaatgcttccaagttacaagaacttcaagggtactattgaagaactggctccaaatcaatatgtgattagtggtgaagtagctattcttaattctacaaccattgaaatctcagagcttcccgtcagaacatggacccagacatacaaagaacaagttctagaacccatgttgaatggcaccgagaagacacctcctctcataacagactatagggaataccatacagataccactgtgaaatttgttgtgaagatgactgaagaaaaactggcagaggcagagagagttggactacacaaagtcttcaaactccaaactagtctcacatgcaactctatggtgctttttgaccacgtaggctgtttaaagaaatatgacacggtgttggatattctaagagacttttttgaactcagacttaaatattatggattaagaaaagaatggctcctaggaatgcttggtgctgaatctgctaaactgaataatcaggctcgctttatcttagagaaaatagatggcaaaataatcattgaaaataagcctaagaaagaattaattaaagttctgattcagaggggatatgattcggatcctgtgaaggcctggaaagaagcccagcaaaaggttccagatgaagaagaaaatgaagagagtgacaacgaaaaggaaactgaaaagagtgactccgtaacagattctggaccaaccttcaactatcttcttgatatgcccctttggtatttaaccaaggaaaagaaagatgaactctgcaggctaagaaatgaaaaagaacaagagctggacacattaaaaagaaagagtccatcagatttgtggaaagaagacttggctacatttattgaagaattggaggctgttgaagccaaggaaaaacaagatgaacaagtcggacttcctgggaaaggggggaaggccaaggggaaaaaaacacaaatggctgaagttttgccttctccgcgtggtcaaagagtcattccacgaataaccatagaaatgaaagcagaggcagaaaagaaaaataaaaagaaaattaagaatgaaaatactgaaggaagccctcaagaagatggtgtggaactagaaggcctaaaacaaagattagaaaagaaacagaaaagagaaccaggtacaaagacaaagaaacaaactacattggcatttaagccaatcaaaaaaggaaagaagagaaatccctggtctgattcagaatcagataggagcagtgacgaaagtaattttgatgtccctccacgagaaacagagccacggagagcagcaacaaaaacaaaattcacaatggatttggattcagatgaagatttctcagattttgatgaaaaaactgatgatgaagattttgtcccatcagatgctagtccacctaagaccaaaacttccccaaaacttagtaacaaagaactgaaaccacagaaaagtgtcgtgtcagaccttgaagctgatgatgttaagggcagtgtaccactgtcttcaagccctcctgctacacatttcccagatgaaactgaaattacaaacccagttcctaaaaagaatgtgacagtgaagaagacagcagcaaaaagtcagtcttccacctccactaccggtgccaaaaaaagggctgccccaaaaggaactaaaagggatccagctttgaattctggtgtctctcaaaagcctgatcctgccaaaaccaagaatcgccgcaaaaggaagccatccacttctgatgattctgactctaattttgagaaaattgtttcgaaagcagtcacaagcaagaaatccaagggggagagtgatgacttccatatggactttgactcagctgtggctcctcgggcaaaatctgtacgggcaaagaaacctataaagtacctggaagagtcagatgaagatgatctgttttaaaatgtgaggcgattattttaagtaattatcttaccaagcccaagactggttttaaagttacctgaagctcttaacttcctcccctctgaatttagtttggggaaggtgtttttagtacaagacatcaaagtgaagtaaagcccaagtgttctttagctttttataatactgtctaaatagtgaccatctcatgggcattgttttcttctctgctttgtctgtgttttgagtctgctttcttttgtctttaaaacctgatttttaagttcttctgaactgtagaaatagctatctgatcacttcagcgtaaagcagtgtgtttattaaccatccactaagctaaaactagagcagtttgatttaaaagtgtcactcttcctccttttctactttcagtagatatgagatagagcataattatctgttttatcttagttttatacataatttaccatcagatagaactttatggttctagtacagatactctactacactcagcctcttatgtgccaagtttttctttaagcaatgagaaattgctcatgttcttcatcttctcaaatcatcagaggccgaagaaaaacactttggctgtgtctataacttgacacagtcaatagaatgaagaaaattagagtagttatgtgattatttcagctcttgacctgtcccctctggctgcctctgagtctgaatctcccaaagagagaaaccaatttctaagaggactggattgcagaagactcggggacaacatttgatccaagatcttaaatgttatattgataaccatgctcagcaatgagctattagattcattttgggaaatctccataatttcaatttgtaaactttgttaagacctgtctacattgttatatgtgtgtgacttgagtaatgttatcaacgtttttgtaaatatttactatgtttttctattagctaaattccaacaattttgtactttaataaaatgttctaaacattgcaa

SEQ ID NO: 451523 - DNA, 4603 bp, Homo sapiens
taatgtttccaaacttttaagtcttatagttgttattttattcattaatggcataccacggatatttatttttcccttgacagaataactatattcaacagaataacttgttaaaaatcggcccgtttcctattatggaagatttaggtcatttccatgttataaataatattgaggtgattattttggagtataaaacaagaatgtttatattatgatctattacctaacaaataattttgctcattatatagtaaattgtgttttatcacaaggctataaacagcatgttcaagttagtatatttgaggttgaactaaatgtgctaatattaatatgtatatttttattttagggggccgaaactccactgagtgtacgcttatcctgactgagggagattcagccaaaactttggctgtttcaggccttggtgtggttgggagagacaaatatggggttttccctcttagaggaaaaatactcaatgttcgagaagcttctcataagcagatcatggaaaatgctgagattaacaatatcatcaagattgtgggtcttcagtacaagaaaaactatgaagatgaagattcattgaagacgcttcgttatgggaagataatgattatgacagatcaggaccaagatggttcccacatcaaaggcttgctgattaattttatccatcacaactggccctctcttctgcgacatcgttttctggaggaatttatcactcccattgtaaaggtatctaaaaacaagcaagaaatggcattttacagccttcctgaatttgaagagtggaagagttctactccaaatcataaaaaatggaaagtcaaatattacaaaggtttgggcaccagcacatcaaaggaagctaaagaatactttgcagatatgaaaagacatcgtatccagttcaaatattctggtcctgaagatgatgctgctatcagcctggcctttagcaaaaaacagatagatgatcgaaaggaatggttaactaatttcatggaggatagaagacaacgaaagttacttgggcttcctgaggattacttgtatggacaaactaccacatatctgacatataatgacttcatcaacaaggaacttatcttgttctcaaattctgataacgagagatctatcccttctatggtggatggtttgaaaccaggtcagagaaaggttttgtttacttgcttcaaacggaatgacaagcgagaagtaaaggttgcccaattagctggatcagtggctgaaatgtcttcttatcatcatggtgagatgtcactaatgatgaccattatcaatttggctcagaattttgtgggtagcaataatctaaacctcttgcagcccattggtcagtttggtaccaggctacatggtggcaaggattctgctagtccacgatacatctttacaatgctcagctctttggctcgattgttatttccaccaaaagatgatcacacgttgaagtttttatatgatgacaaccagcgtgttgagcctgaatggtacattcctattattcccatggtgctgataaatggtgctgaaggaatcggtactgggtggtcctgcaaaatccccaactttgatgtgcgtgaaattgtaaataacatcaggcgtttgatggatggagaagaacctttgccaatgcttccaagttacaagaacttcaagggtactattgaagaactggctccaaatcaatatgtgattagtggtgaagtagctattcttaattctacaaccattgaaatctcagagcttcccgtcagaacatggacccagacatacaaagaacaagttctagaacccatgttgaatggcaccgagaagacacctcctctcataacagactatagggaataccatacagataccactgtgaaatttgttgtgaagatgactgaagaaaaactggcagaggcagagagagttggactacacaaagtcttcaaactccaaactagtctcacatgcaactctatggtgctttttgaccacgtaggctgtttaaagaaatatgacacggtgttggatattctaagagacttttttgaactcagacttaaatattatggattaagaaaagaatggctcctaggaatgcttggtgctgaatctgctaaactgaataatcaggctcgctttatcttagagaaaatagatggcaaaataatcattgaaaataagcctaagaaagaattaattaaagttctgattcagaggggatatgattcggatcctgtgaaggcctggaaagaagcccagcaaaaggttccagatgaagaagaaaatgaagagagtgacaacgaaaaggaaactgaaaagagtgactccgtaacagattctggaccaaccttcaactatcttcttgatatgcccctttggtatttaaccaaggaaaagaaagatgaactctgcaggctaagaaatgaaaaagaacaagagctggacacattaaaaagaaagagtccatcagatttgtggaaagaagacttggctacatttattgaagaattggaggctgttgaagccaaggaaaaacaagatgaacaagtcggacttcctgggaaaggggggaaggccaaggggaaaaaaacacaaatggctgaagttttgccttctccgcgtggtcaaagagtcattccacgaataaccatagaaatgaaagcagaggcagaaaagaaaaataaaaagaaaattaagaatgaaaatactgaaggaagccctcaagaagatggtgtggaactagaaggcctaaaacaaagattagaaaagaaacagaaaagagaaccaggtacaaagacaaagaaacaaactacattggcatttaagccaatcaaaaaaggaaagaagagaaatccctggtctgattcagaatcagataggagcagtgacgaaagtaattttgatgtccctccacgagaaacagagccacggagagcagcaacaaaaacaaaattcacaatggatttggattcagatgaagatttctcagattttgatgaaaaaactgatgatgaagattttgtcccatcagatgctagtccacctaagaccaaaacttccccaaaacttagtaacaaagaactgaaaccacagaaaagtgtcgtgtcagaccttgaagctgatgatgttaagggcagtgtaccactgtcttcaagccctcctgctacacatttcccagatgaaactgaaattacaaacccagttcctaaaaagaatgtgacagtgaagaagacagcagcaaaaagtcagtcttccacctccactaccggtgccaaaaaaagggctgccccaaaaggaactaaaagggatccagctttgaattctggtgtctctcaaaagcctgatcctgccaaaaccaagaatcgccgcaaaaggaagccatccacttctgatgattctgactctaattttgagaaaattgtttcgaaagcagtcacaagcaagaaatccaagggggagagtgatgacttccatatggactttgactcagctgtggctcctcgggcaaaatctgtacgggcaaagaaacctataaagtacctggaagagtcagatgaagatgatctgttttaaaatgtgaggcgattattttaagtaattatcttaccaagcccaagactggttttaaagttacctgaagctcttaacttcctcccctctgaatttagtttggggaaggtgtttttagtacaagacatcaaagtgaagtaaagcccaagtgttctttagctttttataatactgtctaaatagtgaccatctcatgggcattgttttcttctctgctttgtctgtgttttgagtctgctttcttttgtctttaaaacctgatttttaagttcttctgaactgtagaaatagctatctgatcacttcagcgtaaagcagtgtgtttattaaccatccactaagctaaaactagagcagtttgatttaaaagtgtcactcttcctccttttctactttcagtagatatgagatagagcataattatctgttttatcttagttttatacataatttaccatcagatagaactttatggttctagtacagatactctactacactcagcctcttatgtgccaagtttttctttaagcaatgagaaattgctcatgttcttcatcttctcaaatcatcagaggccgaagaaaaacactttggctgtgtctataacttgacacagtcaatagaatgaagaaaattagagtagttatgtgattatttcagctcttgacctgtcccctctggctgcctctgagtctgaatctcccaaagagagaaaccaatttctaagaggactggattgcagaagactcggggacaacatttgatccaagatcttaaatgttatattgataaccatgctcagcaatgagctattagattcattttgggaaatctccataatttcaatttgtaaactttgttaagacctgtctacattgttatatgtgtgtgacttgagtaatgttatcaacgtttttgtaaatatttactatgtttttctattagctaaattccaacaattttgtactttaataaaatgttctaaacattgcaa

SEQ ID NO: 451524 - DNA, 3028 bp, Homo sapiens
ccggcagaagatgaggccaggacgtgtaacatcctggggaggccacagttaaatgaaacccaagggcaggccatggggtgccccaggctccaacctcccctgcttccaagttacaagaacttcaagggtactattgaagaactggctccaaatcaatatgtgattagtggtgaagtagctattcttaattctacaaccattgaaatctcagagcttcccgtcagaacatggacccagacatacaaagaacaagttctagaacccatgttgaatggcaccgagaagacacctcctctcataacagactatagggaataccatacagataccactgtgaaatttgttgtgaagatgactgaagaaaaactggcagaggcagagagagttggactacacaaagtcttcaaactccaaactagtctcacatgcaactctatggtgctttttgaccacgtaggctgtttaaagaaatatgacacggtgttggatattctaagagacttttttgaactcagacttaaatattatggattaagaaaagaatggctcctaggaatgcttggtgctgaatctgctaaactgaataatcaggctcgctttatcttagagaaaatagatggcaaaataatcattgaaaataagcctaagaaagaattaattaaagttctgattcagaggggatatgattcggatcctgtgaaggcctggaaagaagcccagcaaaaggttccagatgaagaagaaaatgaagagagtgacaacgaaaaggaaactgaaaagagtgactccgtaacagattctggaccaaccttcaactatcttcttgatatgcccctttggtatttaaccaaggaaaagaaagatgaactctgcaggctaagaaatgaaaaagaacaagagctggacacattaaaaagaaagagtccatcagatttgtggaaagaagacttggctacatttattgaagaattggaggctgttgaagccaaggaaaaacaagatgaacaagtcggacttcctgggaaaggggggaaggccaaggggaaaaaaacacaaatggctgaagttttgccttctccgcgtggtcaaagagtcattccacgaataaccatagaaatgaaagcagaggcagaaaagaaaaataaaaagaaaattaagaatgaaaatactgaaggaagccctcaagaagatggtgtggaactagaaggcctaaaacaaagattagaaaagaaacagaaaagagaaccaggtacaaagacaaagaaacaaactacattggcatttaagccaatcaaaaaaggaaagaagagaaatccctggtctgattcagaatcagataggagcagtgacgaaagtaattttgatgtccctccacgagaaacagagccacggagagcagcaacaaaaacaaaattcacaatggatttggattcagatgaagatttctcagattttgatgaaaaaactgatgatgaagattttgtcccatcagatgctagtccacctaagaccaaaacttccccaaaacttagtaacaaagaactgaaaccacagaaaagtgtcgtgtcagaccttgaagctgatgatgttaagggcagtgtaccactgtcttcaagccctcctgctacacatttcccagatgaaactgaaattacaaacccagttcctaaaaagaatgtgacagtgaagaagacagcagcaaaaagtcagtcttccacctccactaccggtgccaaaaaaagggctgccccaaaaggaactaaaagggatccagctttgaattctggtgtctctcaaaagcctgatcctgccaaaaccaagaatcgccgcaaaaggaagccatccacttctgatgattctgactctaattttgagaaaattgtttcgaaagcagtcacaagcaagaaatccaagggggagagtgatgacttccatatggactttgactcagctgtggctcctcgggcaaaatctgtacgggcaaagaaacctataaagtacctggaagagtcagatgaagatgatctgttttaaaatgtgaggcgattattttaagtaattatcttaccaagcccaagactggttttaaagttacctgaagctcttaacttcctcccctctgaatttagtttggggaaggtgtttttagtacaagacatcaaagtgaagtaaagcccaagtgttctttagctttttataatactgtctaaatagtgaccatctcatgggcattgttttcttctctgctttgtctgtgttttgagtctgctttcttttgtctttaaaacctgatttttaagttcttctgaactgtagaaatagctatctgatcacttcagcgtaaagcagtgtgtttattaaccatccactaagctaaaactagagcagtttgatttaaaagtgtcactcttcctccttttctactttcagtagatatgagatagagcataattatctgttttatcttagttttatacataatttaccatcagatagaactttatggttctagtacagatactctactacactcagcctcttatgtgccaagtttttctttaagcaatgagaaattgctcatgttcttcatcttctcaaatcatcagaggccgaagaaaaacactttggctgtgtctataacttgacacagtcaatagaatgaagaaaattagagtagttatgtgattatttcagctcttgacctgtcccctctggctgcctctgagtctgaatctcccaaagagagaaaccaatttctaagaggactggattgcagaagactcggggacaacatttgatccaagatcttaaatgttatattgataaccatgctcagcaatgagctattagattcattttgggaaatctccataatttcaatttgtaaactttgttaagacctgtctacattgttatatgtgtgtgacttgagtaatgttatcaacgtttttgtaaatatttactatgtttttctattagctaaattccaacaattttgtactttaataaaatgttctaaacattgcaa

SEQ ID NO: 451525 - DNA, 5059 bp, Homo sapiens
aggttcaagtggagctctcctaaccgacgcgcgtctgtggagaagcggcttggtcgggggtggtctcgtggggtcctgcctgtttagtcgctttcagggttcttgagccccttcacgaccgtcaccatggaagtgtcaccattgcagcctgtaaatgaaaatatgcaagtcaacaaaataaagaaaaatgaagatgctaagaaaagactgtctgttgaaagaatctatcaaaagaaaacacaattggaacatattttgctccgcccagacacctacattggttctgtggaattagtgacccagcaaatgtgggtttacgatgaagatgttggcattaactatagggaagtcacttttgttcctggtttgtacaaaatctttgatgagattctagttaatgctgcggacaacaaacaaagggacccaaaaatgtcttgtattagagtcacaattgatccggaaaacaatttaattagtatatggaataatggaaaaggtattcctgttgttgaacacaaagttgaaaagatgtatgtcccagctctcatatttggacagctcctaacttctagtaactatgatgatgatgaaaagaaagtgacaggtggtcgaaatggctatggagccaaattgtgtaacatattcagtaccaaatttactgtggaaacagccagtagagaatacaagaaaatgttcaaacagacatggatggataatatgggaagagctggtgagatggaactcaagcccttcaatggagaagattatacatgtatcacctttcagcctgatttgtctaagtttaaaatgcaaagcctggacaaagatattgttgcactaatggtcagaagagcatatgatattgctggatccaccaaagatgtcaaagtctttcttaatggaaataaactgccagtaaaaggatttcgtagttatgtggacatgtatttgaaggacaagttggatgaaactggtaactccttgaaagtaatacatgaacaagtaaaccacaggtgggaagtgtgtttaactatgagtgaaaaaggctttcagcaaattagctttgtcaacagcattgctacatccaagggtggcagacatgttgattatgtagctgatcagattgtgactaaacttgttgatgttgtgaagaagaagaacaagggtggtgttgcagtaaaagcacatcaggtgaaaaatcacatgtggatttttgtaaatgccttaattgaaaacccaacctttgactctcagacaaaagaaaacatgactttacaacccaagagctttggatcaacatgccaattgagtgaaaaatttatcaaagctgccattggctgtggtattgtagaaagcatactaaactgggtgaagtttaaggcccaagtccagttaaacaagaagtgttcagctgtaaaacataatagaatcaagggaattcccaaactcgatgatgccaatgatgcagggggccgaaactccactgagtgtacgcttatcctgactgagggagattcagccaaaactttggctgtttcaggccttggtgtggttgggagagacaaatatggggttttccctcttagaggaaaaatactcaatgttcgagaagcttctcataagcagatcatggaaaatgctgagattaacaatatcatcaagattgtgggtcttcagtacaagaaaaactatgaagatgaagattcattgaagacgcttcgttatgggaagataatgattatgacagatcaggaccaagatggttcccacatcaaaggcttgctgattaattttatccatcacaactggccctctcttctgcgacatcgttttctggaggaatttatcactcccattgtaaaggtatctaaaaacaagcaagaaatggcattttacagccttcctgaatttgaagagtggaagagttctactccaaatcataaaaaatggaaagtcaaatattacaaaggtttgggcaccagcacatcaaaggaagctaaagaatactttgcagatatgaaaagacatcgtatccagttcaaatattctggtcctgaagatgatgctgctatcagcctggcctttagcaaaaaacagatagatgatcgaaaggaatggttaactaatttcatggaggatagaagacaacgaaagttacttgggcttcctgaggattacttgtatggacaaactaccacatatctgacatataatgacttcatcaacaaggaacttatcttgttctcaaattctgataacgagagatctatcccttctatggtggatggtttgaaaccaggtcagagaaaggttttgtttacttgcttcaaacggaatgacaagcgagaagtaaaggttgcccaattagctggatcagtggctgaaatgtcttcttatcatcatggtgagatgtcactaatgatgaccattatcaatttggctcagaattttgtgggtagcaataatctaaacctcttgcagcccattggtcagtttggtaccaggctacatggtggcaaggattctgctagtccacgatacatctttacaatgctcagctctttggctcgattgttatttccaccaaaagatgatcacacgttgaagtttttatatgatgacaaccagcgtgttgagcctgaatggtacattcctattattcccatggtgctgataaatggtgctgaaggaatcggtactgggtggtcctgcaaaatccccaactttgatgtgcgtgaaattgtaaataacatcaggcgtttgatggatggagaagaacctttgccaatgcttccaagttacaagaacttcaagggtactattgaagaactggctccaaatcaatatgtgattagtggtgaagtagctattcttaattctacaaccattgaaatctcagagcttcccgtcagaacatggacccagacatacaaagaacaagttctagaacccatgttgaatggcaccgagaagacacctcctctcataacagactatagggaataccatacagataccactgtgaaatttgttgtgaagatgactgaagaaaaactggcagaggcagagagagttggactacacaaagtcttcaaactccaaactagtctcacatgcaactctatggtgctttttgaccacgtaggctgtttaaagaaatatgacacggtgttggatattctaagagacttttttgaactcagacttaaatattatggattaagaaaagaatggctcctaggaatgcttggtgctgaatctgctaaactgaataatcaggctcgctttatcttagagaaaatagatggcaaaataatcattgaaaataagcctaagaaagaattaattaaagttctgattcagaggggatatgattcggatcctgtgaaggcctggaaagaagcccagcaaaaggttccagatgaagaagaaaatgaagagagtgacaacgaaaaggaaactgaaaagagtgactccgtaacagattctggaccaaccttcaactatcttcttgatatgcccctttggtatttaaccaaggaaaagaaagatgaactctgcaggctaagaaatgaaaaagaacaagagctggacacattaaaaagaaagagtccatcagatttgtggaaagaagacttggctacatttattgaagaattggaggctgttgaagccaaggaaaaacaagatgaacaagtcggacttcctgggaaaggggggaaggccaaggggaaaaaaacacaaatggctgaagttttgccttctccgcgtggtcaaagagtcattccacgaataaccatagaaatgaaagcagaggcagaaaagaaaaataaaaagaaaattaagaatgaaaatactgaaggaagccctcaagaagatggtgtggaactagaaggcctaaaacaaagattagaaaagaaacagaaaagagaaccaggtacaaagacaaagaaacaaactacattggcatttaagccaatcaaaaaaggaaagaagagaaatccctggtctgattcagaatcagataggagcagtgacgaaagtaattttgatgtccctccacgagaaacagagccacggagagcagcaacaaaaacaaaattcacaatggatttggattcagatgaagatttctcagattttgatgaaaaaactgatgatgaagattttgtcccatcagatgctagtccacctaagaccaaaacttccccaaaacttagtaacaaagaactgaaaccacagaaaagtgtcgtgtcagaccttgaagctgatgatgttaagggcagtgtaccactgtcttcaagccctcctgctacacatttcccagatgaaactgaaattacaaacccagttcctaaaaagaatgtgacagtgaagaagacagcagcaaaaagtcagtcttccacctccactaccggtgccaaaaaaagggctgccccaaaaggaactaaaagggatccagctttgaattctggtgtctctcaaaagcctgatcctgccaaaaccaagaatcgccgcaaaaggaagccatccacttctgatgattctgactctaattttgagaaaattgtttcgaaagcagtcacaagcaagaaatccaagggggagagtgatgacttccatatggactttgactcagctgtggctcctcgggcaaaatctgtacgggcaaagaaacctataaagtacctggaagagtcagatgaagatgatctgttttaaaatctcttgacctgtcccctctggctgcctctgagtctgaatctcccaaagagagaaaccaatttctaagaggactggattgcagaagactcggggacaacatttgatccaagatcttaaatgttatattgataaccatgctcagcaatgagctattagattcattttgggaaatctccataatttcaatttgtaaactttgttaagacctgtctacattgttatatgtgtgtgacttgagtaatgttatcaacgtttttgtaaatatttactatgtttttctattagctaaattccaacaattttgtactttaataaaatgttctaaacattgcaa

SEQ ID NO: 451526 - DNA, 4889 bp, Homo sapiens
aggttcaagtggagctctcctaaccgacgcgcgtctgtggagaagcggcttggtcgggggtggtctcgtggggtcctgcctgtttagtcgctttcagggttcttgagccccttcacgaccgtcaccatggaagtgtcaccattgcagcctgtaaatgaaaatatgcaagtcaacaaaataaagaaaaatgaagatgctaagaaaagactgtctgttgaaagaatctatcaaaagaaaacacaattggaacatattttgctccgcccagacacctacattggttctgtggaattagtgacccagcaaatgtgggtttacgatgaagatgttggcattaactatagggaagtcacttttgttcctggtttgtacaaaatctttgatgagattctagttaatgctgcggacaacaaacaaagggacccaaaaatgtcttgtattagagtcacaattgatccggaaaacaatttaattagtatatggaataatggaaaaggtattcctgttgttgaacacaaagttgaaaagatgtatgtcccagctctcatatttggacagctcctaacttctagtaactatgatgatgatgaaaagaaagtgacaggtggtcgaaatggctatggagccaaattgtgtaacatattcagtaccaaatttactgtggaaacagccagtagagaatacaagaaaatgttcaaacagacatggatggataatatgggaagagctggtgagatggaactcaagcccttcaatggagaagattatacatgtatcacctttcagcctgatttgtctaagtttaaaatgcaaagcctggacaaagatattgttgcactaatggtcagaagagcatatgatattgctggatccaccaaagatgtcaaagtctttcttaatggaaataaactgccagtaaaaggatttcgtagttatgtggacatgtatttgaaggacaagttggatgaaactggtaactccttgaaagtaatacatgaacaagtaaaccacaggtgggaagtgtgtttaactatgagtgaaaaaggctttcagcaaattagctttgtcaacagcattgctacatccaagggtggcagacatgttgattatgtagctgatcagattgtgactaaacttgttgatgttgtgaagaagaagaacaagggtggtgttgcagtaaaagcacatcaggtgaaaaatcacatgtggatttttgtaaatgccttaattgaaaacccaacctttgactctcagacaaaagaaaacatgactttacaacccaagagctttggatcaacatgccaattgagtgaaaaatttatcaaagctgccattggctgtggtattgtagaaagcatactaaactgggtgaagtttaaggcccaagtccagttaaacaagaagtgttcagctgtaaaacataatagaatcaagggaattcccaaactcgatgatgccaatgatgcagggggccgaaactccactgagtgtacgcttatcctgactgagggagattcagccaaaactttggctgtttcaggccttggtgtggttgggagagacaaatatggggttttccctcttagaggaaaaatactcaatgttcgagaagcttctcataagcagatcatggaaaatgctgagattaacaatatcatcaagattgtgggtcttcagtacaagaaaaactatgaagatgaagattcattgaagacgcttcgttatgggaagataatgattatgacagatcaggaccaagatggttcccacatcaaaggcttgctgattaattttatccatcacaactggccctctcttctgcgacatcgttttctggaggaatttatcactcccattgtaaaggtatctaaaaacaagcaagaaatggcattttacagccttcctgaatttgaagagtggaagagttctactccaaatcataaaaaatggaaagtcaaatattacaaaggtttgggcaccagcacatcaaaggaagctaaagaatactttgcagatatgaaaagacatcgtatccagttcaaatattctggtcctgaagatgatgctgctatcagcctggcctttagcaaaaaacagatagatgatcgaaaggaatggttaactaatttcatggaggatagaagacaacgaaagttacttgggcttcctgaggattacttgtatggacaaactaccacatatctgacatataatgacttcatcaacaaggaacttatcttgttctcaaattctgataacgagagatctatcccttctatggtggatggtttgaaaccaggtcagagaaaggttttgtttacttgcttcaaacggaatgacaagcgagaagtaaaggttgcccaattagctggatcagtggctgaaatgtcttcttatcatcatggtgagatgtcactaatgatgaccattatcaatttggctcagaattttgtgggtagcaataatctaaacctcttgcagcccattggtcagtttggtaccaggctacatggtggcaaggattctgctagtccacgatacatctttacaatgctcagctctttggctcgattgttatttccaccaaaagatgatcacacgttgaagtttttatatgatgacaaccagcgtgttgagcctgaatggtacattcctattattcccatggtgctgataaatggtgctgaaggaatcggtactgggtggtcctgcaaaatccccaactttgatgtgcgtgaaattgtaaataacatcaggcgtttgatggatggagaagaacctttgccaatgcttccaagttacaagaacttcaagggtactattgaagaactggctccaaatcaatatgtgattagtggtgaagtagctattcttaattctacaaccattgaaatctcagagcttcccgtcagaacatggacccagacatacaaagaacaagttctagaacccatgttgaatggcaccgagaagacacctcctctcataacagactatagggaataccatacagataccactgtgaaatttgttgtgaagatgactgaagaaaaactggcagaggcagagagagttggactacacaaagtcttcaaactccaaactagtctcacatgcaactctatggtgctttttgaccacgtaggctgtttaaagaaatatgacacggtgttggatattctaagagacttttttgaactcagacttaaatattatggattaagaaaagaatggctcctaggaatgcttggtgctgaatctgctaaactgaataatcaggctcgctttatcttagagaaaatagatggcaaaataatcattgaaaataagcctaagaaagaattaattaaagttctgattcagaggggatatgattcggatcctgtgaaggcctggaaagaagcccagcaaaaggttccagatgaagaagaaaatgaagagagtgacaacgaaaaggaaactgaaaagagtgactccgtaacagattctggaccaaccttcaactatcttcttgatatgcccctttggtatttaaccaaggaaaagaaagatgaactctgcaggctaagaaatgaaaaagaacaagagctggacacattaaaaagaaagagtccatcagatttgtggaaagaagacttggctacatttattgaagaattggaggctgttgaagccaaggaaaaacaagatgaacaagtcggacttcctgggaaaggggggaaggccaaggggaaaaaaacacaaatggctgaagttttgccttctccgcgtggtcaaagagtcattccacgaataaccatagaaatgaaagcagaggcagaaaagaaaaataaaaagaaaattaagaatgaaaatactgaaggaagccctcaagaagatggtgtggaactagaaggcctaaaacaaagattagaaaagaaacagaaaagagaaccaggtacaaagacaaagaaacaaactacattggcatttaagccaatcaaaaaaggaaagaagagaaatccctggtctgattcagaatcagataggagcagtgacgaaagtaattttgatgtccctccacgagaaacagagccacggagagcagcaacaaaaacaaaattcacaatggatttggattcagatgaagatttctcagattttgatgaaaaaactgatgatgaagattttgtcccatcagatgctagtccacctaagaccaaaacttccccaaaacttagtaacaaagaactgaaaccacagaaaagtgtcgtgtcagaccttgaagctgatgatgttaagggcagtgtaccactgtcttcaagccctcctgctacacatttcccagatgaaactgaaattacaaacccagttcctaaaaagaatgtgacagtgaagaagacagcagcaaaaagtcagtcttccacctccactaccggtgccaaaaaaagggctgccccaaaaggaactaaaagggatccagctttgaattctggtgtctctcaaaagcctgatcctgccaaaaccaagaatcgccgcaaaaggaagccatccacttctgatgattctgactctaattttgagaaaattgtttcgaaagcagtcacaagcaagaaatccaagggggagagtgatgacttccatatggactttgactcagctgtggctcctcgggcaaaatctgtacgggcaaagaaacctataaagtacctggaagagtcagatgaagatgatctgttttaaaatgtgaggcgattattttaagtaattatcttaccaagcccaagactggtcaagaagatggcggaactagaaggcctaaaacaaagattagaaaagaaacagaaaagagaaccaggtacaaagacaaagaaacaaactacattggcatttaagccaatcaaaaaaaa

SEQ ID NO: 451527 - DNA, 3846 bp, Homo sapiens
aggttcaagtggagctctcctaaccgacgcgcgtctgtggagaagcggcttggtcgggggtggtctcgtggggtcctgcctgtttagtcgctttcagggttcttgagccccttcacgaccgtcaccatggaagtgtcaccattgcagcctgtaaatgaaaatatgcaagtcaacaaaataaagaaaaatgaagatgctaagaaaagactgtctgttgaaagaatctatcaaaagaaaacacaattggaacatattttgctccgcccagacacctacattggttctgtggaattagtgacccagcaaatgtgggtttacgatgaagatgttggcattaactatagggaagtcacttttgttcctggtttgtacaaaatctttgatgagattctagttaatgctgcggacaacaaacaaagggacccaaaaatgtcttgtattagagtcacaattgatccggaaaacaatttaattagtatatggaataatggaaaaggtattcctgttgttgaacacaaagttgaaaagatgtatgtcccagctctcatatttggacagctcctaacttctagtaactatgatgatgatgaaaagaaagtgacaggtggtcgaaatggctatggagccaaattgtgtaacatattcagtaccaaatttactgtggaaacagccagtagagaatacaagaaaatgttcaaacagacatggatggataatatgggaagagctggtgagatggaactcaagcccttcaatggagaagattatacatgtatcacctttcagcctgatttgtctaagtttaaaatgcaaagcctggacaaagatattgttgcactaatggtcagaagagcatatgatattgctggatccaccaaagatgtcaaagtctttcttaatggaaataaactgccagtaaaaggatttcgtagttatgtggacatgtatttgaaggacaagttggatgaaactggtaactccttgaaagtaatacatgaacaagtaaaccacaggtgggaagtgtgtttaactatgagtgaaaaaggctttcagcaaattagctttgtcaacagcattgctacatccaagggtggcagacatgttgattatgtagctgatcagattgtgactaaacttgttgatgttgtgaagaagaagaacaagggtggtgttgcagtaaaagcacatcaggtgaaaaatcacatgtggatttttgtaaatgccttaattgaaaacccaacctttgactctcagacaaaagaaaacatgactttacaacccaagagctttggatcaacatgccaattgagtgaaaaatttatcaaagctgccattggctgtggtattgtagaaagcatactaaactgggtgaagtttaaggcccaagtccagttaaacaagaagtgttcagctgtaaaacataatagaatcaagggaattcccaaactcgatgatgccaatgatgcagggggccgaaactccactgagtgtacgcttatcctgactgagggagattcagccaaaactttggctgtttcaggccttggtgtggttgggagagacaaatatggggttttccctcttagaggaaaaatactcaatgttcgagaagcttctcataagcagatcatggaaaatgctgagattaacaatatcatcaagattgtgggtcttcagtacaagaaaaactatgaagatgaagattcattgaagacgcttcgttatgggaagataatgattatgacagatcaggaccaagatggttcccacatcaaaggcttgctgattaattttatccatcacaactggccctctcttctgcgacatcgttttctggaggaatttatcactcccattgtaaaggtatctaaaaacaagcaagaaatggcattttacagccttcctgaatttgaagagtggaagagttctactccaaatcataaaaaatggaaagtcaaatattacaaaggtttgggcaccagcacatcaaaggaagctaaagaatactttgcagatatgaaaagacatcgtatccagttcaaatattctggtcctgaagatgatgctgctatcagcctggcctttagcaaaaaacagatagatgatcgaaaggaatggttaactaatttcatggaggatagaagacaacgaaagttacttgggcttcctgaggattacttgtatggacaaactaccacatatctgacatataatgacttcatcaacaaggaacttatcttgttctcaaattctgataacgagagatctatcccttctatggtggatggtttgaaaccaggtcagagaaaggttttgtttacttgcttcaaacggaatgacaagcgagaagtaaaggttgcccaattagctggatcagtggctgaaatgtcttcttatcatcatggtgagatgtcactaatgatgaccattatcaatttggctcagaattttgtgggtagcaataatctaaacctcttgcagcccattggtcagtttggtaccaggctacatggtggcaaggattctgctagtccacgatacatctttacaatgctcagctctttggctcgattgttatttccaccaaaagatgatcacacgttgaagtttttatatgatgacaaccagcgtgttgagcctgaatggtacattcctattattcccatggtgctgataaatggtgctgaaggaatcggtactgggtggtcctgcaaaatccccaactttgatgtgcgtgaaattgtaaataacatcaggcgtttgatggatggagaagaacctttgccaatgcttccaagttacaagaacttcaagggtactattgaagaactggctccaaatcaatatgtgattagtggtgaagtagctattcttaattctacaaccattgaaatctcagagcttcccgtcagaacatggacccagacatacaaagaacaagttctagaacccatgttgaatggcaccgagaagacacctcctctcataacagactatagggaataccatacagataccactgtgaaatttgttgtgaagatgactgaagaaaaactggcagaggcagagagagttggactacacaaagtcttcaaactccaaactagtctcacatgcaactctatggtgctttttgaccacgtaggctgtttaaagaaatatgacacggtgttggatattctaagagacttttttgaactcagacttaaatattatggattaagaaaagaatggctcctaggaatgcttggtgctgaatctgctaaactgaataatcaggctcgctttatcttagagaaaatagatggcaaaataatcattgaaaataagcctaagaaagaattaattaaagttctgattcagaggggatatgattcggatcctgtgaaggcctggaaagaagcccagcaaaaggttccagatgaagaagaaaatgaagagagtgacaacgaaaaggaaactgaaaagagtgactccgtaacagattctggaccaaccttcaactatcttcttgatatgcccctttggtatttaaccaaggaaaagaaagatgaactctgcaggctaagaaatgaaaaagaacaagagctggacacattaaaaagaaagagtccatcagatttgtggaaagaagacttggctacatttattgaagaattggaggctgttgaagccaaggaaaaacaagatgaacaagtcggacttcctgggaaaggggggaaggccaaggggaaaaaaacacaaatggctgaagttttgccttctccgcgtggtcaaagagtcattccacgaataaccatagaaatgaaagcagaggcagaaaagaaaaataaaaagaaaattaag

SEQ ID NO: 451528 - DNA, 1056 bp, Homo sapiens
agttccttgacttacagtggcgcaacagctttctttcgagttgcgggatataagtcacccgcgtcgtgaggcgattattttaagtaattatcttaccaagcccaagactggttttaaagttacctgaagctcttaacttcctcccctctgaatttagtttggggaaggtgtttttagtacaagacatcaaagtgaagtaaagcccaagtgttctttagctttttataatactgtctaaatagtgaccatctcatgggcattgttttcttctctgctttgtctgtgttttgagtctgctttcttttgtctttaaaacctgatttttaagttcttctgaactgtagaaatagctatctgatcacttcagcgtaaagcagtgtgtttattaaccatccactaagctaaaactagagcagtttgatttaaaagtgtcactcttcctccttttctactttcagtagatatgagatagagcataattatctgttttatcttagttttatacataatttaccatcagatagaactttatggttctagtacagatactctactacactcagcctcttatgtgccaagtttttctttaagcaatgagaaattgctcatgttcttcatcttctcaaatcatcagaggccgaagaaaaacactttggctgtgtctataacttgacacagtcaatagaatgaagaaaattagagtagttatgtgattatttcagctcttgacctgtcccctctggctgcctctgagtctgaatctcccaaagagagaaaccaatttctaagaggactggattgcagaagactcggggacaacatttgatccaagatcttaaatgttatattgataaccatgctcagcaatgagctattagattcattttgggaaatctccataatttcaatttgtaaactttgttaagacctgtctacattgttatatgtgtgtgacttgagtaatgttatcaacgtttttgtaaatatttactatgtttttctattagctaaattccaacaattttgtactttaataaaatgttctaaacattgcaa

SEQ ID NO: 451529 - DNA, 2617 bp, Homo sapiens
aggttcaagtggagctctcctaaccgacgcgcgtctgtggagaagcggcttggtcgggggtggtctcgtggggtcctgcctgtttagtcgctttcagggttcttgagccccttcacgaccgtcaccatggaagtgtcaccattgcagcctgtaaatgaaaatatgcaagtcaacaaaataaagaaaaatgaagatgctaagaaaagactgtctgttgaaagaatctatcaaaagaaaacacaattggaacatattttgctccgcccagacacctacattggttctgtggaattagtgacccagcaaatgtgggtttacgatgaagatgttggcattaactatagggaagtcacttttgttcctggtttgtacaaaatctttgatgagattctagttaatgctgcggacaacaaacaaagggacccaaaaatgtcttgtattagagtcacaattgatccggaaaacaatttaattagtatatggaataatggaaaaggtattcctgttgttgaacacaaagttgaaaagatgtatgtcccagctctcatatttggacagctcctaacttctagtaactatgatgatgatgaaaagaaagtgacaggtggtcgaaatggctatggagccaaattgtgtaacatattcagtaccaaatttactgtggaaacagccagtagagaatacaagaaaatgttcaaacagacatggatggataatatgggaagagctggtgagatggaactcaagcccttcaatggagaagattatacatgtatcacctttcagcctgatttgtctaagtttaaaatgcaaagcctggacaaagatattgttgcactaatggtcagaagagcatatgatattgctggatccaccaaagatgtcaaagtctttcttaatggaaataaactgccagtaaaaggatttcgtagttatgtggacatgtatttgaaggacaagttggatgaaactggtaactccttgaaagtaatacatgaacaagtaaaccacaggtgggaagtgtgtttaactatgagtgaaaaaggctttcagcaaattagctttgtcaacagcattgctacatccaagggtggcagacatgttgattatgtagctgatcagattgtgactaaacttgttgatgttgtgaagaagaagaacaagggtggtgttgcagtaaaagcacatcaggtgaaaaatcacatgtggatttttgtaaatgccttaattgaaaacccaacctttgactctcagacaaaagaaaacatgactttacaacccaagagctttggatcaacatgccaattgagtgaaaaatttatcaaagctgctcatttgtattctagatttctgatagatcccttcttccctaatatgatccctaatatgatcttctcgttttcaggccattggctgtggtattgtagaaagcatactaaactgggtgaagtttaaggcccaagtccagttaaacaagaagtgttcagctgtaaaacataatagaatcaagggaattcccaaactcgatgatgccaatgatgcagggggccgaaactccactgagtgtacgcttatcctgactgagggagattcagccaaaactttggctgtttcaggccttggtgtggttgggagagacaaatatggggttttccctcttagaggaaaaatactcaatgttcgagaagcttctcataagcagatcatggaaaatgctgagattaacaatatcatcaagattgtgggtcttcagtacaagaaaaactatgaagatgaagattcattgaagacgcttcgttatgggaagataatgattatgacagatcaggaccaagatggttcccacatcaaaggcttgctgattaattttatccatcacaactggccctctcttctgcgacatcgttttctggaggaatttatcactcccattgtaaaggtatctaaaaacaagcaagaaatggcattttacagccttcctgaatttgaagagtggaagagttctactccaaatcataaaaaatggaaagtcaaatattacaaaggtttgggcaccagcacatcaaaggaagctaaagaatactttgcagatatgaaaagacatcgtatccagttcaaatattctggtcctgaagatgatgctgctatcagcctggcctttagcaaaaaacagatagatgatcgaaaggaatggttaactaatttcatggaggatagaagacaacgaaagttacttgggcttcctgaggattacttgtatggacaaactaccacatatcttcttgatatgcccctttggtatttaaccaaggaaaagaaagatgaactctgcaggctaagaaatgaaaaagaacaagagctggacacattaaaaagaaagagtccatcagatttgtggaaagaagacttggctacatttattgaagaattggaggctgttgaagccaaggaaaaacaagatgaacaagtcggacttcctgggaaaggggggaaggccaaggggaaaaaaacacaaatggctgaagttttgccttctccgcgtggtcaaagagtcattccacgaataaccatagaaatgaaagcagaggcagaaaagaaaaataaaaagaaaattaag

SEQ ID NO: 451530 - DNA, 325 bp, Homo sapiens
actttatggtaatcatgataacagaacaatgaatatagaataaaaataacagtatttctttgccttatttctagcaaatgtgggtttacgatgaagatgttggcattaactatagggaagtcacttttgttcctggtttgtacaaaatctttgatgagattctaggtgagtaaatcctttaatataaagatctggtcaaatctttcataagaagtatcattccaaataaaaatttaaaaaagataaaagtaaaaacaaaaagtatcatttctaccaaacctgctgtagccagggctcctgtcatttcaatcagttgataaaggtg

SEQ ID NO: 451531 - DNA, 5716 bp, Homo sapiens
aggttcaagtggagctctcctaaccgacgcgcgtctgtggagaagcggcttggtcgggggtggtctcgtggggtcctgcctgtttagtcgctttcagggttcttgagccccttcacgaccgtcaccatggaagtgtcaccattgcagcctgtaaatgaaaatatgcaagtcaacaaaataaagaaaaatgaagatgctaagaaaagactgtctgttgaaagaatctatcaaaagaaaacacaattggaacatattttgctccgcccagacacctacattggttctgtggaattagtgacccagcaaatgtgggtttacgatgaagatgttggcattaactatagggaagtcacttttgttcctggtttgtacaaaatctttgatgagattctagttaatgctgcggacaacaaacaaagggacccaaaaatgtcttgtattagagtcacaattgatccggaaaacaatttaattagtatatggaataatggaaaaggtattcctgttgttgaacacaaagttgaaaagatgtatgtcccagctctcatatttggacagctcctaacttctagtaactatgatgatgatgaaaagaaagtgacaggtggtcgaaatggctatggagccaaattgtgtaacatattcagtaccaaatttactgtggaaacagccagtagagaatacaagaaaatgttcaaacagacatggatggataatatgggaagagctggtgagatggaactcaagcccttcaatggagaagattatacatgtatcacctttcagcctgatttgtctaagtttaaaatgcaaagcctggacaaagatattgttgcactaatggtcagaagagcatatgatattgctggatccaccaaagatgtcaaagtctttcttaatggaaataaactgccagtaaaaggatttcgtagttatgtggacatgtatttgaaggacaagttggatgaaactggtaactccttgaaagtaatacatgaacaagtaaaccacaggtgggaagtgtgtttaactatgagtgaaaaaggctttcagcaaattagctttgtcaacagcattgctacatccaagggtggcagacatgttgattatgtagctgatcagattgtgactaaacttgttgatgttgtgaagaagaagaacaagggtggtgttgcagtaaaagcacatcaggtgaaaaatcacatgtggatttttgtaaatgccttaattgaaaacccaacctttgactctcagacaaaagaaaacatgactttacaacccaagagctttggatcaacatgccaattgagtgaaaaatttatcaaagctgccattggctgtggtattgtagaaagcatactaaactgggtgaagtttaaggcccaagtccagttaaacaagaagtgttcagctgtaaaacataatagaatcaagggaattcccaaactcgatgatgccaatgatgcagggggccgaaactccactgagtgtacgcttatcctgactgagggagattcagccaaaactttggctgtttcaggccttggtgtggttgggagagacaaatatggggttttccctcttagaggaaaaatactcaatgttcgagaagcttctcataagcagatcatggaaaatgctgagattaacaatatcatcaagattgtgggtcttcagtacaagaaaaactatgaagatgaagattcattgaagacgcttcgttatgggaagataatgattatgacagatcaggaccaagatggttcccacatcaaaggcttgctgattaattttatccatcacaactggccctctcttctgcgacatcgttttctggaggaatttatcactcccattgtaaaggtatctaaaaacaagcaagaaatggcattttacagccttcctgaatttgaagagtggaagagttctactccaaatcataaaaaatggaaagtcaaatattacaaaggtttgggcaccagcacatcaaaggaagctaaagaatactttgcagatatgaaaagacatcgtatccagttcaaatattctggtcctgaagatgatgctgctatcagcctggcctttagcaaaaaacagatagatgatcgaaaggaatggttaactaatttcatggaggatagaagacaacgaaagttacttgggcttcctgaggattacttgtatggacaaactaccacatatctgacatataatgacttcatcaacaaggaacttatcttgttctcaaattctgataacgagagatctatcccttctatggtggatggtttgaaaccaggtcagagaaaggttttgtttacttgcttcaaacggaatgacaagcgagaagtaaaggttgcccaattagctggatcagtggctgaaatgtcttcttatcatcatggtgagatgtcactaatgatgaccattatcaatttggctcagaattttgtgggtagcaataatctaaacctcttgcagcccattggtcagtttggtaccaggctacatggtggcaaggattctgctagtccacgatacatctttacaatgctcagctctttggctcgattgttatttccaccaaaagatgatcacacgttgaagtttttatatgatgacaaccagcgtgttgagcctgaatggtacattcctattattcccatggtgctgataaatggtgctgaaggaatcggtactgggtggtcctgcaaaatccccaactttgatgtgcgtgaaattgtaaataacatcaggcgtttgatggatggagaagaacctttgccaatgcttccaagttacaagaacttcaagggtactattgaagaactggctccaaatcaatatgtgattagtggtgaagtagctattcttaattctacaaccattgaaatctcagagcttcccgtcagaacatggacccagacatacaaagaacaagttctagaacccatgttgaatggcaccgagaagacacctcctctcataacagactatagggaataccatacagataccactgtgaaatttgttgtgaagatgactgaagaaaaactggcagaggcagagagagttggactacacaaagtcttcaaactccaaactagtctcacatgcaactctatggtgctttttgaccacgtaggctgtttaaagaaatatgacacggtgttggatattctaagagacttttttgaactcagacttaaatattatggattaagaaaagaatggctcctaggaatgcttggtgctgaatctgctaaactgaataatcaggctcgctttatcttagagaaaatagatggcaaaataatcattgaaaataagcctaagaaagaattaattaaagttctgattcagaggggatatgattcggatcctgtgaaggcctggaaagaagcccagcaaaaggttccagatgaagaagaaaatgaagagagtgacaacgaaaaggaaactgaaaagagtgactccgtaacagattctggaccaaccttcaactatcttcttgatatgcccctttggtatttaaccaaggaaaagaaagatgaactctgcaggctaagaaatgaaaaagaacaagagctggacacattaaaaagaaagagtccatcagatttgtggaaagaagacttggctacatttattgaagaattggaggctgttgaagccaaggaaaaacaagatgaacaagtcggacttcctgggaaaggggggaaggccaaggggaaaaaaacacaaatggctgaagttttgccttctccgcgtggtcaaagagtcattccacgaataaccatagaaatgaaagcagaggcagaaaagaaaaataaaaagaaaattaagaatgaaaatactgaaggaagccctcaagaagatggtgtggaactagaaggcctaaaacaaagattagaaaagaaacagaaaagagaaccaggtacaaagacaaagaaacaaactacattggcatttaagccaatcaaaaaaggaaagaagagaaatccctggtctgattcagaatcagataggagcagtgacgaaagtaattttgatgtccctccacgagaaacagagccacggagagcagcaacaaaaacaaaattcacaatggatttggattcagatgaagatttctcagattttgatgaaaaaactgatgatgaagattttgtcccatcagatgctagtccacctaagaccaaaacttccccaaaacttagtaacaaagaactgaaaccacagaaaagtgtcgtgtcagaccttgaagctgatgatgttaagggcagtgtaccactgtcttcaagccctcctgctacacatttcccagatgaaactgaaattacaaacccagttcctaaaaagaatgtgacagtgaagaagacagcagcaaaaagtcagtcttccacctccactaccggtgccaaaaaaagggctgccccaaaaggaactaaaagggatccagctttgaattctggtgtctctcaaaagcctgatcctgccaaaaccaagaatcgccgcaaaaggaagccatccacttctgatgattctgactctaattttgagaaaattgtttcgaaagcagtcacaagcaagaaatccaagggggagagtgatgacttccatatggactttgactcagctgtggctcctcgggcaaaatctgtacgggcaaagaaacctataaagtacctggaagagtcagatgaagatgatctgttttaaaatgtgaggcgattattttaagtaattatcttaccaagcccaagactggttttaaagttacctgaagctcttaacttcctcccctctgaatttagtttggggaaggtgtttttagtacaagacatcaaagtgaagtaaagcccaagtgttctttagctttttataatactgtctaaatagtgaccatctcatgggcattgttttcttctctgctttgtctgtgttttgagtctgctttcttttgtctttaaaacctgatttttaagttcttctgaactgtagaaatagctatctgatcacttcagcgtaaagcagtgtgtttattaaccatccactaagctaaaactagagcagtttgatttaaaagtgtcactcttcctccttttctactttcagtagatatgagatagagcataattatctgttttatcttagttttatacataatttaccatcagatagaactttatggttctagtacagatactctactacactcagcctcttatgtgccaagtttttctttaagcaatgagaaattgctcatgttcttcatcttctcaaatcatcagaggccgaagaaaaacactttggctgtgtctataacttgacacagtcaatagaatgaagaaaattagagtagttatgtgattatttcagctcttgacctgtcccctctggctgcctctgagtctgaatctcccaaagagagaaaccaatttctaagaggactggattgcagaagactcggggacaacatttgatccaagatcttaaatgttatattgataaccatgctcagcaatgagctattagattcattttgggaaatctccataatttcaatttgtaaactttgttaagacctgtctacattgttatatgtgtgtgacttgagtaatgttatcaacgtttttgtaaatatttactatgtttttctattagctaaattccaacaattttgtactttaataaaatgttctaaacattgcaa

SEQ ID NO: 451532 - DNA, 6098 bp, Homo sapiens
aggttcaagtggagctctcctaaccgacgcgcgtctgtggagaagcggcttggtcgggggtggtctcgtggggtcctgcctgtttagtcgctttcagggttcttgagccccttcacgaccgtcaccatggaagtgtcaccattgcagcctgtaaatgaaaatatgcaagtcaacaaaataaagaaaaatgaagatgctaagaaaagactgtctgttgaaagaatctatcaaaagaaaacacaattggaacatattttgctccgcccagacacctacattggttctgtggaattagtgacccagcaaatgtgggtttacgatgaagatgttggcattaactatagggaagtcacttttgttcctggtttgtacaaaatctttgatgagattctagttaatgctgcggacaacaaacaaagggacccaaaaatgtcttgtattagagtcacaattgatccggaaaacaatttaattagtatatggaataatggaaaaggtattcctgttgttgaacacaaagttgaaaagatgtatgtcccagctctcatatttggacagctcctaacttctagtaactatgatgatgatgaaaagaaagtgacaggtggtcgaaatggctatggagccaaattgtgtaacatattcagtaccaaatttactgtggaaacagccagtagagaatacaagaaaatgttcaaacagacatggatggataatatgggaagagctggtgagatggaactcaagcccttcaatggagaagattatacatgtatcacctttcagcctgatttgtctaagtttaaaatgcaaagcctggacaaagatattgttgcactaatggtcagaagagcatatgatattgctggatccaccaaagatgtcaaagtctttcttaatggaaataaactgccagtaaaaggatttcgtagttatgtggacatgtatttgaaggacaagttggatgaaactggtaactccttgaaagtaatacatgaacaagtaaaccacaggtgggaagtgtgtttaactatgagtgaaaaaggctttcagcaaattagctttgtcaacagcattgctacatccaagggtggcagacatgttgattatgtagctgatcagattgtgactaaacttgttgatgttgtgaagaagaagaacaagggtggtgttgcagtaaaagcacatcaggtgaaaaatcacatgtggatttttgtaaatgccttaattgaaaacccaacctttgactctcagacaaaagaaaacatgactttacaacccaagagctttggatcaacatgccaattgagtgaaaaatttatcaaagctgccattggctgtggtattgtagaaagcatactaaactgggtgaagtttaaggcccaagtccagttaaacaagaagtgttcagctgtaaaacataatagaatcaagggaattcccaaactcgatgatgccaatgatgcagggggccgaaactccactgagtgtacgcttatcctgactgagggagattcagccaaaactttggctgtttcaggccttggtgtggttgggagagacaaatatggggttttccctcttagaggaaaaatactcaatgttcgagaagcttctcataagcagatcatggaaaatgctgagattaacaatatcatcaagattgtgggtcttcagtacaagaaaaactatgaagatgaagattcattgaagacgcttcgttatgggaagataatgattatgacagatcaggaccaagatggttcccacatcaaaggcttgctgattaattttatccatcacaactggccctctcttctgcgacatcgttttctggaggaatttatcactcccattgtaaaggtatctaaaaacaagcaagaaatggcattttacagccttcctgaatttgaagagtggaagagttctactccaaatcataaaaaatggaaagtcaaatattacaaaggtttgggcaccagcacatcaaaggaagctaaagaatactttgcagatatgaaaagacatcgtatccagttcaaatattctggtcctgaagatgatgctgctatcagcctggcctttagcaaaaaacagatagatgatcgaaaggaatggttaactaatttcatggaggatagaagacaacgaaagttacttgggcttcctgaggattacttgtatggacaaactaccacatatctgacatataatgacttcatcaacaaggaacttatcttgttctcaaattctgataacgagagatctatcccttctatggtggatggtttgaaaccaggtcagagaaaggttttgtttacttgcttcaaacggaatgacaagcgagaagtaaaggttgcccaattagctggatcagtggctgaaatgtcttcttatcatcatggtgagatgtcactaatgatgaccattatcaatttggctcagaattttgtgggtagcaataatctaaacctcttgcagcccattggtcagtttggtaccaggctacatggtggcaaggattctgctagtccacgatacatctttacaatgctcagctctttggctcgattgttatttccaccaaaagatgatcacacgttgaagtttttatatgatgacaaccagcgtgttgagcctgaatggtacattcctattattcccatggtgctgataaatggtgctgaaggaatcggtactgggtggtcctgcaaaatccccaactttgatgtgcgtgaaattgtaaataacatcaggcgtttgatggatggagaagaacctttgccaatgcttccaagttacaagaacttcaagggtactattgaagaactggctccaaatcaatatgtgattagtggtgaagtagctattcttaattctacaaccattgaaatctcagagcttcccgtcagaacatggacccagacatacaaagaacaagttctagaacccatgttgaatggcaccgagaagacacctcctctcataacagactatagggaataccatacagataccactgtgaaatttgttgtgaagatgactgaagaaaaactggcagaggcagagagagttggactacacaaagtcttcaaactccaaactagtctcacatgcaactctatggtgctttttgaccacgtaggctgtttaaagaaatatgacacggtgttggatattctaagagacttttttgaactcagacttaaatattatggattaagaaaagaatggctcctaggaatgcttggtgctgaatctgctaaactgaataatcaggctcgctttatcttagagaaaatagatggcaaaataatcattgaaaataagcctaagaaagaattaattaaagttctgattcagaggggatatgattcggatcctgtgaaggcctggaaagaagcccagcaaaaggttccagatgaagaagaaaatgaagagagtgacaacgaaaaggaaactgaaaagagtgactccgtaacagattctggaccaaccttcaactatcttcttgatatgcccctttggtatttaaccaaggaaaagaaagatgaactctgcaggctaagaaatgaaaaagaacaagagctggacacattaaaaagaaagagtccatcagatttgtggaaagaagacttggctacatttattgaagaattggaggctgttgaagccaaggaaaaacaagatgaacaagtcggacttcctgggaaaggggggaaggccaaggggaaaaaaacacaaatggctgaagttttgccttctccgcgtggtcaaagagtcattccacgaataaccatagaaatgaaagcagaggcagaaaagaaaaataaaaagaaaattaagaatgaaaatactgaaggaagccctcaagaagatggtgtggaactagaaggcctaaaacaaagattagaaaagaaacagaaaagagaaccaggtacaaagacaaagaaacaaactacattggcatttaagccaatcaaaaaaggaaagaagagaaatccctggtctgattcagaatcagataggagcagtgacgaaagtaattttgatgtccctccacgagaaacagagccacggagagcagcaacaaaaacaaaattcacaatggatttggattcagatgaagatttctcagattttgatgaaaaaactgatgatgaagattttgtcccatcagatgctagtccacctaagaccaaaacttccccaaaacttagtaacaaagaactgaaaccacagaaaagtgtcgtgtcagaccttgaagctgatgatgttaagggcagtgtaccactgtcttcaagccctcctgctacacatttcccagatgaaactgaaattacaaacccagttcctaaaaagaatgtgacagtgaagaagacagcagcaaaaagtcagtcttccacctccactaccggtgccaaaaaaagggctgccccaaaaggaactaaaagggatccagctttgaattctggtgtctctcaaaagcctgatcctgccaaaaccaagaatcgccgcaaaaggaagccatccacttctgatgattctgactctaattttgagaaaattgtttcgaaagcagtcacaagcaagaaatccaagggggagagtgatgacttccatatggactttgactcagctgtggctcctcgggcaaaatctgtacgggcaaagaaacctataaagtacctggaagagtcagatgaagatgatctgttttaaaatgtgaggcgattattttaagtaattatcttaccaagcccaagactggttttaaagttacctgaagctcttaacttcctcccctctgaatttagtttggggaaggtgtttttagtacaagacatcaaagtgaagtaaagcccaagtgttctttagctttttataatactgtctaaatagtgaccatctcatgggcattgttttcttctctgctttgtctgtgttttgagtctgctttcttttgtctttaaaacctgatttttaagttcttctgaactgtagaaatagctatctgatcacttcagcgtaaagcagtgtgtttattaaccatccactaagctaaaactagagcagtttgatttaaaagtgtcactcttcctccttttctactttcagtagatatgagatagagcataattatctgttttatcttagttttatacataatttaccatcagatagaactttatggttctagtacagatactctactacactcagcctcttatgtgccaagtttttctttaagcaatgagaaattgctcatgttcttcatcttctcaaatcatcagaggccgaagaaaaacactttggctgtgtctataacttgacacagtcaatagaatgaagaaaattagagtagttatgtgattatttcagctcttgacctgtcccctctggctgcctctgagtctgaatctcccaaagagagaaaccaatttctaagaggactggattgcagaagactcggggacaacatttgatccaagatcttaaatgttatattgataaccatgctcagcaatgagctattagattcattttgggaaatctccataatttcaatttgtaaactttgttaagacctgtctacattgttatatgtgtgtgacttgagtaatgttatcaacgtttttgtaaatatttactatgtttttctattagctaaattccaacaattttgtactttaataaaatgttctaaacattgcaaaaaaaaaaaaaaaaaaaaaaaaaaaaaaaaaaaaagaaaaaaaaaacaaaaaaaaaaaaaaagaaaaacaaaaaaaaaagaaaaacaaaaaacacaacataaaacagcaagacaataaaacgcaaagaaaaaaaagaaaacgcacaacaaaaacgcaacacaacaggagggggggggaggagtcgagataaacgggacggggaacaagcaaagtccaacaggctagcggacaaagggaggaggagaccaccagccgggaggcgaccacaagcactgaggcagcaagcagagcacgacgaaaacagaagagaacaagcagaggcacacaaacacaccgcacacgcaaacaggacaaggaaacacaaacacaccgacgccaaac

SEQ ID NO: 451533 - DNA, 5661 bp, Homo sapiens
aggttcaagtggagctctcctaaccgacgcgcgtctgtggagaagcggcttggtcgggggtggtctcgtggggtcctgcctgtttagtcgctttcagggttcttgagccccttcacgaccgtcaccatggaagtgtcaccattgcagcctgtaaatgaaaatatgcaagtcaacaaaataaagaaaaatgaagatgctaagaaaagactgtctgttgaaagaatctatcaaaagaaaacacaattggaacatattttgctccgcccagacacctacattggttctgtggaattagtgacccagcaaatgtgggtttacgatgaagatgttggcattaactatagggaagtcacttttgttcctggtttgtacaaaatctttgatgagattctagttaatgctgcggacaacaaacaaagggacccaaaaatgtcttgtattagagtcacaattgatccggaaaacaatttaattagtatatggaataatggaaaaggtattcctgttgttgaacacaaagttgaaaagatgtatgtcccagctctcatatttggacagctcctaacttctagtaactatgatgatgatgaaaagaaagtgacaggtggtcgaaatggctatggagccaaattgtgtaacatattcagtaccaaatttactgtggaaacagccagtagagaatacaagaaaatgttcaaacagacatggatggataatatgggaagagctggtgagatggaactcaagcccttcaatggagaagattatacatgtatcacctttcagcctgatttgtctaagtttaaaatgcaaagcctggacaaagatattgttgcactaatggtcagaagagcatatgatattgctggatccaccaaagatgtcaaagtctttcttaatggaaataaactgccagtaaaaggatttcgtagttatgtggacatgtatttgaaggacaagttggatgaaactggtaactccttgaaagtaatacatgaacaagtaaaccacaggtgggaagtgtgtttaactatgagtgaaaaaggctttcagcaaattagctttgtcaacagcattgctacatccaagggtggcagacatgttgattatgtagctgatcagattgtgactaaacttgttgatgttgtgaagaagaagaacaagggtggtgttgcagtaaaagcacatcaggtgaaaaatcacatgtggatttttgtaaatgccttaattgaaaacccaacctttgactctcagacaaaagaaaacatgactttacaacccaagagctttggatcaacatgccaattgagtgaaaaatttatcaaagctgccattggctgtggtattgtagaaagcatactaaactgggtgaagtttaaggcccaagtccagttaaacaagaagtgttcagctgtaaaacataatagaatcaagggaattcccaaactcgatgatgccaatgatgcagggggccgaaactccactgagtgtacgcttatcctgactgagggagattcagccaaaactttggctgtttcaggccttggtgtggttgggagagacaaatatggggttttccctcttagaggaaaaatactcaatgttcgagaagcttctcataagcagatcatggaaaatgctgagattaacaatatcatcaagattgtgggtcttcagtacaagaaaaactatgaagatgaagattcattgaagacgcttcgttatgggaagataatgattatgacagatcaggaccaagatggttcccacatcaaaggcttgctgattaattttatccatcacaactggccctctcttctgcgacatcgttttctggaggaatttatcactcccattgtaaaggtatctaaaaacaagcaagaaatggcattttacagccttcctgaatttgaagagtggaagagttctactccaaatcataaaaaatggaaagtcaaatattacaaaggtttgggcaccagcacatcaaaggaagctaaagaatactttgcagatatgaaaagacatcgtatccagttcaaatattctggtcctgaagatgatgctgctatcagcctggcctttagcaaaaaacagatagatgatcgaaaggaatggttaactaatttcatggaggatagaagacaacgaaagttacttgggcttcctgaggattacttgtatggacaaactaccacatatctgacatataatgacttcatcaacaaggaacttatcttgttctcaaattctgataacgagagatctatcccttctatggtggatggtttgaaaccaggtcagagaaaggttttgtttacttgcttcaaacggaatgacaagcgagaagtaaaggttgcccaattagctggatcagtggctgaaatgtcttcttatcatcatggtgagatgtcactaatgatgaccattatcaatttggctcagaattttgtgggtagcaataatctaaacctcttgcagcccattggtcagtttggtaccaggctacatggtggcaaggattctgctagtccacgatacatctttacaatgctcagctctttggctcgattgttatttccaccaaaagatgatcacacgttgaagtttttatatgatgacaaccagcgtgttgagcctgaatggtacattcctattattcccatggtgctgataaatggtgctgaaggaatcggtactgggtggtcctgcaaaatccccaactttgatgtgcgtgaaattgtaaataacatcaggcgtttgatggatggagaagaacctttgccaatgcttccaagttacaagaacttcaagggtactattgaagaactggctccaaatcaatatgtgattagtggtgaagtagctattcttaattctacaaccattgaaatctcagagcttcccgtcagaacatggacccagacatacaaagaacaagttctagaacccatgttgaatggcaccgagaagacacctcctctcataacagactatagggaataccatacagataccactgtgaaatttgttgtgaagatgactgaagaaaaactggcagaggcagagagagttggactacacaaagtcttcaaactccaaactagtctcacatgcaactctatggtgctttttgaccacgtaggctgtttaaagaaatatgacacggtgttggatattctaagagacttttttgaactcagacttaaatattatggattaagaaaagaatggctcctaggaatgcttggtgctgaatctgctaaactgaataatcaggctcgctttatcttagagaaaatagatggcaaaataatcattgaaaataagcctaagaaagaattaattaaagttctgattcagaggggatatgattcggatcctgtgaaggcctggaaagaagcccagcaaaaggttccagatgaagaagaaaatgaagagagtgacaacgaaaaggaaactgaaaagagtgactccgtaacagattctggaccaaccttcaactatcttcttgatatgcccctttggtatttaaccaaggaaaagaaagatgaactctgcaggctaagaaatgaaaaagaacaagagctggacacattaaaaagaaagagtccatcagatttgtggaaagaagacttggctacatttattgaagaattggaggctgttgaagccaaggaaaaacaagatgaacaagtcggacttcctgggaaaggggggaaggccaaggggaaaaaaacacaaatggctgaagttttgccttctccgcgtggtcaaagagtcattccacgaataaccatagaaatgaaagcagaggcagaaaagaaaaataaaaagaaaattaagaatgaaaatactgaaggaagccctcaagaagatggtgtggaactagaaggcctaaaacaaagattagaaaagaaacagaaaagagaaccaggtacaaagacaaagaaacaaactacattggcatttaagccaatcaaaaaaggaaagaagagaaatccctggtctgattcagaatcagataggagcagtgacgaaagtaattttgatgtccctccacgagaaacagagccacggagagcagcaacaaaaacaaaattcacaatggatttggattcagatgaagatttctcagattttgatgaaaaaactgatgatgaagattttgtcccatcagatgctagtccacctaagaccaaaacttccccaaaacttagtaacaaagaactgaaaccacagaaaagtgtcgtgtcagaccttgaagctgatgatgttaagggcagtgtaccactgtcttcaagccctcctgctacacatttcccagatgaaactgaaattacaaacccagttcctaaaaagaatgtgacagtgaagaagacagcagcaaaaagtcagtcttccacctccactaccggtgccaaaaaaagggctgccccaaaaggaactaaaagggatccagctttgaattctggtgtctctcaaaagcctgatcctgccaaaaccaagaatcgccgcaaaaggaagccatccacttctgatgattctgactctaattttgagaaaattgtttcgaaagcagtcacaagcaagaaatccaagggggagagtgatgacttccatatggactttgactcagctgtggctcctcgggcaaaatctgtacgggcaaagaaacctataaagtacctggaagagtcagatgaagatgatctgttttaaaatgtgaggcgattattttaagtaattatcttaccaagcccaagactggttttaaagttacctgaagctcttaacttcctcccctctgaatttagtttggggaaggtgtttttagtacaagacatcaaagtgaagtaaagcccaagtgttctttagctttttataatactgtctaaatagtgaccatctcatgggcattgttttcttctctgctttgtctgtgttttgagtctgctttcttttgtctttaaaacctgatttttaagttcttctgaactgtagaaatagctatctgatcacttcagcgtaaagcagtgtgtttattaaccatccactaagctaaaactagagcagtttgatttaaaagtgtcactcttcctccttttctactttcagtagatatgagatagagcataattatctgttttatcttagttttatacataatttaccatcagatagaactttatggttctagtacagatactctactacactcagcctcttatgtgccaagtttttctttaagcaatgagaaattgctcatgttcttcatcttctcaaatcatcagaggccgaagaaagtagttatgtgattatttcagctcttgacctgtcccctctggctgcctctgagtctgaatctcccaaagagagaaaccaatttctaagaggactggattgcagaagactcggggacaacatttgatccaagatcttaaatgttatattgataaccatgctcagcaatgagctattagattcattttgggaaatctccataatttcaatttgtaaactttgttaagacctgtctacattgttatatgtgtgtgacttgagtaatgttatcaacgtttttgtaaatatttactatgtttttctattagctaaattccaacaattttgtactttaataaaatgttctaaacattgcaa

SEQ ID NO: 451534 - DNA, 5659 bp, Homo sapiens
aggttcaagtggagctctcctaaccgacgcgcgtctgtggagaagcggcttggtcgggggtggtctcgtggggtcctgcctgtttagtcgctttcagggttcttgagccccttcacgaccgtcaccatggaagtgtcaccattgcagcctgtaaatgaaaatatgcaagtcaacaaaataaagaaaaatgaagatgctaagaaaagactgtctgttgaaagaatctatcaaaagaaaacacaattggaacatattttgctccgcccagacacctacattggttctgtggaattagtgacccagcaaatgtgggtttacgatgaagatgttggcattaactatagggaagtcacttttgttcctggtttgtacaaaatctttgatgagattctagttaatgctgcggacaacaaacaaagggacccaaaaatgtcttgtattagagtcacaattgatccggaaaacaatttaattagtatatggaataatggaaaaggtattcctgttgttgaacacaaagttgaaaagatgtatgtcccagctctcatatttggacagctcctaacttctagtaactatgatgatgatgaaaagaaagtgacaggtggtcgaaatggctatggagccaaattgtgtaacatattcagtaccaaatttactgtggaaacagccagtagagaatacaagaaaatgttcaaacagacatggatggataatatgggaagagctggtgagatggaactcaagcccttcaatggagaagattatacatgtatcacctttcagcctgatttgtctaagtttaaaatgcaaagcctggacaaagatattgttgcactaatggtcagaagagcatatgatattgctggatccaccaaagatgtcaaagtctttcttaatggaaataaactgccagtaaaaggatttcgtagttatgtggacatgtatttgaaggacaagttggatgaaactggtaactccttgaaagtaatacatgaacaagtaaaccacaggtgggaagtgtgtttaactatgagtgaaaaaggctttcagcaaattagctttgtcaacagcattgctacatccaagggtggcagacatgttgattatgtagctgatcagattgtgactaaacttgttgatgttgtgaagaagaagaacaagggtggtgttgcagtaaaagcacatcaggtgaaaaatcacatgtggatttttgtaaatgccttaattgaaaacccaacctttgactctcagacaaaagaaaacatgactttacaacccaagagctttggatcaacatgccaattgagtgaaaaatttatcaaagctgccattggctgtggtattgtagaaagcatactaaactgggtgaagtttaaggcccaagtccagttaaacaagaagtgttcagctgtaaaacataatagaatcaagggaattcccaaactcgatgatgccaatgatgcagggggccgaaactccactgagtgtacgcttatcctgactgagggagattcagccaaaactttggctgtttcaggccttggtgtggttgggagagacaaatatggggttttccctcttagaggaaaaatactcaatgttcgagaagcttctcataagcagatcatggaaaatgctgagattaacaatatcatcaagattgtgggtcttcagtacaagaaaaactatgaagatgaagattcattgaagacgcttcgttatgggaagataatgattatgacagatcaggaccaagatggttcccacatcaaaggcttgctgattaattttatccatcacaactggccctctcttctgcgacatcgttttctggaggaatttatcactcccattgtaaaggtatctaaaaacaagcaagaaatggcattttacagccttcctgaatttgaagagtggaagagttctactccaaatcataaaaaatggaaagtcaaatattacaaaggtttgggcaccagcacatcaaaggaagctaaagaatactttgcagatatgaaaagacatcgtatccagttcaaatattctggtcctgaagatgatgctgctatcagcctggcctttagcaaaaaacagatagatgatcgaaaggaatggttaactaatttcatggaggatagaagacaacgaaagttacttgggcttcctgaggattacttgtatggacaaactaccacatatctgacatataatgacttcatcaacaaggaacttatcttgttctcaaattctgataacgagagatctatcccttctatggtggatggtttgaaaccaggtcagagaaaggttttgtttacttgcttcaaacggaatgacaagcgagaagtaaaggttgcccaattagctggatcagtggctgaaatgtcttcttatcatcatggtgagatgtcactaatgatgaccattatcaatttggctcagaattttgtgggtagcaataatctaaacctcttgcagcccattggtcagtttggtaccaggctacatggtggcaaggattctgctagtccacgatacatctttacaatgctcagctctttggctcgattgttatttccaccaaaagatgatcacacgttgaagtttttatatgatgacaaccagcgtgttgagcctgaatggtacattcctattattcccatggtgctgataaatggtgctgaaggaatcggtactgggtggtcctgcaaaatccccaactttgatgtgcgtgaaattgtaaataacatcaggcgtttgatggatggagaagaacctttgccaatgcttccaagttacaagaacttcaagggtactattgaagaactggctccaaatcaatatgtgattagtggtgaagtagctattcttaattctacaaccattgaaatctcagagcttcccgtcagaacatggacccagacatacaaagaacaagttctagaacccatgttgaatggcaccgagaagacacctcctctcataacagactatagggaataccatacagataccactgtgaaatttgttgtgaagatgactgaagaaaaactggcagaggcagagagagttggactacacaaagtcttcaaactccaaactagtctcacatgcaactctatggtgctttttgaccacgtaggctgtttaaagaaatatgacacggtgttggatattctaagagacttttttgaactcagacttaaatattatggattaagaaaagaatggctcctaggaatgcttggtgctgaatctgctaaactgaataatcaggctcgctttatcttagagaaaatagatggcaaaataatcattgaaaataagcctaagaaagaattaattaaagttctgattcagaggggatatgattcggatcctgtgaaggcctggaaagaagcccagcaaaaggttccagatgaagaagaaaatgaagagagtgacaacgaaaaggaaactgaaaagagtgactccgtaacagattctggaccaaccttcaactatcttcttgatatgcccctttggtatttaaccaaggaaaagaaagatgaactctgcaggctaagaaatgaaaaagaacaagagctggacacattaaaaagaaagagtccatcagatttgtggaaagaagacttggctacatttattgaagaattggaggctgttgaagccaaggaaaaacaagatgaacaagtcggacttcctgggaaaggggggaaggccaaggggaaaaaaacacaaatggctgaagttttgccttctccgcgtggtcaaagagtcattccacgaataaccatagaaatgaaagcagaggcagaaaagaaaaataaaaagaaaattaagaatgaaaatactgaaggaagccctcaagaagatggtgtggaactagaaggcctaaaacaaagattagaaaagaaacagaaaagagaaccaggtacaaagacaaagaaacaaactacattggcatttaagccaatcaaaaataattttgatgtccctccacgagaaacagagccacggagagcagcaacaaaaacaaaattcacaatggatttggattcagatgaagatttctcagattttgatgaaaaaactgatgatgaagattttgtcccatcagatgctagtccacctaagaccaaaacttccccaaaacttagtaacaaagaactgaaaccacagaaaagtgtcgtgtcagaccttgaagctgatgatgttaagggcagtgtaccactgtcttcaagccctcctgctacacatttcccagatgaaactgaaattacaaacccagttcctaaaaagaatgtgacagtgaagaagacagcagcaaaaagtcagtcttccacctccactaccggtgccaaaaaaagggctgccccaaaaggaactaaaagggatccagctttgaattctggtgtctctcaaaagcctgatcctgccaaaaccaagaatcgccgcaaaaggaagccatccacttctgatgattctgactctaattttgagaaaattgtttcgaaagcagtcacaagcaagaaatccaagggggagagtgatgacttccatatggactttgactcagctgtggctcctcgggcaaaatctgtacgggcaaagaaacctataaagtacctggaagagtcagatgaagatgatctgttttaaaatgtgaggcgattattttaagtaattatcttaccaagcccaagactggttttaaagttacctgaagctcttaacttcctcccctctgaatttagtttggggaaggtgtttttagtacaagacatcaaagtgaagtaaagcccaagtgttctttagctttttataatactgtctaaatagtgaccatctcatgggcattgttttcttctctgctttgtctgtgttttgagtctgctttcttttgtctttaaaacctgatttttaagttcttctgaactgtagaaatagctatctgatcacttcagcgtaaagcagtgtgtttattaaccatccactaagctaaaactagagcagtttgatttaaaagtgtcactcttcctccttttctactttcagtagatatgagatagagcataattatctgttttatcttagttttatacataatttaccatcagatagaactttatggttctagtacagatactctactacactcagcctcttatgtgccaagtttttctttaagcaatgagaaattgctcatgttcttcatcttctcaaatcatcagaggccgaagaaaaacactttggctgtgtctataacttgacacagtcaatagaatgaagaaaattagagtagttatgtgattatttcagctcttgacctgtcccctctggctgcctctgagtctgaatctcccaaagagagaaaccaatttctaagaggactggattgcagaagactcggggacaacatttgatccaagatcttaaatgttatattgataaccatgctcagcaatgagctattagattcattttgggaaatctccataatttcaatttgtaaactttgttaagacctgtctacattgttatatgtgtgtgacttgagtaatgttatcaacgtttttgtaaatatttactatgtttttctattagctaaattccaacaattttgtactttaataaaatgttctaaacattgcaa

SEQ ID NO: 451535 - DNA, 5670 bp, Homo sapiens
aggttcaagtggagctctcctaaccgacgcgcgtctgtggagaagcggcttggtcgggggtggtctcgtggggtcctgcctgtttagtcgctttcagggttcttgagccccttcacgaccgtcaccatggaagtgtcaccattgcagcctgtaaatgaaaatatgcaagtcaacaaaataaagaaaaatgaagatgctaagaaaagactgtctgttgaaagaatctatcaaaagaaaacacaattggaacatattttgctccgcccagacacctacattggttctgtggaattagtgacccagcaaatgtgggtttacgatgaagatgttggcattaactatagggaagtcacttttgttcctggtttgtacaaaatctttgatgagattctagttaatgctgcggacaacaaacaaagggacccaaaaatgtcttgtattagagtcacaattgatccggaaaacaatttaattagtatatggaataatggaaaaggtattcctgttgttgaacacaaagttgaaaagatgtatgtcccagctctcatatttggacagctcctaacttctagtaactatgatgatgatgaaaagaaagtgacaggtggtcgaaatggctatggagccaaattgtgtaacatattcagtaccaaatttactgtggaaacagccagtagagaatacaagaaaatgttcaaacagacatggatggataatatgggaagagctggtgagatggaactcaagcccttcaatggagaagattatacatgtatcacctttcagcctgatttgtctaagtttaaaatgcaaagcctggacaaagatattgttgcactaatggtcagaagagcatatgatattgctggatccaccaaagatgtcaaagtctttcttaatggaaataaactgccagtaaaaggatttcgtagttatgtggacatgtatttgaaggacaagttggatgaaactggtaactccttgaaagtaatacatgaacaagtaaaccacaggtgggaagtgtgtttaactatgagtgaaaaaggctttcagcaaattagctttgtcaacagcattgctacatccaagggtggcagacatgttgattatgtagctgatcagattgtgactaaacttgttgatgttgtgaagaagaagaacaagggtggtgttgcagtaaaagcacatcaggtgaaaaatcacatgtggatttttgtaaatgccttaattgaaaacccaacctttgactctcagacaaaagaaaacatgactttacaacccaagagctttggatcaacatgccaattgagtgaaaaatttatcaaagctgccattggctgtggtattgtagaaagcatactaaactgggtgaagtttaaggcccaagtccagttaaacaagaagtgttcagctgtaaaacataatagaatcaagggaattcccaaactcgatgatgccaatgatgcagggggccgaaactccactgagtgtacgcttatcctgactgagggagattcagccaaaactttggctgtttcaggccttggtgtggttgggagagacaaatatggggttttccctcttagaggaaaaatactcaatgttcgagaagcttctcataagcagatcatggaaaatgctgagattaacaatatcatcaagattgtgggtcttcagtacaagaaaaactatgaagatgaagattcattgaagacgcttcgttatgggaagataatgattatgacagatcaggaccaagatggttcccacatcaaaggcttgctgattaattttatccatcacaactggccctctcttctgcgacatcgttttctggaggaatttatcactcccattgtaaaggtatctaaaaacaagcaagaaatggcattttacagccttcctgaatttgaagagtggaagagttctactccaaatcataaaaaatggaaagtcaaatattacaaaggtttgggcaccagcacatcaaaggaagctaaagaatactttgcagatatgaaaagacatcgtatccagttcaaatattctggtcctgaagatgatgctgctatcagcctggcctttagcaaaaaacagatagatgatcgaaaggaatggttaactaatttcatggaggatagaagacaacgaaagttacttgggcttcctgaggattacttgtatggacaaactaccacatatctgacatataatgacttcatcaacaaggaacttatcttgttctcaaattctgataacgagagatctatcccttctatggtggatggtttgaaaccaggtcagagaaaggttttgtttacttgcttcaaacggaatgacaagcgagaagtaaaggttgcccaattagctggatcagtggctgaaatgtcttcttatcatcatggtgagatgtcactaatgatgaccattatcaatttggctcagaattttgtgggtagcaataatctaaacctcttgcagcccattggtcagtttggtaccaggctacatggtggcaaggattctgctagtccacgatacatctttacaatgctcagctctttggctcgattgttatttccaccaaaagatgatcacacgttgaagtttttatatgatgacaaccagcgtgttgagcctgaatggtacattcctattattcccatggtgctgataaatggtgctgaaggaatcggtactgggtggtcctgcaaaatccccaactttgatgtgcgtgaaattgtaaataacatcaggcgtttgatggatggagaagaacctttgccaatgcttccaagttacaagaacttcaagggtactattgaagaactggctccaaatcaatatgtgattagtggtgaagtagctattcttaattctacaaccattgaaatctcagagcttcccgtcagaacatggacccagacatacaaagaacaagttctagaacccatgttgaatggcaccgagaagacacctcctctcataacagactatagggaataccatacagataccactgtgaaatttgttgtgaagatgactgaagaaaaactggcagaggcagagagagttggactacacaaagtcttcaaactccaaactagtctcacatgcaactctatggtgctttttgaccacgtaggctgtttaaagaaatatgacacggtgttggatattctaagagacttttttgaactcagacttaaatattatggattaagaaaagaatggctcctaggaatgcttggtgctgaatctgctaaactgaataatcaggctcgctttatcttagagaaaatagatggcaaaataatcattgaaaataagcctaagaaagaattaattaaagttctgattcagaggggatatgattcggatcctgtgaaggcctggaaagaagcccagcaaaaggttccagatgaagaagaaaatgaagagagtgacaacgaaaaggaaactgaaaagagtgactccgtaacagattctggaccaaccttcaactatcttcttgatatgcccctttggtatttaaccaaggaaaagaaagatgaactctgcaggctaagaaatgaaaaagaacaagagctggacacattaaaaagaaagagtccatcagatttgtggaaagaagacttggctacatttattgaagaattggaggctgttgaagccaaggaaaaacaagatgaacaagtcggacttcctgggaaaggggggaaggccaaggggaaaaaaacacaaatggctgaagttttgccttctccgcgtggtcaaagagtcattccacgaataaccatagaaatgaaagcagaggcagaaaagaaaaataaaaagaaaattaagaatgaaaatactgaaggaagccctcaagaagatggtgtggaactagaaggcctaaaacaaagattagaaaagaaacagaaaagagaaccaggtacaaagacaaagaaacaaactacattggcatttaagccaatcaaaaaaggaaagaagagaaatccctggtctgattcagaatcagataggagcagtgacgaaagtaattttgatgtccctccacgagaaacagagccacggagagcagcaacaaaaacaaaattcacaatggatttggattcagatgaagatttctcagattttgatgaaaaaactgatgatgaagattttgtcccatcagatgctagtccacctaagaccaaaacttccccaaaacttagtaacaaagaactgaaaccacagaaaagtgtcgtgtcagaccttgaagctgatgatgttaagggcagtgtaccactgtcttcaagccctcctgctacacatttcccagatgaaactgaaattacaaacccagttcctaaaaagaatgtgacagtgaagaagacagcagcaaaaagtcagtcttccacctccactaccggtgccaaaaaaagggctgccccaaaaggaactaaaagggatccagctttgaattctggtgtctctcaaaagcctgatcctgccaaaaccaagaatcgccgcaaaaggaagccatccacttctgatgattctgactctaattttgagaaaattgtttcgaaagcagtcacaagcaagaaatccaagggggagagtgatgacttccatatggactttgactcagctgtggctcctcgggcaaaatctgtacgggcaaagaaacctataaagtacctggaagagtcagatgaagatgatctgttttaaaatttttaaagttacctgaagctcttaacttcctcccctctgaatttagtttggggaaggtgtttttagtacaagacatcaaagtgaagtaaagcccaagtgttctttagctttttataatactgtctaaatagtgaccatctcatgggcattgttttcttctctgctttgtctgtgttttgagtctgctttcttttgtctttaaaacctgatttttaagttcttctgaactgtagaaatagctatctgatcacttcagcgtaaagcagtgtgtttattaaccatccactaagctaaaactagagcagtttgatttaaaagtgtcactcttcctccttttctactttcagtagatatgagatagagcataattatctgttttatcttagttttatacataatttaccatcagatagaactttatggttctagtacagatactctactacactcagcctcttatgtgccaagtttttctttaagcaatgagaaattgctcatgttcttcatcttctcaaatcatcagaggccgaagaaaaacactttggctgtgtctataacttgacacagtcaatagaatgaagaaaattagagtagttatgtgattatttcagctcttgacctgtcccctctggctgcctctgagtctgaatctcccaaagagagaaaccaatttctaagaggactggattgcagaagactcggggacaacatttgatccaagatcttaaatgttatattgataaccatgctcagcaatgagctattagattcattttgggaaatctccataatttcaatttgtaaactttgttaagacctgtctacattgttatatgtgtgtgacttgagtaatgttatcaacgtttttgtaaatatttactatgtttttctattagctaaattccaacaattttgtactttaataaaatgttctaaacattgcaa

SEQ ID NO: 451536 - DNA, 2950 bp, Homo sapiens
ctgagatttcaatggttgtagaattaagaatagctacttcaccactaatcacagagcttccatgttctgacgggaagctctgagatttcaatggttgtagaattaagaatagctacttcaccactaatcacagagcttcccgtcagaacatggacccagacatacaaagaacaagttctagaacccatgttgaatggcaccgagaagacacctcctctcataacagactatagggaataccatacagataccactgtgaaatttgttgtgaagatgactgaagaaaaactggcagaggcagagagagttggactacacaaagtcttcaaactccaaactagtctcacatgcaactctatggtgctttttgaccacgtaggctgtttaaagaaatatgacacggtgttggatattctaagagacttttttgaactcagacttaaatattatggattaagaaaagaatggctcctaggaatgcttggtgctgaatctgctaaactgaataatcaggctcgctttatcttagagaaaatagatggcaaaataatcattgaaaataagcctaagaaagaattaattaaagttctgattcagaggggatatgattcggatcctgtgaaggcctggaaagaagcccagcaaaaggttccagatgaagaagaaaatgaagagagtgacaacgaaaaggaaactgaaaagagtgactccgtaacagattctggaccaaccttcaactatcttcttgatatgcccctttggtatttaaccaaggaaaagaaagatgaactctgcaggctaagaaatgaaaaagaacaagagctggacacattaaaaagaaagagtccatcagatttgtggaaagaagacttggctacatttattgaagaattggaggctgttgaagccaaggaaaaacaagatgaacaagtcggacttcctgggaaaggggggaaggccaaggggaaaaaaacacaaatggctgaagttttgccttctccgcgtggtcaaagagtcattccacgaataaccatagaaatgaaagcagaggcagaaaagaaaaataaaaagaaaattaagaatgaaaatactgaaggaagccctcaagaagatggtgtggaactagaaggcctaaaacaaagattagaaaagaaacagaaaagagaaccaggtacaaagacaaagaaacaaactacattggcatttaagccaatcaaaaaaggaaagaagagaaatccctggtctgattcagaatcagataggagcagtgacgaaagtaattttgatgtccctccacgagaaacagagccacggagagcagcaacaaaaacaaaattcacaatggatttggattcagatgaagatttctcagattttgatgaaaaaactgatgatgaagattttgtcccatcagatgctagtccacctaagaccaaaacttccccaaaacttagtaacaaagaactgaaaccacagaaaagtgtcgtgtcagaccttgaagctgatgatgttaagggcagtgtaccactgtcttcaagccctcctgctacacatttcccagatgaaactgaaattacaaacccagttcctaaaaagaatgtgacagtgaagaagacagcagcaaaaagtcagtcttccacctccactaccggtgccaaaaaaagggctgccccaaaaggaactaaaagggatccagctttgaattctggtgtctctcaaaagcctgatcctgccaaaaccaagaatcgccgcaaaaggaagccatccacttctgatgattctgactctaattttgagaaaattgtttcgaaagcagtcacaagcaagaaatccaagggggagagtgatgacttccatatggactttgactcagctgtggctcctcgggcaaaatctgtacgggcaaagaaacctataaagtacctggaagagtcagatgaagatgatctgttttaaaatgtgaggcgattattttaagtaattatcttaccaagcccaagactggttttaaagttacctgaagctcttaacttcctcccctctgaatttagtttggggaaggtgtttttagtacaagacatcaaagtgaagtaaagcccaagtgttctttagctttttataatactgtctaaatagtgaccatctcatgggcattgttttcttctctgctttgtctgtgttttgagtctgctttcttttgtctttaaaacctgatttttaagttcttctgaactgtagaaatagctatctgatcacttcagcgtaaagcagtgtgtttattaaccatccactaagctaaaactagagcagtttgatttaaaagtgtcactcttcctccttttctactttcagtagatatgagatagagcataattatctgttttatcttagttttatacataatttaccatcagatagaactttatggttctagtacagatactctactacactcagcctcttatgtgccaagtttttctttaagcaatgagaaattgctcatgttcttcatcttctcaaatcatcagaggccgaagaaaaacactttggctgtgtctataacttgacacagtcaatagaatgaagaaaattagagtagttatgtgattatttcagctcttgacctgtcccctctggctgcctctgagtctgaatctcccaaagagagaaaccaatttctaagaggactggattgcagaagactcggggacaacatttgatccaagatcttaaatgttatattgataaccatgctcagcaatgagctattagattcattttgggaaatctccataatttcaatttgtaaactttgttaagacctgtctacattgttatatgtgtgtgacttgagtaatgttatcaacgtttttgtaaatatttactatgtttttctattagctaaattccaacaattttgtactttaataaaatgttctaaacattgcaa

SEQ ID NO: 451537 - DNA, 1928 bp, Homo sapiens
aaggatccccctcctatctgaatccagatgtaagaaagaagaaaaaaagaaaattaagaatgaaaatactgaaggaagccctcaagaagatggtgtggaactagaaggcctaaaacaaagattagaaaagaaacagaaaagagaaccaggtacaaagacaaagaaacaaactacattggcatttaagccaatcaaaaaaggaaagaagagaaatccctggtctgattcagaatcagataggagcagtgacgaaagtaattttgatgtccctccacgagaaacagagccacggagagcagcaacaaaaacaaaattcacaatggatttggattcagatgaagatttctcagattttgatgaaaaaactgatgatgaagattttgtcccatcagatgctagtccacctaagaccaaaacttccccaaaacttagtaacaaagaactgaaaccacagaaaagtgtcgtgtcagaccttgaagctgatgatgttaagggcagtgtaccactgtcttcaagccctcctgctacacatttcccagatgaaactgaaattacaaacccagttcctaaaaagaatgtgacagtgaagaagacagcagcaaaaagtcagtcttccacctccactaccggtgccaaaaaaagggctgccccaaaaggaactaaaagggatccagctttgaattctggtgtctctcaaaagcctgatcctgccaaaaccaagaatcgccgcaaaaggaagccatccacttctgatgattctgactctaattttgagaaaattgtttcgaaagcagtcacaagcaagaaatccaagggggagagtgatgacttccatatggactttgactcagctgtggctcctcgggcaaaatctgtacgggcaaagaaacctataaagtacctggaagagtcagatgaagatgatctgttttaaaatgtgaggcgattattttaagtaattatcttaccaagcccaagactggttttaaagttacctgaagctcttaacttcctcccctctgaatttagtttggggaaggtgtttttagtacaagacatcaaagtgaagtaaagcccaagtgttctttagctttttataatactgtctaaatagtgaccatctcatgggcattgttttcttctctgctttgtctgtgttttgagtctgctttcttttgtctttaaaacctgatttttaagttcttctgaactgtagaaatagctatctgatcacttcagcgtaaagcagtgtgtttattaaccatccactaagctaaaactagagcagtttgatttaaaagtgtcactcttcctccttttctactttcagtagatatgagatagagcataattatctgttttatcttagttttatacataatttaccatcagatagaactttatggttctagtacagatactctactacactcagcctcttatgtgccaagtttttctttaagcaatgagaaattgctcatgttcttcatcttctcaaatcatcagaggccgaagaaaaacactttggctgtgtctataacttgacacagtcaatagaatgaagaaaattagagtagttatgtgattatttcagctcttgacctgtcccctctggctgcctctgagtctgaatctcccaaagagagaaaccaatttctaagaggactggattgcagaagactcggggacaacatttgatccaagatcttaaatgttatattgataaccatgctcagcaatgagctattagattcattttgggaaatctccataatttcaatttgtaaactttgttaagacctgtctacattgttatatgtgtgtgacttgagtaatgttatcaacgtttttgtaaatatttactatgtttttctattagctaaattccaacaattttgtactttaataaaatgttctaaacattgcaa

SEQ ID NO: 451538 - DNA, 3501 bp, Homo sapiens
  misc_feature (3328)..(3328): n is a, c, g, or t
  misc_feature (3333)..(3334): n is a, c, g, or t
  misc_feature (3337)..(3337): n is a, c, g, or t
  misc_feature (3341)..(3341): n is a, c, g, or t
  misc_feature (3351)..(3351): n is a, c, g, or t
aggttcaagtggagctctcctaaccgacgcgcgtctgtggagaagcggcttggtcgggggtggtctcgtggggtcctgcctgtttagtcgctttcagggttcttgagccccttcacgaccgtcaccatggaagtgtcaccattgcagcctgtaaatgaaaatatgcaagtcaacaaaataaagaaaaatgaagatgctaagaaaagactgtctgttgaaagaatctatcaaaagaaaacacaattggaacatattttgctccgcccagacacctacattggttctgtggaattagtgacccagcaaatgtgggtttacgatgaagatgttggcattaactatagggaagtcacttttgttcctggtttgtacaaaatctttgatgagattctagttaatgctgcggacaacaaacaaagggacccaaaaatgtcttgtattagagtcacaattgatccggaaaacaatttaattagtatatggaataatggaaaaggtattcctgttgttgaacacaaagttgaaaagatgtatgtcccagctctcatatttggacagctcctaacttctagtaactatgatgatgatgaaaagaaagtgacaggtggtcgaaatggctatggagccaaattgtgtaacatattcagtaccaaatttactgtggaaacagccagtagagaatacaagaaaatgttcaaacagacatggatggataatatgggaagagctggtgagatggaactcaagcccttcaatggagaagattatacatgtatcacctttcagcctgatttgtctaagtttaaaatgcaaagcctggacaaagatattgttgcactaatggtcagaagagcatatgatattgctggatccaccaaagatgtcaaagtctttcttaatggaaataaactgccagtaaaaggatttcgtagttatgtggacatgtatttgaaggacaagttggatgaaactggtaactccttgaaagtaatacatgaacaagtaaaccacaggtgggaagtgtgtttaactatgagtgaaaaaggctttcagcaaattagctttgtcaacagcattgctacatccaagggtggcagacatgttgattatgtagctgatcagattgtgactaaacttgttgatgttgtgaagaagaagaacaagggtggtgttgcagtaaaagcacatcaggtgaaaaatcacatgtggatttttgtaaatgccttaattgaaaacccaacctttgactctcagacaaaagaaaacatgactttacaacccaagagctttggatcaacatgccaattgagtgaaaaatttatcaaagctgccattggctgtggtattgtagaaagcatactaaactgggtgaagtttaaggcccaagtccagttaaacaagaagtgttcagctgtaaaacataatagaatcaagggaattcccaaactcgatgatgccaatgatgcagggggccgaaactccactgagtgtacgcttatcctgactgagggagattcagccaaaactttggctgtttcaggccttggtgtggttgggagagacaaatatggggttttccctcttagaggaaaaatactcaatgttcgagaagcttctcataagcagatcatggaaaatgctgagattaacaatatcatcaagattgtgggtcttcagtacaagaaaaactatgaagatgaagattcattgaagacgcttcgttatgggaagataatgattatgacagatcaggaccaagatggttcccacatcaaaggcttgctgattaattttatccatcacaactggccctctcttctgcgacatcgttttctggaggaatttatcactcccattgtaaaggtatctaaaaacaagcaagaaatggcattttacagccttcctgaatttgaagagtggaagagttctactccaaatcataaaaaatggaaagtcaaatattacaaaggtttgggcaccagcacatcaaaggaagctaaagaatactttgcagatatgaaaagacatcgtatccagttcaaatattctggtcctgaagatgatgctgctatcagcctggcctttagcaaaaaacagatagatgatcgaaaggaatggttaactaatttcatggaggatagaagacaacgaaagttacttgggcttcctgaggattacttgtatggacaaactaccacatatctgacatataatgacttcatcaacaaggaacttatcttgttctcaaattctgataacgagagatctatcccttctatggtggatggtttgaaaccaggtcagagaaaggttttgtttacttgcttcaaacggaatgacaagcgagaagtaaaggttgcccaattagctggatcagtggctgaaatgtcttcttatcatcatggtgagatgtcactaatgatgaccattatcaatttggctcagaattttgtgggtagcaataatctaaacctcttgcagcccattggtcagtttggtaccaggctacatggtggcaaggattctgctagtccacgatacatctttacaatgctcagctctttggctcgattgttatttccaccaaaagatgatcacacgttgaagtttttatatgatgacaaccagcgtgttgagcctgaatggtacattcctattattcccatggtgctgataaatggtgctgaaggaatcggtactgggtggtcctgcaaaatccccaactttgatgtgcgtgaaattgtaaataacatcaggcgtttgatggatggagaagaacctttgccaatgcttccaagttacaagaacttcaagggtactattgaagaactggctccaaatcaatatgtgattagtggtgaagtagctattcttaattctacaaccattgaaatctcagagcttcccgtcagaacatggacccagacatacaaagaacaagttctagaacccatgttgaatggcaccgagaagacacctcctctcataacagactatagggaataccatacagataccactgtgaaatttgttgtgaagatgactgaagaaaaactggcagaggcagagagagttggactacacaaagtcttcaaactccaaactagtctcacatgcaactctatggtgctttttgaccacgtaggctgtttaaagaaatatgacacggtgttggatattctaagagacttttttgaactcagacttaaatattatggattaagaaaagaatggctcctaggaatgcttggtgctgaatctgctaaactgaataatcaggctcgctttatcttagagaaaatagatggcaaaataatcattggaatangctannaanattnattaagtcgnttcagaggggaatgatcggaccgtgaaggctggaagaagccgcaaagtccatgagaaaaatggggggggcgaggaatgaagaggtcggaattgggactcattttgggtctggttaagaaaagaatggtgagaaaaaagggttaaaaaatg

SEQ ID NO: 451539 - DNA, 2404 bp, Homo sapiens
  misc_feature (2395)..(2396): n is a, c, g, or t
aggttcaagtggagctctcctaaccgacgcgcgtctgtggagaagcggcttggtcgggggtggtctcgtggggtcctgcctgtttagtcgctttcagggttcttgagccccttcacgaccgtcaccatggaagtgtcaccattgcagcctgtaaatgaaaatatgcaagtcaacaaaataaagaaaaatgaagatgctaagaaaagactgtctgttgaaagaatctatcaaaagaaaacacaattggaacatattttgctccgcccagacacctacattggttctgtggaattagtgacccagcaaatgtgggtttacgatgaagatgttggcattaactatagggaagtcacttttgttcctggtttgtacaaaatctttgatgagattctagttaatgctgcggacaacaaacaaagggacccaaaaatgtcttgtattagagtcacaattgatccggaaaacaatttaattagtatatggaataatggaaaaggtattcctgttgttgaacacaaagttgaaaagatgtatgtcccagctctcatatttggacagctcctaacttctagtaactatgatgatgatgaaaagaaagtgacaggtggtcgaaatggctatggagccaaattgtgtaacatattcagtaccaaatttactgtggaaacagccagtagagaatacaagaaaatgttcaaacagacatggatggataatatgggaagagctggtgagatggaactcaagcccttcaatggagaagattatacatgtatcacctttcagcctgatttgtctaagtttaaaatgcaaagcctggacaaagatattgttgcactaatggtcagaagagcatatgatattgctggatccaccaaagatgtcaaagtctttcttaatggaaataaactgccagtaaaaggatttcgtagttatgtggacatgtatttgaaggacaagttggatgaaactggtaactccttgaaagtaatacatgaacaagtaaaccacaggtgggaagtgtgtttaactatgagtgaaaaaggctttcagcaaattagctttgtcaacagcattgctacatccaagggtggcagacatgttgattatgtagctgatcagattgtgactaaacttgttgatgttgtgaagaagaagaacaagggtggtgttgcagtaaaagcacatcaggtgaaaaatcacatgtggatttttgtaaatgccttaattgaaaacccaacctttgactctcagacaaaagaaaacatgactttacaacccaagagctttggatcaacatgccaattgagtgaaaaatttatcaaagctgctcatttgtattctagatttctgatagatcccttcttccctaatatgatccctaatatgatcttctcgttttcaggccattggctgtggtattgtagaaagcatactaaactgggtgaagtttaaggcccaagtccagttaaacaagaagtgttcagctgtaaaacataatagaatcaagggaattcccaaactcgatgatgccaatgatgcagggggccgaaactccactgagtgtacgcttatcctgactgagggagattcagccaaaactttggctgtttcaggccttggtgtggttgggagagacaaatatggggttttccctcttagaggaaaaatactcaatgttcgagaagcttctcataagcagatcatggaaaatgctgagattaacaatatcatcaagattgtgggtcttcagtacaagaaaaactatgaagatgaagattcattgaagacgcttcgttatgggaagataatgattatgacagatcaggaccaagatggttcccacatcaaaggcttgctgattaattttatccatcacaactggccctctcttctgcgacatcgttttctggaggaatttatcactcccattgtaaaggtatctaaaaacaagcaagaaatggcattttacagccttcctgaatttgaagagtggaagagttctactccaaatcataaaaaatggaaagtcaaatattacaaaggtttgggcaccagcacatcaaaggaagctaaagaatactttgcagatatgaaaagacatcgtatccagttcaaatattctggtcctgaagatgatgctgctatcagcctggcctttagcaaaaaacagatagatgatcgaaaggaatggttaactaatttcatggaggatagaagacaacgaaagttacttgggcttcctgaggattacttgtatggacaaactaccacatatctgacatataatgacttcatcaacaaggaacttatcttgttctcaaattctgataacccaggaggaactattccccttctattgggggggaatgggttttggaaaaccccgggttcnnaaaaaaaa

SEQ ID NO: 451540 - DNA, 768 bp, Homo sapiens
caccctgcctttgttactgggaaaccgaacgcggcgctgtggctttcagcttggatcatgattctggaaggaggtggtgtaatgaatctcaaccccggcaacaacctccttcaccagccgccagcctggacagacagctactccacgtgcaatgtttccagtgggttttttggaggccagtggcatgaaattcatcctcagtactggaccaagtaccaggtgtgggagtggctccagcacctcctggacaccaaccagctggatgccaattgtatccctttccaagagttcgacatcaacggcgagcacctctgcagcatgagtttgcaggagttcacccgggcggcagggacggcggggcagctcctctacagcaacttgcagcatctgaagtggaacggtgactctctctttctgtgtctctccctaccctgctaggagccagctggaagaatagagattctgcagatgacaggattctttgtcagggacaagaaagagtggtctcacctccaaattaccatgtcccaagacagagaaatggaaggaagatgaaaggacaggattgaagcatagggtacctggtgtgcctaatcccttataaatgccagtgtaatttaattctttccttatggtgataattttcaagaagacaaaagctggctaggaattcgtagaatacttactatccttggaaaatgttttctttcctttgcaaacagtccagtcacttgcttgttaaaaagatcatcatggttacaaaaaaaa

SEQ ID NO: 451541 - DNA, 3175 bp, Homo sapiens
  misc_feature (1)..(2): n is a, c, g, or t
  misc_feature (8)..(8): n is a, c, g, or t
  misc_feature (3106)..(3106): n is a, c, g, or t
  misc_feature (3138)..(3138): n is a, c, g, or t
  misc_feature (3146)..(3146): n is a, c, g, or t
  misc_feature (3156)..(3156): n is a, c, g, or t
  misc_feature (3158)..(3158): n is a, c, g, or t
  misc_feature (3163)..(3163): n is a, c, g, or t
  misc_feature (3175)..(3175): n is a, c, g, or t
nngctcanacttgataacacccgtggtgccccatccctataggagctggtgagattgcagcctgctgcctcccctccatcaaccacagctattggatttcccacccagaatctttaggtaaatgagatcatgattctggaaggaggtggtgtaatgaatctcaaccccggcaacaacctccttcaccagccgccagcctggacagacagctactccacgtgcaatgtttccagtgggttttttggaggccagtggcatgaaattcatcctcagtactggaccaagtaccaggtgtgggagtggctccagcacctcctggacaccaaccagctggatgccaattgtatccctttccaagagttcgacatcaacggcgagcacctctgcagcatgagtttgcaggagttcacccgggcggcagggacggcggggcagctcctctacagcaacttgcagcatctgaagtggaacggccagtgcagtagtgacctgttccagtccacacacaatgtcattgtcaagactgaacaaactgagccttccatcatgaacacctggaaagacgagaactatttatatgacaccaactatggtagcacagtagatttgttggacagcaaaactttctgccgggctcagatctccatgacaaccaccagtcaccttcctgttgcagagtcacctgatatgaaaaaggagcaagacccccctgccaagtgccacaccaaaaagcacaacccgagagggactcacttatgggaattcatccgcgacatcctcttgaacccagacaagaacccaggattaataaaatgggaagaccgatctgagggcgtcttcaggttcttgaaatcagaggcagtggctcagctatggggtaaaaagaagaacaacagcagcatgacctatgaaaagctcagccgagctatgagatattactacaaaagagaaattctggagcgtgtggatggacgaagactggtatataaatttgggaagaatgcccgaggatggagagaaaatgaaaactgaagctgccaatactttggacacaaaccaaaacacacaccaaataatcagaaacaaagaactcctggacgtaaatatttcaaagactacttttctctgatatttatgtaccatgaggggaacaagaaactacttctaacgggaagaagaaacactacagtcgattaaaaaaattattttgttacttcgaagtatgtcctatatggggaaaaaacgtacacagttttctgtgaaatatgatgctgtatgtggttgtgattttttttcacctctattgtgaattctttttcactgcaagagtaacaggatttgtagccttgtgcttcttgctaagagaaagaaaaacaaaatcagagggcattaaatgttttgtatgtgacatgatttagaaaaaggtgatgcatcctcctcacataagcatccatatggcttcgtcaagggaggtgaacattgttgctgagttaaattccagggtctcagatggttaggacaaagtggatggatgccgggaagtttaacctgagccttaggatccaatgagtggagaatggggacttccaaaacccaaggttggctataatctctgcataaccacatgacttggaatgcttaaatcagcaagaagaataatggtggggtctttatactcattcaggaatggtttatctgatgccagggctgtcttcctttctcccctttggatggttggtgaaatactttaattgccctgtctgctcacttctagctatttaagagagaacccagcttggttcttttttgctccaagtgcttaaaaataagttggaaaaaggagacggtggtgtggaaatggctgaagagtttgctcttgtatccctatagtccaaggtttctcaatctgcacaattgacatttttggccggagtgttctttgtggtgagggctttcctgtgcattgtaagatgttcagcagtatccactcatggtctctaaccacttgacaccagaaaccccccagctgtgataacgcaaaatgtctctagacatcaccaaatgttccctgggggtggcaaatttgcccttgattgagaaccaccagtttagctagtcaatatgaggatggtggtttattctcagaagaaaaagatatgtaaggtcttttagctccttagagtgaagcaaaagcaagacttcaacctcaacctatctttatgttttaaatgttagggacaataagttgaaatagctagaggagcttcttttcagaaccccagatgagagccaatgtcagataaagtaagcatagcaatgtagcaggaactacaatagaagacattttcactggaattacaaagcagaattaaaattatattgtagaaggaaacaccaagaaaagaatttccagggaaaatcctctttgcaggtattaattcttataattttttgtcttttggattatctgtttactgtctcatctgaactgatcccaggtgaacggtttattgcctagatttgtactcagaggaattttttttgttttgttttgtcttttaagaaaggaaagaaaggatgaaaaaaataaacagaaaactcagctcaggcacaattgtcaccaaggagttaaaagcttcttcttcaatagaggaattgttctgggggtcctggagacttaccattgagccatgcaatctgggaagcacaggaataagtagacactttgaaaatggatttgaatgttctcatcccttttgcagcttttctttttggctctctcatgtccttggcttgctcctctattctacctctctttctccagcaataatatgcaaatgaagacatgtatccataagaaggagtgctcttcatcaactaatagagcacctaccacagtgtcatacctggtagaggtgagcaattcatattcaaaggttgcaaagtgtttgtaatatattcatgaggctggaagtaagaagaattaaaaatttgtcctaattacaatgagaaccattctaggtagtgatcttggagcacacatgaataactttctgaaggtgcaaccaaatccatttttatttctgcctggcttggtcacctctgnggaggatggggcttagatagtatcgaatgacnattactgngaaaaacttnanaaaanagcgagggggcn

SEQ ID NO: 451542 - DNA, 4890 bp, Homo sapiens
  misc_feature (914)..(914): n is a, c, g, or t
  misc_feature (1034)..(1034): n is a, c, g, or t
  misc_feature (1142)..(1142): n is a, c, g, or t
  misc_feature (2224)..(2224): n is a, c, g, or t
  misc_feature (2362)..(2362): n is a, c, g, or t
  misc_feature (2515)..(2515): n is a, c, g, or t
  misc_feature (2561)..(2561): n is a, c, g, or t
  misc_feature (3149)..(3149): n is a, c, g, or t
  misc_feature (4227)..(4227): n is a, c, g, or t
ctgggtgtgcaggtgcgattgcagtccgagctcccacacaggtgctggggctgtgctgccaccagcttggattttcattgtttgaaattgcactttaaatactttaaataaaatctccttggcattttcacttttgtaaaaaaaaaaaaaaaaaaaaaccgcttggatgccagccagcctcgccctgggagcaggtattgcattttcctcccgcttcattcctgatcagagattattcatttatgaatgggtggctgtaaaaacttgcctcatgcatatgaaaattgaacctggaaatttttaattgctgtgagttttgcttttacaaaaaacgctttggcaatgggtggcaggcaatgggtggaaggacaaattctctttattttcttcctaaatttactctgtgatctgcactttccaatgacatttgtccaagaggcactgactgaacaggctgtttgatcccctaacagatcatgattctggaaggaggtggtgtaatgaatctcaaccccggcaacaacctccttcaccagccgccagcctggacagacagctactccacgtgcaatggtaagagggcctgtgggtgttggtgtcactgctgtgctgtgtgggctctttgctttaattcctctcacaacctaatgtttgaaaaatataggctttacagcagaagatgtgggacaagaaggaatggagaaaactcagttttggagttccctaccagcccccagcgttccagacaaaagctcgtttgagatattctattgcctcctcccaaaattcaaggttccagattgacagcctggcagtgaaggggggtagaagagatgcctaaaggaaagactctctgttggagcttttaatagtgttttgctgggatatcaagataggctaggagagaaagggtntgtgtgtgtgtgtgtgtgtgtgtgtgtgtatgtgcgcgtgcatggaggttaggaaggagagggttatagcagttcaatctttcttttttcgtcttccagtggcctctctttgcaaggggngaggagatttgtaaggagaacaggtgttctccctagagctttaatctagaacacgtctattagaagaagaggggacctggtggtggggcgtatagagggtttggtgancaagcctgtggcttcctgaatcaagttgaatccctgaatcaagttgaatctctgaatcaagttgttgctgaatcgggaaccccataccccaatttagagctctccagtttaggcattcagctgtgcatccaacagcagtgagtttagggagctctgggcctcttctcaatccacacccactgctaatctgcctgccagaggctctgctgttcaagtttgctttgaaatatggagatggtttgttggtgaccagagcttgggaggaggcagaagtgggaggataatgggagagttattctgcagcgagtgctaatccatgtggagctccacctcttttaatttggaatcctagtcaaacatggttgaaagggtgagcaggtgagcttcccttactcggtcacctgtccccccaaactgctgcactttctgggcagttgcattttctgttgtgggcctcaaataccctgtgaggacccagaaagtggattccaaataaaactggaagtctttggcatccccaggaccctggcctctcgatgaaggcagcatttctcctgcttgctctggagaaagctggggaaatgtgttcagcaggaagtagaactggggtgccacttttatttcttaaattccagagacctcaaagaaagctcagccttgattgagactgaagaggaaaaggagatcagttgaatggcagagaggatgtgaactcataggaatttttattgtttctcctgaaacttcaggaatttggtgggttctctgtctgatgcggaatctccccagtcagcttcagacaaaaatccctgattctcccaagtttgaacaagatacactagcagggactatcttttaatctagaccgtatcaagtttgcagatgagattattctagatgtgctgttaggttattaaaagttggtgcctcttgttgtcaaaaccagagctgtactgtcatagcaacacaattattttagaaaaagaaagatgaaagacttggggagccacaaaatatatatcccatccttaaacagctttatttgtgaggcaccaaaaattgggggaaatggaaagatccancccaaggtctgtgtatttgggactatttccatataattagatttttagattagattgttccattcctcccccaacccctgactattggcttcctctttagagcccacgttgtgggccaggggctgcttttgtttcgcnatgaggtacgaggagctaagtgcatactgtgagtggtgggtattactaacggcagtcacctctgtgtgctagataaacttgacctcctgctcttagtgcttctgaggtctggaagccatggatggattctgaatgaatgaggaagaagagggnttgggtcagaaacatttccctttcagtctctcctctgagggtgttntgggctggaccatgggcattatgggagttaaacctttctgaggcctttagctacttgtaattcgatagaccagcaacatcagcatcacatggaagcttgctaggaatgcagaaactcaggccttgccccagacctgttgaatcagaatcggcatttgaacagtattccctggtgattcacgatcacgtttgagaagaactgatctggcgtgaccttgaagaaaaagttagagacagttttcttgcactacattttcttctactggtccacccttgaatttgttggaatatccatgtgtcacgttctgttggatttcccctgcttcagcttggtgggatgcaatagtctttgccccttgcccctttcactcatctttcctgaaagagagttccttcccaacatctatttccaagggaactgtaagctctctcagccctgttacatgccctcagatgctggtttgtcttttccattgccgcagaacttcgggcagactatggaatgtttttttaagtgagcatgagtcacatatacagatggttagcacatattaggttcagcaatatttatccagtttaatgaactgcncttcttcattggtatctgaatgtaccatcttgtgaatgtaccatcttttaaatgtacctcccaactcctcagatgcctaccttatttcttcttcaaaaatacattccattaaataaatatatggtgagcatctactatgacaaagtctctgaggtcattttttaggtgatacaaagacaagtaaaacagtctgtgacctcaagcatacaatttacaaaggagaataagacggcacttagagacctgtacagaaaagcagaacatgacaaagccattagaaataccaagcatgtctcctggagggtaagaggacagtgagcccttgaagcaagttggggggattgggaatgattttacaggatggtcagagttcgaaagatgggtaggaattcaacaggagtgagaggtagaacacaagcttagctgaaagaacagcatagagaaaagacaagttattggttacttgaagaagagttagtgaagagcctcaatgcctagctaggcagctttatacctaatttcagtgggtgatgaggactactaaaggtaactgagtagggaagtgacatcatgatagctataatgactaggctggggcagtgggatatcagtccagttagtagatcaataatctggaccactttgaggaaaagcaaaggcatcgtagagaaaagaaccttaatttcaggccttatttttagttgaaaatggtctgagtttggtggtgtgtgtgtgtgtgtgtgtgtgtgtgtgtgtatgtataagagagaaaaaatgagagagagtgagtgagagagaagaggaagagaacgatttgggtatggacaataagctaataaattgctgaaatgatagcaatgctctagctttcatgatattttactttgggggaggtgggggatgagctctgagcacttcagctctcttgtcctcatccagtgtccaggggtaggtagcaggctagggaggacatgaaaatgcacttctgctccatcacccatgctggcacatacacggactgtggttgtgtctctgagatatctggcagccaacagtacatccctgtgtcagatactanggccaggaacagccaggggtcactcatgaggctgcttcctgttttgcagtttccagtgggttttttggaggccagtggcatgaaattcatcctcagtactggaccaagtaccaggtgtgggagtggctccagcacctcctggacaccaaccagctggatgccaattgtatccctttccaagagttcgacatcaacggcgagcacctctgcagcatgagtttgcaggagttcacccgggcggcagggacggcggggcagctcctctacagcaacttgcagcatctgaagtggaacggtgactctctctttctgtgtctctccctaccctgctaggagccagctggaagaatagagattctgcagatgacaggattctttgtcagggacaagaaagagtggtctcacctccaaattaccatgtcccaagacagagaaatggaaggaagatgaaaggacaggattgaagcatagggtacctggtgtgcctaatcccttataaatgccagtgtaatttaattctttccttatggtgataattttcaagaagacaaaagctggctaggaattcgtagaatacttactatccttggaaaatgttttctttcctttgcaaacagtccagtcacttgcttgttaaaaagatcatcatggttacaaaaaaaa

SEQ ID NO: 451543 - DNA, 5329 bp, Homo sapiens
  misc_feature (1)..(2): n is a, c, g, or t
  misc_feature (8)..(8): n is a, c, g, or t
nngctcanacttgataacacccgtggtgccccatccctataggagctggtgagattgcagcctgctgcctcccctccatcaaccacagctattggatttcccacccagaatctttaggtaaatgagatcatgattctggaaggaggtggtgtaatgaatctcaaccccggcaacaacctccttcaccagccgccagcctggacagacagctactccacgtgcaatgtttccagtgggttttttggaggccagtggcatgaaattcatcctcagtactggaccaagtaccaggtgtgggagtggctccagcacctcctggacaccaaccagctggatgccaattgtatccctttccaagagttcgacatcaacggcgagcacctctgcagcatgagtttgcaggagttcacccgggcggcagggacggcggggcagctcctctacagcaacttgcagcatctgaagtggaacggccagtgcagtagtgacctgttccagtccacacacaatgtcattgtcaagactgaacaaactgagccttccatcatgaacacctggaaagacgagaactatttatatgacaccaactatggtagcacagtagcagagtcacctgatatgaaaaaggagcaagacccccctgccaagtgccacaccaaaaagcacaacccgagagggactcacttatgggaattcatccgcgacatcctcttgaacccagacaagaacccaggattaataaaatgggaagaccgatctgagggcgtcttcaggttcttgaaatcagaggcagtggctcagctatggggtaaaaagaagaacaacagcagcatgacctatgaaaagctcagccgagctatgagatattactacaaaagagaaattctggagcgtgtggatggacgaagactggtatataaatttgggaagaatgcccgaggatggagagaaaatgaaaactgaagctgccaatactttggacacaaaccaaaacacacaccaaataatcagaaacaaagaactcctggacgtaaatatttcaaagactacttttctctgatatttatgtaccatgaggggaacaagaaactacttctaacgggaagaagaaacactacagtcgattaaaaaaattattttgttacttcgaagtatgtcctatatggggaaaaaacgtacacagttttctgtgaaatatgatgctgtatgtggttgtgattttttttcacctctattgtgaattctttttcactgcaagagtaacaggatttgtagccttgtgcttcttgctaagagaaagaaaaacaaaatcagagggcattaaatgttttgtatgtgacatgatttagaaaaaggtgatgcatcctcctcacataagcatccatatggcttcgtcaagggaggtgaacattgttgctgagttaaattccagggtctcagatggttaggacaaagtggatggatgccgggaagtttaacctgagccttaggatccaatgagtggagaatggggacttccaaaacccaaggttggctataatctctgcataaccacatgacttggaatgcttaaatcagcaagaagaataatggtggggtctttatactcattcaggaatggtttatctgatgccagggctgtcttcctttctcccctttggatggttggtgaaatactttaattgccctgtctgctcacttctagctatttaagagagaacccagcttggttcttttttgctccaagtgcttaaaaataagttggaaaaaggagacggtggtgtggaaatggctgaagagtttgctcttgtatccctatagtccaaggtttctcaatctgcacaattgacatttttggccggagtgttctttgtggtgagggctttcctgtgcattgtaagatgttcagcagtatccactcatggtctctaaccacttgacaccagaaaccccccagctgtgataacgcaaaatgtctctagacatcaccaaatgttccctgggggtggcaaatttgcccttgattgagaaccaccagtttagctagtcaatatgaggatggtggtttattctcagaagaaaaagatatgtaaggtcttttagctccttagagtgaagcaaaagcaagacttcaacctcaacctatctttatgttttaaatgttagggacaataagttgaaatagctagaggagcttcttttcagaaccccagatgagagccaatgtcagataaagtaagcatagcaatgtagcaggaactacaatagaagacattttcactggaattacaaagcagaattaaaattatattgtagaaggaaacaccaagaaaagaatttccagggaaaatcctctttgcaggtattaattcttataattttttgtcttttggattatctgtttactgtctcatctgaactgatcccaggtgaacggtttattgcctagatttgtactcagaggaattttttttgttttgttttgtcttttaagaaaggaaagaaaggatgaaaaaaataaacagaaaactcagctcaggcacaattgtcaccaaggagttaaaagcttcttcttcaatagaggaattgttctgggggtcctggagacttaccattgagccatgcaatctgggaagcacaggaataagtagacactttgaaaatggatttgaatgttctcatcccttttgcagcttttctttttggctctctcatgtccttggcttgctcctctattctacctctctttctccagcaataatatgcaaatgaagacatgtatccataagaaggagtgctcttcatcaactaatagagcacctaccacagtgtcatacctggtagaggtgagcaattcatattcaaaggttgcaaagtgtttgtaatatattcatgaggctggaagtaagaagaattaaaaatttgtcctaattacaatgagaaccattctaggtagtgatcttggagcacacatgaataactttctgaaggtgcaaccaaatccatttttatttctgcctggcttggtcacctctgtaaaggtttaacttagtgttgtcaagtaacagttactgaaagagctgagaaaaagaacaatgaacagcaacgatcttgactgtgcaactcagacattcctgcagaaaagacatatgttgctttacaagaaggccaaagaactatggggccttcccagcatttgactgttcattgcatagaatgaattaaatatccagttacttgaatgggtataatgcatgaatatttgtgtgtctgtgtgtgtgtctgagttgtgtgattttattaggggcatctgccaattctctcactgtggttccttctctgactttgcctgttcatcatctaaggaggctagatccttcgctgacttcaccattcctcaaacctgtaagtttctcacttcttccaaattggctttggctctttctgcaacctttccattcaagagcaatctttgctaaggagtaagtgaatgtgaagagtaccaactacaacaattctacagataattagtggattgtgttgtttgttgagagtgaaggtttcttggcatctggtgcctgattaaggcttgagtattaagttctcagcatatctctctattgtcttgacttgagtttgctgcattttctatgtgctgttcgtgacttggagaacttaaagtaatcgagctatgccaacttggggtggtaacagagtacttcccaccacagtgttgaaagggagagcaaagtcttatggataaaccctcctttcttttggggacacatggctctcacttgagaagctcacctgtgctgaatgtccacatggtcactaaacatgttatccttaaaccccccgtatgcctgagttgaaagggctctctcttattaggttttcatgggaacatgaggcagcaaatctattgctaagactttaccaggctcaaatcatctgaggctgatagatatttgacttggtaagacttaagtaaggctctggctcccaggggcataagcaacagtttcttgaatgtgccatctgagaagggagacccaggttgtgagttttcctttgaacacattggtcttttctcaaagttcctgccttgctagactgttagctctttgaggacagggactatgtcttatcaatcactattattttcctgttacctagcatgggacaagtacacaacacatatttgttcaatgaatgaatgaatgtcttctaaaagactcctctgattgggagaccatatctataattgggatgtgaatcatttcttcagtggaataagagcacaacggcacaaccttcaaggacatattatctactatgaacattttactgtgagactctttattttgccttctacttgcgctgaaatgaaaccaaaacaggccgttgggttccacaagtcaatatatgttggatgaggattctgttgccttattgggaactgtgagacttatctggtatgagaagccagtaataaacctttgacctgttttaaccaatgaagattatgaatatgttaatatgatgtaaattgctatttaagtgtaaagcagttctaagttttagtatttgggggattggtttttattatttttttcctttttgaaaaatactgagggatcttttgataaagttagtaatgcatgttagattttagttttgcaagcatgttgtttttcaaatatatcaagtatagaaaaaggtaaaacagttaagaaggaaggcaattatattattcttctgtagttaagcaaacacttgttgagtgcctgctatgtgcacggcatgggcccatatgtgtgaggagcttgtctaattatgtaggaagcaatagatctcggtagttacgtattgggcagatacttactgtatgaatgaaagaacatcacagtaatcacaatatcagagctgaattatcctcagtgtagcttcttggaattcagtttctggaactagagatagagcatttattaaaaaaaactcctgttgagactgtgtcttatgaacctctgaaacgtacaagccttcacaagtttaactaaattgggattaatctttctgtagttatctgcataattcttgtttttctttccatctggctcctgggttgacaatttgtggaaacaactctattgctactatttaaaaaaaatcagaaatctttccctttaagctatgttaaattcaaactattcctgctattcctgttttgtcaaagaattatatttttcaaaatatgtttatttgtttgatgggtcccaggaaacactaataaaaaccacagagaccagcctggaaaaaaaaaaat

SEQ ID NO: 451544 - DNA, 9448 bp, Homo sapiens
  misc_feature (914)..(914): n is a, c, g, or t
  misc_feature (1034)..(1034): n is a, c, g, or t
  misc_feature (1142)..(1142): n is a, c, g, or t
  misc_feature (2224)..(2224): n is a, c, g, or t
  misc_feature (2362)..(2362): n is a, c, g, or t
  misc_feature (2515)..(2515): n is a, c, g, or t
  misc_feature (2561)..(2561): n is a, c, g, or t
  misc_feature (3149)..(3149): n is a, c, g, or t
  misc_feature (4227)..(4227): n is a, c, g, or t
ctgggtgtgcaggtgcgattgcagtccgagctcccacacaggtgctggggctgtgctgccaccagcttggattttcattgtttgaaattgcactttaaatactttaaataaaatctccttggcattttcacttttgtaaaaaaaaaaaaaaaaaaaaaccgcttggatgccagccagcctcgccctgggagcaggtattgcattttcctcccgcttcattcctgatcagagattattcatttatgaatgggtggctgtaaaaacttgcctcatgcatatgaaaattgaacctggaaatttttaattgctgtgagttttgcttttacaaaaaacgctttggcaatgggtggcaggcaatgggtggaaggacaaattctctttattttcttcctaaatttactctgtgatctgcactttccaatgacatttgtccaagaggcactgactgaacaggctgtttgatcccctaacagatcatgattctggaaggaggtggtgtaatgaatctcaaccccggcaacaacctccttcaccagccgccagcctggacagacagctactccacgtgcaatggtaagagggcctgtgggtgttggtgtcactgctgtgctgtgtgggctctttgctttaattcctctcacaacctaatgtttgaaaaatataggctttacagcagaagatgtgggacaagaaggaatggagaaaactcagttttggagttccctaccagcccccagcgttccagacaaaagctcgtttgagatattctattgcctcctcccaaaattcaaggttccagattgacagcctggcagtgaaggggggtagaagagatgcctaaaggaaagactctctgttggagcttttaatagtgttttgctgggatatcaagataggctaggagagaaagggtntgtgtgtgtgtgtgtgtgtgtgtgtgtgtatgtgcgcgtgcatggaggttaggaaggagagggttatagcagttcaatctttcttttttcgtcttccagtggcctctctttgcaaggggngaggagatttgtaaggagaacaggtgttctccctagagctttaatctagaacacgtctattagaagaagaggggacctggtggtggggcgtatagagggtttggtgancaagcctgtggcttcctgaatcaagttgaatccctgaatcaagttgaatctctgaatcaagttgttgctgaatcgggaaccccataccccaatttagagctctccagtttaggcattcagctgtgcatccaacagcagtgagtttagggagctctgggcctcttctcaatccacacccactgctaatctgcctgccagaggctctgctgttcaagtttgctttgaaatatggagatggtttgttggtgaccagagcttgggaggaggcagaagtgggaggataatgggagagttattctgcagcgagtgctaatccatgtggagctccacctcttttaatttggaatcctagtcaaacatggttgaaagggtgagcaggtgagcttcccttactcggtcacctgtccccccaaactgctgcactttctgggcagttgcattttctgttgtgggcctcaaataccctgtgaggacccagaaagtggattccaaataaaactggaagtctttggcatccccaggaccctggcctctcgatgaaggcagcatttctcctgcttgctctggagaaagctggggaaatgtgttcagcaggaagtagaactggggtgccacttttatttcttaaattccagagacctcaaagaaagctcagccttgattgagactgaagaggaaaaggagatcagttgaatggcagagaggatgtgaactcataggaatttttattgtttctcctgaaacttcaggaatttggtgggttctctgtctgatgcggaatctccccagtcagcttcagacaaaaatccctgattctcccaagtttgaacaagatacactagcagggactatcttttaatctagaccgtatcaagtttgcagatgagattattctagatgtgctgttaggttattaaaagttggtgcctcttgttgtcaaaaccagagctgtactgtcatagcaacacaattattttagaaaaagaaagatgaaagacttggggagccacaaaatatatatcccatccttaaacagctttatttgtgaggcaccaaaaattgggggaaatggaaagatccancccaaggtctgtgtatttgggactatttccatataattagatttttagattagattgttccattcctcccccaacccctgactattggcttcctctttagagcccacgttgtgggccaggggctgcttttgtttcgcnatgaggtacgaggagctaagtgcatactgtgagtggtgggtattactaacggcagtcacctctgtgtgctagataaacttgacctcctgctcttagtgcttctgaggtctggaagccatggatggattctgaatgaatgaggaagaagagggnttgggtcagaaacatttccctttcagtctctcctctgagggtgttntgggctggaccatgggcattatgggagttaaacctttctgaggcctttagctacttgtaattcgatagaccagcaacatcagcatcacatggaagcttgctaggaatgcagaaactcaggccttgccccagacctgttgaatcagaatcggcatttgaacagtattccctggtgattcacgatcacgtttgagaagaactgatctggcgtgaccttgaagaaaaagttagagacagttttcttgcactacattttcttctactggtccacccttgaatttgttggaatatccatgtgtcacgttctgttggatttcccctgcttcagcttggtgggatgcaatagtctttgccccttgcccctttcactcatctttcctgaaagagagttccttcccaacatctatttccaagggaactgtaagctctctcagccctgttacatgccctcagatgctggtttgtcttttccattgccgcagaacttcgggcagactatggaatgtttttttaagtgagcatgagtcacatatacagatggttagcacatattaggttcagcaatatttatccagtttaatgaactgcncttcttcattggtatctgaatgtaccatcttgtgaatgtaccatcttttaaatgtacctcccaactcctcagatgcctaccttatttcttcttcaaaaatacattccattaaataaatatatggtgagcatctactatgacaaagtctctgaggtcattttttaggtgatacaaagacaagtaaaacagtctgtgacctcaagcatacaatttacaaaggagaataagacggcacttagagacctgtacagaaaagcagaacatgacaaagccattagaaataccaagcatgtctcctggagggtaagaggacagtgagcccttgaagcaagttggggggattgggaatgattttacaggatggtcagagttcgaaagatgggtaggaattcaacaggagtgagaggtagaacacaagcttagctgaaagaacagcatagagaaaagacaagttattggttacttgaagaagagttagtgaagagcctcaatgcctagctaggcagctttatacctaatttcagtgggtgatgaggactactaaaggtaactgagtagggaagtgacatcatgatagctataatgactaggctggggcagtgggatatcagtccagttagtagatcaataatctggaccactttgaggaaaagcaaaggcatcgtagagaaaagaaccttaatttcaggccttatttttagttgaaaatggtctgagtttggtggtgtgtgtgtgtgtgtgtgtgtgtgtgtgtgtatgtataagagagaaaaaatgagagagagtgagtgagagagaagaggaagagaacgatttgggtatggacaataagctaataaattgctgaaatgatagcaatgctctagctttcatgatattttactttgggggaggtgggggatgagctctgagcacttcagctctcttgtcctcatccagtgtccaggggtaggtagcaggctagggaggacatgaaaatgcacttctgctccatcacccatgctggcacatacacggactgtggttgtgtctctgagatatctggcagccaacagtacatccctgtgtcagatactanggccaggaacagccaggggtcactcatgaggctgcttcctgttttgcagtttccagtgggttttttggaggccagtggcatgaaattcatcctcagtactggaccaagtaccaggtgtgggagtggctccagcacctcctggacaccaaccagctggatgccaattgtatccctttccaagagttcgacatcaacggcgagcacctctgcagcatgagtttgcaggagttcacccgggcggcagggacggcggggcagctcctctacagcaacttgcagcatctgaagtggaacggccagtgcagtagtgacctgttccagtccacacacaatgtcattgtcaagactgaacaaactgagccttccatcatgaacacctggaaagacgagaactatttatatgacaccaactatggtagcacagtagatttgttggacagcaaaactttctgccgggctcagatctccatgacaaccaccagtcaccttcctgttgcagagtcacctgatatgaaaaaggagcaagacccccctgccaagtgccacaccaaaaagcacaacccgagagggactcacttatgggaattcatccgcgacatcctcttgaacccagacaagaacccaggattaataaaatgggaagaccgatctgagggcgtcttcaggttcttgaaatcagaggcagtggctcagctatggggtaaaaagaagaacaacagcagcatgacctatgaaaagctcagccgagctatgagatattactacaaaagagaaattctggagcgtgtggatggacgaagactggtatataaatttgggaagaatgcccgaggatggagagaaaatgaaaactgaagctgccaatactttggacacaaaccaaaacacacaccaaataatcagaaacaaagaactcctggacgtaaatatttcaaagactacttttctctgatatttatgtaccatgaggggaacaagaaactacttctaacgggaagaagaaacactacagtcgattaaaaaaattattttgttacttcgaagtatgtcctatatggggaaaaaacgtacacagttttctgtgaaatatgatgctgtatgtggttgtgattttttttcacctctattgtgaattctttttcactgcaagagtaacaggatttgtagccttgtgcttcttgctaagagaaagaaaaacaaaatcagagggcattaaatgttttgtatgtgacatgatttagaaaaaggtgatgcatcctcctcacataagcatccatatggcttcgtcaagggaggtgaacattgttgctgagttaaattccagggtctcagatggttaggacaaagtggatggatgccgggaagtttaacctgagccttaggatccaatgagtggagaatggggacttccaaaacccaaggttggctataatctctgcataaccacatgacttggaatgcttaaatcagcaagaagaataatggtggggtctttatactcattcaggaatggtttatctgatgccagggctgtcttcctttctcccctttggatggttggtgaaatactttaattgccctgtctgctcacttctagctatttaagagagaacccagcttggttcttttttgctccaagtgcttaaaaataagttggaaaaaggagacggtggtgtggaaatggctgaagagtttgctcttgtatccctatagtccaaggtttctcaatctgcacaattgacatttttggccggagtgttctttgtggtgagggctttcctgtgcattgtaagatgttcagcagtatccactcatggtctctaaccacttgacaccagaaaccccccagctgtgataacgcaaaatgtctctagacatcaccaaatgttccctgggggtggcaaatttgcccttgattgagaaccaccagtttagctagtcaatatgaggatggtggtttattctcagaagaaaaagatatgtaaggtcttttagctccttagagtgaagcaaaagcaagacttcaacctcaacctatctttatgttttaaatgttagggacaataagttgaaatagctagaggagcttcttttcagaaccccagatgagagccaatgtcagataaagtaagcatagcaatgtagcaggaactacaatagaagacattttcactggaattacaaagcagaattaaaattatattgtagaaggaaacaccaagaaaagaatttccagggaaaatcctctttgcaggtattaattcttataattttttgtcttttggattatctgtttactgtctcatctgaactgatcccaggtgaacggtttattgcctagatttgtactcagaggaattttttttgttttgttttgtcttttaagaaaggaaagaaaggatgaaaaaaataaacagaaaactcagctcaggcacaattgtcaccaaggagttaaaagcttcttcttcaatagaggaattgttctgggggtcctggagacttaccattgagccatgcaatctgggaagcacaggaataagtagacactttgaaaatggatttgaatgttctcatcccttttgcagcttttctttttggctctctcatgtccttggcttgctcctctattctacctctctttctccagcaataatatgcaaatgaagacatgtatccataagaaggagtgctcttcatcaactaatagagcacctaccacagtgtcatacctggtagaggtgagcaattcatattcaaaggttgcaaagtgtttgtaatatattcatgaggctggaagtaagaagaattaaaaatttgtcctaattacaatgagaaccattctaggtagtgatcttggagcacacatgaataactttctgaaggtgcaaccaaatccatttttatttctgcctggcttggtcacctctgtaaaggtttaacttagtgttgtcaagtaacagttactgaaagagctgagaaaaagaacaatgaacagcaacgatcttgactgtgcaactcagacattcctgcagaaaagacatatgttgctttacaagaaggccaaagaactatggggccttcccagcatttgactgttcattgcatagaatgaattaaatatccagttacttgaatgggtataatgcatgaatatttgtgtgtctgtgtgtgtgtctgagttgtgtgattttattaggggcatctgccaattctctcactgtggttccttctctgactttgcctgttcatcatctaaggaggctagatccttcgctgacttcaccattcctcaaacctgtaagtttctcacttcttccaaattggctttggctctttctgcaacctttccattcaagagcaatctttgctaaggagtaagtgaatgtgaagagtaccaactacaacaattctacagataattagtggattgtgttgtttgttgagagtgaaggtttcttggcatctggtgcctgattaaggcttgagtattaagttctcagcatatctctctattgtcttgacttgagtttgctgcattttctatgtgctgttcgtgacttggagaacttaaagtaatcgagctatgccaacttggggtggtaacagagtacttcccaccacagtgttgaaagggagagcaaagtcttatggataaaccctcctttcttttggggacacatggctctcacttgagaagctcacctgtgctgaatgtccacatggtcactaaacatgttatccttaaaccccccgtatgcctgagttgaaagggctctctcttattaggttttcatgggaacatgaggcagcaaatctattgctaagactttaccaggctcaaatcatctgaggctgatagatatttgacttggtaagacttaagtaaggctctggctcccaggggcataagcaacagtttcttgaatgtgccatctgagaagggagacccaggttgtgagttttcctttgaacacattggtcttttctcaaagttcctgccttgctagactgttagctctttgaggacagggactatgtcttatcaatcactattattttcctgttacctagcatgggacaagtacacaacacatatttgttcaatgaatgaatgaatgtcttctaaaagactcctctgattgggagaccatatctataattgggatgtgaatcatttcttcagtggaataagagcacaacggcacaaccttcaaggacatattatctactatgaacattttactgtgagactctttattttgccttctacttgcgctgaaatgaaaccaaaacaggccgttgggttccacaagtcaatatatgttggatgaggattctgttgccttattgggaactgtgagacttatctggtatgagaagccagtaataaacctttgacctgttttaaccaatgaagattatgaatatgttaatatgatgtaaattgctatttaagtgtaaagcagttctaagttttagtatttgggggattggtttttattatttttttcctttttgaaaaatactgagggatcttttgataaagttagtaatgcatgttagattttagttttgcaagcatgttgtttttcaaatatatcaagtatagaaaaaggtaaaacagttaagaaggaaggcaattatattattcttctgtagttaagcaaacacttgttgagtgcctgctatgtgcacggcatgggcccatatgtgtgaggagcttgtctaattatgtaggaagcaatagatctcggtagttacgtattgggcagatacttactgtatgaatgaaagaacatcacagtaatcacaatatcagagctgaattatcctcagtgtagcttcttggaattcagtttctggaactagagatagagcatttattaaaaaaaactcctgttgagactgtgtcttatgaacctctgaaacgtacaagccttcacaagtttaactaaattgggattaatctttctgtagttatctgcataattcttgtttttctttccatctggctcctgggttgacaatttgtggaaacaactctattgctactatttaaaaaaaatcagaaatctttccctttaagctatgttaaattcaaactattcctgctattcctgttttgtcaaagaattatatttttcaaaatatgtttatttgtttgatgggtcccaggaaacactaataaaaaccacagagaccagcctggaaaaaaaaaaat

SEQ ID NO: 451545 - DNA, 4870 bp, Homo sapiens
tagtacctgtcagtcaatacatgcttccatcatgaacactggaaagagaaactattatatacacacagagcacagtatttgttggacagcaaaactttctgccgggctcagatctccatgacaaccaccagtcaccttcctgttgcagagtcacctgatatgaaaaaggagcaagacccccctgccaagtgccacaccaaaaagcacaacccgagagggactcacttatgggaattcatccgcgacatcctcttgaacccagacaagaacccaggattaataaaatgggaagaccgatctgagggcgtcttcaggttcttgaaatcagaggcagtggctcagctatggggtaaaaagaagaacaacagcagcatgacctatgaaaagctcagccgagctatgagatattactacaaaagagaaattctggagcgtgtggatggacgaagactggtatataaatttgggaagaatgcccgaggatggagagaaaatgaaaactgaagctgccaatactttggacacaaaccaaaacacacaccaaataatcagaaacaaagaactcctggacgtaaatatttcaaagactacttttctctgatatttatgtaccatgaggggaacaagaaactacttctaacgggaagaagaaacactacagtcgattaaaaaaattattttgttacttcgaagtatgtcctatatggggaaaaaacgtacacagttttctgtgaaatatgatgctgtatgtggttgtgattttttttcacctctattgtgaattctttttcactgcaagagtaacaggatttgtagccttgtgcttcttgctaagagaaagaaaaacaaaatcagagggcattaaatgttttgtatgtgacatgatttagaaaaaggtgatgcatcctcctcacataagcatccatatggcttcgtcaagggaggtgaacattgttgctgagttaaattccagggtctcagatggttaggacaaagtggatggatgccgggaagtttaacctgagccttaggatccaatgagtggagaatggggacttccaaaacccaaggttggctataatctctgcataaccacatgacttggaatgcttaaatcagcaagaagaataatggtggggtctttatactcattcaggaatggtttatctgatgccagggctgtcttcctttctcccctttggatggttggtgaaatactttaattgccctgtctgctcacttctagctatttaagagagaacccagcttggttcttttttgctccaagtgcttaaaaataagttggaaaaaggagacggtggtgtggaaatggctgaagagtttgctcttgtatccctatagtccaaggtttctcaatctgcacaattgacatttttggccggagtgttctttgtggtgagggctttcctgtgcattgtaagatgttcagcagtatccactcatggtctctaaccacttgacaccagaaaccccccagctgtgataacgcaaaatgtctctagacatcaccaaatgttccctgggggtggcaaatttgcccttgattgagaaccaccagtttagctagtcaatatgaggatggtggtttattctcagaagaaaaagatatgtaaggtcttttagctccttagagtgaagcaaaagcaagacttcaacctcaacctatctttatgttttaaatgttagggacaataagttgaaatagctagaggagcttcttttcagaaccccagatgagagccaatgtcagataaagtaagcatagcaatgtagcaggaactacaatagaagacattttcactggaattacaaagcagaattaaaattatattgtagaaggaaacaccaagaaaagaatttccagggaaaatcctctttgcaggtattaattcttataattttttgtcttttggattatctgtttactgtctcatctgaactgatcccaggtgaacggtttattgcctagatttgtactcagaggaattttttttgttttgttttgtcttttaagaaaggaaagaaaggatgaaaaaaataaacagaaaactcagctcaggcacaattgtcaccaaggagttaaaagcttcttcttcaatagaggaattgttctgggggtcctggagacttaccattgagccatgcaatctgggaagcacaggaataagtagacactttgaaaatggatttgaatgttctcatcccttttgcagcttttctttttggctctctcatgtccttggcttgctcctctattctacctctctttctccagcaataatatgcaaatgaagacatgtatccataagaaggagtgctcttcatcaactaatagagcacctaccacagtgtcatacctggtagaggtgagcaattcatattcaaaggttgcaaagtgtttgtaatatattcatgaggctggaagtaagaagaattaaaaatttgtcctaattacaatgagaaccattctaggtagtgatcttggagcacacatgaataactttctgaaggtgcaaccaaatccatttttatttctgcctggcttggtcacctctgtaaaggtttaacttagtgttgtcaagtaacagttactgaaagagctgagaaaaagaacaatgaacagcaacgatcttgactgtgcaactcagacattcctgcagaaaagacatatgttgctttacaagaaggccaaagaactatggggccttcccagcatttgactgttcattgcatagaatgaattaaatatccagttacttgaatgggtataatgcatgaatatttgtgtgtctgtgtgtgtgtctgagttgtgtgattttattaggggcatctgccaattctctcactgtggttccttctctgactttgcctgttcatcatctaaggaggctagatccttcgctgacttcaccattcctcaaacctgtaagtttctcacttcttccaaattggctttggctctttctgcaacctttccattcaagagcaatctttgctaaggagtaagtgaatgtgaagagtaccaactacaacaattctacagataattagtggattgtgttgtttgttgagagtgaaggtttcttggcatctggtgcctgattaaggcttgagtattaagttctcagcatatctctctattgtcttgacttgagtttgctgcattttctatgtgctgttcgtgacttggagaacttaaagtaatcgagctatgccaacttggggtggtaacagagtacttcccaccacagtgttgaaagggagagcaaagtcttatggataaaccctcctttcttttggggacacatggctctcacttgagaagctcacctgtgctgaatgtccacatggtcactaaacatgttatccttaaaccccccgtatgcctgagttgaaagggctctctcttattaggttttcatgggaacatgaggcagcaaatctattgctaagactttaccaggctcaaatcatctgaggctgatagatatttgacttggtaagacttaagtaaggctctggctcccaggggcataagcaacagtttcttgaatgtgccatctgagaagggagacccaggttgtgagttttcctttgaacacattggtcttttctcaaagttcctgccttgctagactgttagctctttgaggacagggactatgtcttatcaatcactattattttcctgttacctagcatgggacaagtacacaacacatatttgttcaatgaatgaatgaatgtcttctaaaagactcctctgattgggagaccatatctataattgggatgtgaatcatttcttcagtggaataagagcacaacggcacaaccttcaaggacatattatctactatgaacattttactgtgagactctttattttgccttctacttgcgctgaaatgaaaccaaaacaggccgttgggttccacaagtcaatatatgttggatgaggattctgttgccttattgggaactgtgagacttatctggtatgagaagccagtaataaacctttgacctgttttaaccaatgaagattatgaatatgttaatatgatgtaaattgctatttaagtgtaaagcagttctaagttttagtatttgggggattggtttttattatttttttcctttttgaaaaatactgagggatcttttgataaagttagtaatgcatgttagattttagttttgcaagcatgttgtttttcaaatatatcaagtatagaaaaaggtaaaacagttaagaaggaaggcaattatattattcttctgtagttaagcaaacacttgttgagtgcctgctatgtgcacggcatgggcccatatgtgtgaggagcttgtctaattatgtaggaagcaatagatctcggtagttacgtattgggcagatacttactgtatgaatgaaagaacatcacagtaatcacaatatcagagctgaattatcctcagtgtagcttcttggaattcagtttctggaactagagatagagcatttattaaaaaaaactcctgttgagactgtgtcttatgaacctctgaaacgtacaagccttcacaagtttaactaaattgggattaatctttctgtagttatctgcataattcttgtttttctttccatctggctcctgggttgacaatttgtggaaacaactctattgctactatttaaaaaaaatcagaaatctttccctttaagctatgttaaattcaaactattcctgctattcctgttttgtcaaagaattatatttttcaaaatatgtttatttgtttgatgggtcccaggaaacactaataaaaaccacagagaccagcctggaaaaaaaaaaat

SEQ ID NO: 451546 - DNA, 881 bp, Homo sapiens
ccgtgctcccaggatggtgggagtgtgtgtttttaagatggagagtgtatgcttctgggttcaagttcacaggtgtctctgctggttatctgcactcaccttggtaacagggagaaagtgagtgaatggattccaagaacttactgatggaagtctaattcaggagttggttctgcagccatggagatcatgattctggaaggaggtggtgtaatgaatctcaaccccggcaacaacctccttcaccagccgccagcctggacagacagctactccacgtgcaatgtttccagtgggttttttggaggccagtggcatgaaattcatcctcagtactggaccaagtaccaggtgtgggagtggctccagcacctcctggacaccaaccagctggatgccaattgtatccctttccaagagttcgacatcaacggcgagcacctctgcagcatgagtttgcaggagttcacccgggcggcagggacggcggggcagctcctctacagcaacttgcagcatctgaagtggaacggccagtgcagtagtgacctgttccagtccacacacaatgtcattgtcaagactgaacaaactgagccttccatcatgaacacctggaaagacgagaactatttatatgacaccaactatggtagcacagtagatttgttggacagcaaaactttctgccgggctcagatctccatgacaaccaccagtcaccttcctgttgcagagtcacctgatatgaaaaaggagcaagactccaactcaaaaacaaaaaacaacaacaacaaaaaaagccggtcgcatggcacatgtatacatatgtaactaacctgcacaatgtgcacatgtaccctaaaacttagagtataata

SEQ ID NO: 451547 - DNA, 5398 bp, Homo sapiens
  misc_feature (1)..(2): n is a, c, g, or t
  misc_feature (8)..(8): n is a, c, g, or t
nngctcanacttgataacacccgtggtgccccatccctataggagctggtgagattgcagcctgctgcctcccctccatcaaccacagctattggatttcccacccagaatctttaggtaaatgagatcatgattctggaaggaggtggtgtaatgaatctcaaccccggcaacaacctccttcaccagccgccagcctggacagacagctactccacgtgcaatgtttccagtgggttttttggaggccagtggcatgaaattcatcctcagtactggaccaagtaccaggtgtgggagtggctccagcacctcctggacaccaaccagctggatgccaattgtatccctttccaagagttcgacatcaacggcgagcacctctgcagcatgagtttgcaggagttcacccgggcggcagggacggcggggcagctcctctacagcaacttgcagcatctgaagtggaacggccagtgcagtagtgacctgttccagtccacacacaatgtcattgtcaagactgaacaaactgagccttccatcatgaacacctggaaagacgagaactatttatatgacaccaactatggtagcacagtagatttgttggacagcaaaactttctgccgggctcagatctccatgacaaccaccagtcaccttcctgttgcagagtcacctgatatgaaaaaggagcaagacccccctgccaagtgccacaccaaaaagcacaacccgagagggactcacttatgggaattcatccgcgacatcctcttgaacccagacaagaacccaggattaataaaatgggaagaccgatctgagggcgtcttcaggttcttgaaatcagaggcagtggctcagctatggggtaaaaagaagaacaacagcagcatgacctatgaaaagctcagccgagctatgagatattactacaaaagagaaattctggagcgtgtggatggacgaagactggtatataaatttgggaagaatgcccgaggatggagagaaaatgaaaactgaagctgccaatactttggacacaaaccaaaacacacaccaaataatcagaaacaaagaactcctggacgtaaatatttcaaagactacttttctctgatatttatgtaccatgaggggaacaagaaactacttctaacgggaagaagaaacactacagtcgattaaaaaaattattttgttacttcgaagtatgtcctatatggggaaaaaacgtacacagttttctgtgaaatatgatgctgtatgtggttgtgattttttttcacctctattgtgaattctttttcactgcaagagtaacaggatttgtagccttgtgcttcttgctaagagaaagaaaaacaaaatcagagggcattaaatgttttgtatgtgacatgatttagaaaaaggtgatgcatcctcctcacataagcatccatatggcttcgtcaagggaggtgaacattgttgctgagttaaattccagggtctcagatggttaggacaaagtggatggatgccgggaagtttaacctgagccttaggatccaatgagtggagaatggggacttccaaaacccaaggttggctataatctctgcataaccacatgacttggaatgcttaaatcagcaagaagaataatggtggggtctttatactcattcaggaatggtttatctgatgccagggctgtcttcctttctcccctttggatggttggtgaaatactttaattgccctgtctgctcacttctagctatttaagagagaacccagcttggttcttttttgctccaagtgcttaaaaataagttggaaaaaggagacggtggtgtggaaatggctgaagagtttgctcttgtatccctatagtccaaggtttctcaatctgcacaattgacatttttggccggagtgttctttgtggtgagggctttcctgtgcattgtaagatgttcagcagtatccactcatggtctctaaccacttgacaccagaaaccccccagctgtgataacgcaaaatgtctctagacatcaccaaatgttccctgggggtggcaaatttgcccttgattgagaaccaccagtttagctagtcaatatgaggatggtggtttattctcagaagaaaaagatatgtaaggtcttttagctccttagagtgaagcaaaagcaagacttcaacctcaacctatctttatgttttaaatgttagggacaataagttgaaatagctagaggagcttcttttcagaaccccagatgagagccaatgtcagataaagtaagcatagcaatgtagcaggaactacaatagaagacattttcactggaattacaaagcagaattaaaattatattgtagaaggaaacaccaagaaaagaatttccagggaaaatcctctttgcaggtattaattcttataattttttgtcttttggattatctgtttactgtctcatctgaactgatcccaggtgaacggtttattgcctagatttgtactcagaggaattttttttgttttgttttgtcttttaagaaaggaaagaaaggatgaaaaaaataaacagaaaactcagctcaggcacaattgtcaccaaggagttaaaagcttcttcttcaatagaggaattgttctgggggtcctggagacttaccattgagccatgcaatctgggaagcacaggaataagtagacactttgaaaatggatttgaatgttctcatcccttttgcagcttttctttttggctctctcatgtccttggcttgctcctctattctacctctctttctccagcaataatatgcaaatgaagacatgtatccataagaaggagtgctcttcatcaactaatagagcacctaccacagtgtcatacctggtagaggtgagcaattcatattcaaaggttgcaaagtgtttgtaatatattcatgaggctggaagtaagaagaattaaaaatttgtcctaattacaatgagaaccattctaggtagtgatcttggagcacacatgaataactttctgaaggtgcaaccaaatccatttttatttctgcctggcttggtcacctctgtaaaggtttaacttagtgttgtcaagtaacagttactgaaagagctgagaaaaagaacaatgaacagcaacgatcttgactgtgcaactcagacattcctgcagaaaagacatatgttgctttacaagaaggccaaagaactatggggccttcccagcatttgactgttcattgcatagaatgaattaaatatccagttacttgaatgggtataatgcatgaatatttgtgtgtctgtgtgtgtgtctgagttgtgtgattttattaggggcatctgccaattctctcactgtggttccttctctgactttgcctgttcatcatctaaggaggctagatccttcgctgacttcaccattcctcaaacctgtaagtttctcacttcttccaaattggctttggctctttctgcaacctttccattcaagagcaatctttgctaaggagtaagtgaatgtgaagagtaccaactacaacaattctacagataattagtggattgtgttgtttgttgagagtgaaggtttcttggcatctggtgcctgattaaggcttgagtattaagttctcagcatatctctctattgtcttgacttgagtttgctgcattttctatgtgctgttcgtgacttggagaacttaaagtaatcgagctatgccaacttggggtggtaacagagtacttcccaccacagtgttgaaagggagagcaaagtcttatggataaaccctcctttcttttggggacacatggctctcacttgagaagctcacctgtgctgaatgtccacatggtcactaaacatgttatccttaaaccccccgtatgcctgagttgaaagggctctctcttattaggttttcatgggaacatgaggcagcaaatctattgctaagactttaccaggctcaaatcatctgaggctgatagatatttgacttggtaagacttaagtaaggctctggctcccaggggcataagcaacagtttcttgaatgtgccatctgagaagggagacccaggttgtgagttttcctttgaacacattggtcttttctcaaagttcctgccttgctagactgttagctctttgaggacagggactatgtcttatcaatcactattattttcctgttacctagcatgggacaagtacacaacacatatttgttcaatgaatgaatgaatgtcttctaaaagactcctctgattgggagaccatatctataattgggatgtgaatcatttcttcagtggaataagagcacaacggcacaaccttcaaggacatattatctactatgaacattttactgtgagactctttattttgccttctacttgcgctgaaatgaaaccaaaacaggccgttgggttccacaagtcaatatatgttggatgaggattctgttgccttattgggaactgtgagacttatctggtatgagaagccagtaataaacctttgacctgttttaaccaatgaagattatgaatatgttaatatgatgtaaattgctatttaagtgtaaagcagttctaagttttagtatttgggggattggtttttattatttttttcctttttgaaaaatactgagggatcttttgataaagttagtaatgcatgttagattttagttttgcaagcatgttgtttttcaaatatatcaagtatagaaaaaggtaaaacagttaagaaggaaggcaattatattattcttctgtagttaagcaaacacttgttgagtgcctgctatgtgcacggcatgggcccatatgtgtgaggagcttgtctaattatgtaggaagcaatagatctcggtagttacgtattgggcagatacttactgtatgaatgaaagaacatcacagtaatcacaatatcagagctgaattatcctcagtgtagcttcttggaattcagtttctggaactagagatagagcatttattaaaaaaaactcctgttgagactgtgtcttatgaacctctgaaacgtacaagccttcacaagtttaactaaattgggattaatctttctgtagttatctgcataattcttgtttttctttccatctggctcctgggttgacaatttgtggaaacaactctattgctactatttaaaaaaaatcagaaatctttccctttaagctatgttaaattcaaactattcctgctattcctgttttgtcaaagaattatatttttcaaaatatgtttatttgtttgatgggtcccaggaaacactaataaaaaccacagagaccagcctggaaaaaaaaaaat

SEQ ID NO: 451548 - DNA, 5458 bp, Homo sapiens
ccgtgctcccaggatggtgggagtgtgtgtttttaagatggagagtgtatgcttctgggttcaagttcacaggtgtctctgctggttatctgcactcaccttggtaacagggagaaagtgagtgaatggattccaagaacttactgatggaagtctaattcaggagttggttctgcagccatggagatcatgattctggaaggaggtggtgtaatgaatctcaaccccggcaacaacctccttcaccagccgccagcctggacagacagctactccacgtgcaatgtttccagtgggttttttggaggccagtggcatgaaattcatcctcagtactggaccaagtaccaggtgtgggagtggctccagcacctcctggacaccaaccagctggatgccaattgtatccctttccaagagttcgacatcaacggcgagcacctctgcagcatgagtttgcaggagttcacccgggcggcagggacggcggggcagctcctctacagcaacttgcagcatctgaagtggaacggccagtgcagtagtgacctgttccagtccacacacaatgtcattgtcaagactgaacaaactgagccttccatcatgaacacctggaaagacgagaactatttatatgacaccaactatggtagcacagtagatttgttggacagcaaaactttctgccgggctcagatctccatgacaaccaccagtcaccttcctgttgcagagtcacctgatatgaaaaaggagcaagacccccctgccaagtgccacaccaaaaagcacaacccgagagggactcacttatgggaattcatccgcgacatcctcttgaacccagacaagaacccaggattaataaaatgggaagaccgatctgagggcgtcttcaggttcttgaaatcagaggcagtggctcagctatggggtaaaaagaagaacaacagcagcatgacctatgaaaagctcagccgagctatgagatattactacaaaagagaaattctggagcgtgtggatggacgaagactggtatataaatttgggaagaatgcccgaggatggagagaaaatgaaaactgaagctgccaatactttggacacaaaccaaaacacacaccaaataatcagaaacaaagaactcctggacgtaaatatttcaaagactacttttctctgatatttatgtaccatgaggggaacaagaaactacttctaacgggaagaagaaacactacagtcgattaaaaaaattattttgttacttcgaagtatgtcctatatggggaaaaaacgtacacagttttctgtgaaatatgatgctgtatgtggttgtgattttttttcacctctattgtgaattctttttcactgcaagagtaacaggatttgtagccttgtgcttcttgctaagagaaagaaaaacaaaatcagagggcattaaatgttttgtatgtgacatgatttagaaaaaggtgatgcatcctcctcacataagcatccatatggcttcgtcaagggaggtgaacattgttgctgagttaaattccagggtctcagatggttaggacaaagtggatggatgccgggaagtttaacctgagccttaggatccaatgagtggagaatggggacttccaaaacccaaggttggctataatctctgcataaccacatgacttggaatgcttaaatcagcaagaagaataatggtggggtctttatactcattcaggaatggtttatctgatgccagggctgtcttcctttctcccctttggatggttggtgaaatactttaattgccctgtctgctcacttctagctatttaagagagaacccagcttggttcttttttgctccaagtgcttaaaaataagttggaaaaaggagacggtggtgtggaaatggctgaagagtttgctcttgtatccctatagtccaaggtttctcaatctgcacaattgacatttttggccggagtgttctttgtggtgagggctttcctgtgcattgtaagatgttcagcagtatccactcatggtctctaaccacttgacaccagaaaccccccagctgtgataacgcaaaatgtctctagacatcaccaaatgttccctgggggtggcaaatttgcccttgattgagaaccaccagtttagctagtcaatatgaggatggtggtttattctcagaagaaaaagatatgtaaggtcttttagctccttagagtgaagcaaaagcaagacttcaacctcaacctatctttatgttttaaatgttagggacaataagttgaaatagctagaggagcttcttttcagaaccccagatgagagccaatgtcagataaagtaagcatagcaatgtagcaggaactacaatagaagacattttcactggaattacaaagcagaattaaaattatattgtagaaggaaacaccaagaaaagaatttccagggaaaatcctctttgcaggtattaattcttataattttttgtcttttggattatctgtttactgtctcatctgaactgatcccaggtgaacggtttattgcctagatttgtactcagaggaattttttttgttttgttttgtcttttaagaaaggaaagaaaggatgaaaaaaataaacagaaaactcagctcaggcacaattgtcaccaaggagttaaaagcttcttcttcaatagaggaattgttctgggggtcctggagacttaccattgagccatgcaatctgggaagcacaggaataagtagacactttgaaaatggatttgaatgttctcatcccttttgcagcttttctttttggctctctcatgtccttggcttgctcctctattctacctctctttctccagcaataatatgcaaatgaagacatgtatccataagaaggagtgctcttcatcaactaatagagcacctaccacagtgtcatacctggtagaggtgagcaattcatattcaaaggttgcaaagtgtttgtaatatattcatgaggctggaagtaagaagaattaaaaatttgtcctaattacaatgagaaccattctaggtagtgatcttggagcacacatgaataactttctgaaggtgcaaccaaatccatttttatttctgcctggcttggtcacctctgtaaaggtttaacttagtgttgtcaagtaacagttactgaaagagctgagaaaaagaacaatgaacagcaacgatcttgactgtgcaactcagacattcctgcagaaaagacatatgttgctttacaagaaggccaaagaactatggggccttcccagcatttgactgttcattgcatagaatgaattaaatatccagttacttgaatgggtataatgcatgaatatttgtgtgtctgtgtgtgtgtctgagttgtgtgattttattaggggcatctgccaattctctcactgtggttccttctctgactttgcctgttcatcatctaaggaggctagatccttcgctgacttcaccattcctcaaacctgtaagtttctcacttcttccaaattggctttggctctttctgcaacctttccattcaagagcaatctttgctaaggagtaagtgaatgtgaagagtaccaactacaacaattctacagataattagtggattgtgttgtttgttgagagtgaaggtttcttggcatctggtgcctgattaaggcttgagtattaagttctcagcatatctctctattgtcttgacttgagtttgctgcattttctatgtgctgttcgtgacttggagaacttaaagtaatcgagctatgccaacttggggtggtaacagagtacttcccaccacagtgttgaaagggagagcaaagtcttatggataaaccctcctttcttttggggacacatggctctcacttgagaagctcacctgtgctgaatgtccacatggtcactaaacatgttatccttaaaccccccgtatgcctgagttgaaagggctctctcttattaggttttcatgggaacatgaggcagcaaatctattgctaagactttaccaggctcaaatcatctgaggctgatagatatttgacttggtaagacttaagtaaggctctggctcccaggggcataagcaacagtttcttgaatgtgccatctgagaagggagacccaggttgtgagttttcctttgaacacattggtcttttctcaaagttcctgccttgctagactgttagctctttgaggacagggactatgtcttatcaatcactattattttcctgttacctagcatgggacaagtacacaacacatatttgttcaatgaatgaatgaatgtcttctaaaagactcctctgattgggagaccatatctataattgggatgtgaatcatttcttcagtggaataagagcacaacggcacaaccttcaaggacatattatctactatgaacattttactgtgagactctttattttgccttctacttgcgctgaaatgaaaccaaaacaggccgttgggttccacaagtcaatatatgttggatgaggattctgttgccttattgggaactgtgagacttatctggtatgagaagccagtaataaacctttgacctgttttaaccaatgaagattatgaatatgttaatatgatgtaaattgctatttaagtgtaaagcagttctaagttttagtatttgggggattggtttttattatttttttcctttttgaaaaatactgagggatcttttgataaagttagtaatgcatgttagattttagttttgcaagcatgttgtttttcaaatatatcaagtatagaaaaaggtaaaacagttaagaaggaaggcaattatattattcttctgtagttaagcaaacacttgttgagtgcctgctatgtgcacggcatgggcccatatgtgtgaggagcttgtctaattatgtaggaagcaatagatctcggtagttacgtattgggcagatacttactgtatgaatgaaagaacatcacagtaatcacaatatcagagctgaattatcctcagtgtagcttcttggaattcagtttctggaactagagatagagcatttattaaaaaaaactcctgttgagactgtgtcttatgaacctctgaaacgtacaagccttcacaagtttaactaaattgggattaatctttctgtagttatctgcataattcttgtttttctttccatctggctcctgggttgacaatttgtggaaacaactctattgctactatttaaaaaaaatcagaaatctttccctttaagctatgttaaattcaaactattcctgctattcctgttttgtcaaagaattatatttttcaaaatatgtttatttgtttgatgggtcccaggaaacactaataaaaaccacagagaccagcctggaaaaaaaaaaat

SEQ ID NO: 451549 - DNA, 5205 bp, Homo sapiens
tctccccgttgcaggatgagtgcagataaccagcagagacacctgtgaactcatttacctaaagattctgggtgggaaatccaatagctgtggctgatggaggggaggcagcaggctgcaatctcaccagctcctatctggatgccaattgtatccctttccaagagttcgacatcaacggcgagcacctctgcagcatgagtttgcaggagttcacccgggcggcagggacggcggggcagctcctctacagcaacttgcagcatctgaagtggaacggccagtgcagtagtgacctgttccagtccacacacaatgtcattgtcaagactgaacaaactgagccttccatcatgaacacctggaaagacgagaactatttatatgacaccaactatggtagcacagtagatttgttggacagcaaaactttctgccgggctcagatctccatgacaaccaccagtcaccttcctgttgcagagtcacctgatatgaaaaaggagcaagacccccctgccaagtgccacaccaaaaagcacaacccgagagggactcacttatgggaattcatccgcgacatcctcttgaacccagacaagaacccaggattaataaaatgggaagaccgatctgagggcgtcttcaggttcttgaaatcagaggcagtggctcagctatggggtaaaaagaagaacaacagcagcatgacctatgaaaagctcagccgagctatgagatattactacaaaagagaaattctggagcgtgtggatggacgaagactggtatataaatttgggaagaatgcccgaggatggagagaaaatgaaaactgaagctgccaatactttggacacaaaccaaaacacacaccaaataatcagaaacaaagaactcctggacgtaaatatttcaaagactacttttctctgatatttatgtaccatgaggggaacaagaaactacttctaacgggaagaagaaacactacagtcgattaaaaaaattattttgttacttcgaagtatgtcctatatggggaaaaaacgtacacagttttctgtgaaatatgatgctgtatgtggttgtgattttttttcacctctattgtgaattctttttcactgcaagagtaacaggatttgtagccttgtgcttcttgctaagagaaagaaaaacaaaatcagagggcattaaatgttttgtatgtgacatgatttagaaaaaggtgatgcatcctcctcacataagcatccatatggcttcgtcaagggaggtgaacattgttgctgagttaaattccagggtctcagatggttaggacaaagtggatggatgccgggaagtttaacctgagccttaggatccaatgagtggagaatggggacttccaaaacccaaggttggctataatctctgcataaccacatgacttggaatgcttaaatcagcaagaagaataatggtggggtctttatactcattcaggaatggtttatctgatgccagggctgtcttcctttctcccctttggatggttggtgaaatactttaattgccctgtctgctcacttctagctatttaagagagaacccagcttggttcttttttgctccaagtgcttaaaaataagttggaaaaaggagacggtggtgtggaaatggctgaagagtttgctcttgtatccctatagtccaaggtttctcaatctgcacaattgacatttttggccggagtgttctttgtggtgagggctttcctgtgcattgtaagatgttcagcagtatccactcatggtctctaaccacttgacaccagaaaccccccagctgtgataacgcaaaatgtctctagacatcaccaaatgttccctgggggtggcaaatttgcccttgattgagaaccaccagtttagctagtcaatatgaggatggtggtttattctcagaagaaaaagatatgtaaggtcttttagctccttagagtgaagcaaaagcaagacttcaacctcaacctatctttatgttttaaatgttagggacaataagttgaaatagctagaggagcttcttttcagaaccccagatgagagccaatgtcagataaagtaagcatagcaatgtagcaggaactacaatagaagacattttcactggaattacaaagcagaattaaaattatattgtagaaggaaacaccaagaaaagaatttccagggaaaatcctctttgcaggtattaattcttataattttttgtcttttggattatctgtttactgtctcatctgaactgatcccaggtgaacggtttattgcctagatttgtactcagaggaattttttttgttttgttttgtcttttaagaaaggaaagaaaggatgaaaaaaataaacagaaaactcagctcaggcacaattgtcaccaaggagttaaaagcttcttcttcaatagaggaattgttctgggggtcctggagacttaccattgagccatgcaatctgggaagcacaggaataagtagacactttgaaaatggatttgaatgttctcatcccttttgcagcttttctttttggctctctcatgtccttggcttgctcctctattctacctctctttctccagcaataatatgcaaatgaagacatgtatccataagaaggagtgctcttcatcaactaatagagcacctaccacagtgtcatacctggtagaggtgagcaattcatattcaaaggttgcaaagtgtttgtaatatattcatgaggctggaagtaagaagaattaaaaatttgtcctaattacaatgagaaccattctaggtagtgatcttggagcacacatgaataactttctgaaggtgcaaccaaatccatttttatttctgcctggcttggtcacctctgtaaaggtttaacttagtgttgtcaagtaacagttactgaaagagctgagaaaaagaacaatgaacagcaacgatcttgactgtgcaactcagacattcctgcagaaaagacatatgttgctttacaagaaggccaaagaactatggggccttcccagcatttgactgttcattgcatagaatgaattaaatatccagttacttgaatgggtataatgcatgaatatttgtgtgtctgtgtgtgtgtctgagttgtgtgattttattaggggcatctgccaattctctcactgtggttccttctctgactttgcctgttcatcatctaaggaggctagatccttcgctgacttcaccattcctcaaacctgtaagtttctcacttcttccaaattggctttggctctttctgcaacctttccattcaagagcaatctttgctaaggagtaagtgaatgtgaagagtaccaactacaacaattctacagataattagtggattgtgttgtttgttgagagtgaaggtttcttggcatctggtgcctgattaaggcttgagtattaagttctcagcatatctctctattgtcttgacttgagtttgctgcattttctatgtgctgttcgtgacttggagaacttaaagtaatcgagctatgccaacttggggtggtaacagagtacttcccaccacagtgttgaaagggagagcaaagtcttatggataaaccctcctttcttttggggacacatggctctcacttgagaagctcacctgtgctgaatgtccacatggtcactaaacatgttatccttaaaccccccgtatgcctgagttgaaagggctctctcttattaggttttcatgggaacatgaggcagcaaatctattgctaagactttaccaggctcaaatcatctgaggctgatagatatttgacttggtaagacttaagtaaggctctggctcccaggggcataagcaacagtttcttgaatgtgccatctgagaagggagacccaggttgtgagttttcctttgaacacattggtcttttctcaaagttcctgccttgctagactgttagctctttgaggacagggactatgtcttatcaatcactattattttcctgttacctagcatgggacaagtacacaacacatatttgttcaatgaatgaatgaatgtcttctaaaagactcctctgattgggagaccatatctataattgggatgtgaatcatttcttcagtggaataagagcacaacggcacaaccttcaaggacatattatctactatgaacattttactgtgagactctttattttgccttctacttgcgctgaaatgaaaccaaaacaggccgttgggttccacaagtcaatatatgttggatgaggattctgttgccttattgggaactgtgagacttatctggtatgagaagccagtaataaacctttgacctgttttaaccaatgaagattatgaatatgttaatatgatgtaaattgctatttaagtgtaaagcagttctaagttttagtatttgggggattggtttttattatttttttcctttttgaaaaatactgagggatcttttgataaagttagtaatgcatgttagattttagttttgcaagcatgttgtttttcaaatatatcaagtatagaaaaaggtaaaacagttaagaaggaaggcaattatattattcttctgtagttaagcaaacacttgttgagtgcctgctatgtgcacggcatgggcccatatgtgtgaggagcttgtctaattatgtaggaagcaatagatctcggtagttacgtattgggcagatacttactgtatgaatgaaagaacatcacagtaatcacaatatcagagctgaattatcctcagtgtagcttcttggaattcagtttctggaactagagatagagcatttattaaaaaaaactcctgttgagactgtgtcttatgaacctctgaaacgtacaagccttcacaagtttaactaaattgggattaatctttctgtagttatctgcataattcttgtttttctttccatctggctcctgggttgacaatttgtggaaacaactctattgctactatttaaaaaaaatcagaaatctttccctttaagctatgttaaattcaaactattcctgctattcctgttttgtcaaagaattatatttttcaaaatatgtttatttgtttgatgggtcccaggaaacactaataaaaaccacagagaccagcctggaaaaaaaaaaat

SEQ ID NO: 451550 - DNA, 1978 bp, Homo sapiens
tgtgagctcactcccgcctccatgttcccggagtcgcctggaagcgtccgcccaaggtcgcgggccgcttggggagtcagcagcgcgccaggccccttcgggccccacacgcattaggtgccttcttgatgggtacggagtgaacgcgggcggcggcgggaccgaggcagcgcccagtttgtaaccgccgcgccgcccgtgcccgcgcgcgccacaccccagcgcgcttccggccgggccacgtgaccgcgcgtgcacgtgttccggcctctccgcttcgccgctccgaacctcctcctggtcgtcccggcattcgtccacgcggagccggcttgggcggggcccgggaggcggcggccggagaagccgcggagacgcgagcgccgagcgtcgcgagggagcaggcccgggcaggcaagcggcggcctccgccatgaaccccaggggcctgttccaggacttcaaccccagtaagtttctcatctacacctgcctgctgctcttctcggtgctgctgcccctccgcctggacggcatcatccaatggagctactgggccgtctttgcccccatatggctgtggaagcttctagtcgtcgcaggcgcctccgtgggcgcgggcgtttgggcccgcaaccctcgctaccgcaccgagggagaggcctgtgtggagttcaaagccatgctgatcgctgtgggcatccacctgctgctgctcatgttcgaagtcctggtctgcgacagggtggagaggggcacccacttctggctgctggtcttcatgcctctcttcttcgtgtcccccgtgtccgtggctgcctgcgtctggggctttcgacacgataggtcgctggagctggagatcctgtgctcggtcaacatcctgcagttcatcttcatcgccctaaagctggacaggattattcactggccgtggctggtggtgtttgtgcccctgtggatcctcatgtcgttcctttgcctggtcgtcctctattacatcgtctggtccctcctgttcctgcggtccctggatgtggttgccgagcagcggagaacacacgtgaccatggctatcagttggataacgattgtcgtgcctctgctcacttttgaggtcctgctggttcacagattggatggccacaatacattctcctacgtctccatatttgtccccctttggctttccttactaactttaatggccacaacatttaggcgaaaggggggcaatcattggtggtttggcattcgcagagacttctgtcagtttctgcttgaaattttcccatttttaagagaatatgggaacatttcatatgatctccatcacgaagatagtgaagatgctgaagaaacatcagttccagaagctccgaaaattgctccaatatttggaaagaaggccagagtagttataacccagagccctgggaaatacgttcccccccctcccaagttaaatattgatatgccagattaaactcctagagaggacccaggcacacacagactccacttggccttcgcctcttgttcattcatcccaaacctggaaatggaaacaggcttcaaacactcgtctcacgccgtgtttgagatcaccgcctcatcagtatgcatcatagatggaggtggtttcagtatgtgggtgtgtgtggtgtgtacctgggtaagagacttgctttccaggttcgcactttcaggtgtagctgggggcagtaagtcgaattgttttagtaggtcctcaaaaggaataaccacacagctgtttgtttaaatgctactgtacctatcaaaactattgtttaaaaagtatttttatacactgctaatctaaaattgtatttcagattgtgcctgtcataacaatagcaaatgtaaaaagttctctttcccaccacttgtttataaacctcatagttgatatttttagtgttcctactctgaaagtgggtccgagctaaagtcgact

SEQ ID NO: 451551 - DNA, 396 bp, Homo sapiens
attggtggtgctgtctgtattatcccttccctaggagaaaagagaggcaatgccaagctgcttcatcaactgttaatacttcttccagcccgcaacccaggatatctgcaggtgtctctccctctggtttggtcatggctctctctgttctagaatgtatgggttaaagtcggctgccacaccatgccctcggcagtgtggtccaaggacccctgagggtcctcaaggtccttcctttcccaaccccacgtggttttcttcagtcaggataccatactgcaacagaccgaaggcggaagcagctatgaggatgcagcagccttctgttaagccaggctttaaggatctgcaaaaatgtaaaacgatgccagcaccaccaatacagggtaccgagct

SEQ ID NO: 451552 - DNA, 5930 bp, Homo sapiens
tgtgagctcactcccgcctccatgttcccggagtcgcctggaagcgtccgcccaaggtcgcgggccgcttggggagtcagcagcgcgccaggccccttcgggccccacacgcattaggtgccttcttgatgggtacggagtgaacgcgggcggcggcgggaccgaggcagcgcccagtttgtaaccgccgcgccgcccgtgcccgcgcgcgccacaccccagcgcgcttccggccgggccacgtgaccgcgcgtgcacgtgttccggcctctccgcttcgccgctccgaacctcctcctggtcgtcccggcattcgtccacgcggagccggcttgggcggggcccgggaggcggcggccggagaagccgcggagacgcgagcgccgagcgtcgcgagggagcaggcccgggcaggcaagcggcggcctccgccatgaaccccaggggcctgttccaggacttcaaccccagtaagtttctcatctacacctgcctgctgctcttctcggtgctgctgcccctccgcctggacggcatcatccaatggagctactgggccgtctttgcccccatatggctgtggaagcttctagtcgtcgcaggcgcctccgtgggcgcgggcgtttgggcccgcaaccctcgctaccgcaccgagggagaggcctgtgtggagttcaaagccatgctgatcgctgtgggcatccacctgctgctgctcatgttcgaagtcctggtctgcgacagggtggagaggggcacccacttctggctgctggtcttcatgcctctcttcttcgtgtcccccgtgtccgtggctgcctgcgtctggggctttcgacacgataggtcgctggagctggagatcctgtgctcggtcaacatcctgcagttcatcttcatcgccctaaagctggacaggattattcactggccgtggctggtggtgtttgtgcccctgtggatcctcatgtcgttcctttgcctggtcgtcctctattacatcgtctggtccctcctgttcctgcggtccctggatgtggttgccgagcagcggagaacacacgtgaccatggctatcagttggataacgattgtcgtgcctctgctcacttttgaggtcctgctggttcacagattggatggccacaatacattctcctacgtctccatatttgtccccctttggctttccttactaactttaatggccacaacatttaggcgaaaggggggcaatcattggtggtttggcattcgcagagacttctgtcagtttctgcttgaaattttcccatttttaagagaatatgggaacatttcatatgatctccatcacgaagatagtgaagatgctgaagaaacatcagttccagaagctccgaaaattgctccaatatttggaaagaaggccagagtagttataacccagagccctgggaaatacgttcccccccctcccaagttaaatattgatatgccagattaaactcctagagaggacccaggcacacacagactccacttggccttcgcctcttgttcattcatcccaaacctggaaatggaaacaggcttcaaacactcgtctcacgccgtgtttgagatcaccgcctcatcagtatgcatcatagatggaggtggtttcagtatgtgggtgtgtgtggtgtgtacctgggtaagagacttgctttccaggttcgcactttcaggtgtagctgggggcagtaagtcgaattgttttagtaggtcctcaaaaggaataaccacacagctgtttgtttaaatgctactgtacctatcaaaactattgtttaaaaagtatttttatacactgctaatctaaaattgtatttcagattgtgcctgtcataacaatagcaaatgtaaaaagttctctttcccaccacttgtttataaacctcatagttgatatttttagtgttcctactgttaaaatactctctccttgggctttgctgatactggtctttaatattctgataggtgaatttttctaatggaatgaacccatgcatatatagtatttatatgaatattttagcagtgtaatatgttgaattctagttctctgcattaccattattacgttaaagtattttttaaagcttaggtgtgaagatatgtgtctattggcagatgtccttgaaaactgcataaaacagtatgtgcctggtgtggatcttaccaaagtactaggcatgaatgtagggactgcaaatcccatgggtcttaatatttaggtgttagtaaccaaggtctctggtagtacccgttagtagaggaagaggccactgcccttgggaacttgtgacaggctctagtgtggtaccaggccataaagtgacactgttatttagcaacttgaatttttccacacaggtagtaactgtgtggaaataagcaacaagtggtttgtccatttctaagaatcttaaactattagttggctgtagtgtgaagcattacttgtcattggaaagatggagagagtggccttaaccggaagtggtcagtagaagcaggtgtcattttaagggccaaactttaatctgtcagcaatagggaaacaactgttcaaattatctttgtagataagaacagtgtttcttttttcttttcttttgttttttgttgtttgttttgttttgttttgagacagagtttcactcttgttgcccaggctggagtgcaatggcacaatcttgatctcagctcgccgcagcctccgcctcccggttcaagcgattcttctgcctcagcctcccgagtagctgggattacaggcatgcaccaccacgcctggctaatttcgtatttttaatagagacagggtttctccatgttggtcaggctggtctcaaactcctgacttgaggtgatctgcccgccttggcctcccaaagtgctgggattacaggcgggaaccactgcacccggcaggtacagtgtttctttaggtgctggtggtacaccagggaatcagggcagaagctggatcctgcaagagtaatgtttgagaacaaataaatactttcgaaaggaggtcgaaacaaaaaggagtgtaggtgttattactgcagagaagactgaatggagtccacttttcttattagtaacttactaaaaatgatctcaaatgggctccacacactttgccctggccatgaggcaaacttgttgggtttggagaaaaacacataaccctaaattcactatttttgccctatataaaacattaaaataacatgctctgtacacatgctgtcaacaaaagccagctctaggaacctgagtgccagaatgcctgagggagctacagctgggcttagttggctgggattgagctcgctgtctgagggagctcgctctgtctctctcacactggcagtttacaccagccggcagccctgagcagcagtgggtgtaactttttataaataaggattcattgattcattcatattctcaatatttcttgaagacctaccccgagccaagcatggtgccaggcagtggggatgcagtggagagcaaacagccctgcccatgcaaagtgtcctgtacggtgagaagtgtgagctgcacccacaaagggaaagagcccagtgcagcttttgcaaaatgcagggaaggatgctgctagcctcagggtgacctagaactttaagctcatctttgttttcaggagcccagtgcctcccctccacccctaaagaatatctcaaagacgtggattttcatttcagtaagatttaggggtgcatgggcaggcagtgctggaggaactgggaggcaggtttggaggctgcagtgggaccactggcccctcctggctacagtttcaggccaggagcttgttggcacctggtgcaaactcccaaacctgaggggtccccacaaccccccagcccatcttaacctcctcttcccccaagctatctggtgttggaaagccagcatctagtgtggaaacaagctttctcaccaggtaggccatccgctgtcaggaccattaggtaaaaacagaagtgacaggttgtaggaagtcgttcgatctgtgaggctgcgagcacttcagtgcctgggatttacctaactgccatgaaacactgattatccagcattcagcatgtgtcagattctgtaactatttctcctgtgatgtatcagtcagcttttgctgcaaaacagcatcagaaatctcagtggtctacaactagattcccattcttgggtagtctacaagttggcttctaggttatgctccaggctgggggtctgatcacgtctgctccacaacatgtcccgtattctgggtccctggttgaagcagcagcttaccttgggccgtgttctttctcatggcagaagcacaggaggccaagccctaccttgcaagcacaaatacagcccctgctcactttctgttggccacaacacatggccatgcctgacctctgtggggtgaggcagtgcatggccaaggaacaagcacagtccacacagggggctgtcactccgtgacctcagtattacaaaatggttctcaaggagtcgcaaaatgtgtggcagatcatccatgatttgtttcccgtgtgctttacgaatatcctgaaatttttaaaagctgtttccattagaagggatctgttggggatttgaggtgagatgagaaagaccctgcattccagcccctcagttagcagtggtgaggccggagtactccacacgggacagttttaggaaagtgctggaatccaaagtttctccggagggctatgcaaggcgctttggaaaggcgaagcctgggcgcagggagcccagccatgtaggtagaagcagcagacggtgagggaggccatccccacctggccctgccagggccctgactcagtgaaggaagctgttgggatacaggtcattcagccgggcaggaaagatgggatgaagcccagcaagttcacagggatccgggaagttgtgtggctggaaacccaggcagggctgcaccacagggaccatttgctggagatgcagcacttgccacagccaccaccactgacagcatgacacccacaaaaagggagcctccagctgcacccctgctgctgcgagtacttcctcagctgtctgccatgagcttaaggttaagtaccaggagggaggatatgattgggcaaacctcaggcatgtgttcattctgtagcttccagaacatgcgaggagagagcatctggctcctttgtctcgaggaggagggggcaggactctgccagaactcactcgataaaagattttcccaaaaggaagggtgttcagatgacaaaagtccactacaccactttccttggctatctgatgcacccccatcttcccatgcgcgcacctcagaaatcaggctcccacctgacataacacaaccatgcctcacaaaaagacagtggtttatcccttccctaggagaaaagagaggcaatgccaagctgcttcatcaactgttaatacttcttccagcccgcaacccaggatatctgcaggtgtctctccctctggtttggtcatggctctctctgttctagaatgtatgggttaaagtcggctgccacaccatgccctcggcagtgtggtccaaggacccctgagggtcctcaaggtccttcctttcccaaccccacgtggttttcttcagtcaggataccatactgcaacagaccgaaggcggaagcagctatgaggatgcagcagccttctgttaagccaggctttaaggatctgcaaaaatgtaaaacgatgccactcctactgatgaaatatattgttttggaaaatataggtttaaaaatttttttaaggtaacatgtaatggatgtatagtcttcaaatggatgaataaatgtttttcagagtta

SEQ ID NO: 451553 - DNA, 6714 bp, Homo sapiens
tgtgagctcactcccgcctccatgttcccggagtcgcctggaagcgtccgcccaaggtcgcgggccgcttggggagtcagcagcgcgccaggccccttcgggccccacacgcattaggtgccttcttgatgggtacggagtgaacgcgggcggcggcgggaccgaggcagcgcccagtttgtaaccgccgcgccgcccgtgcccgcgcgcgccacaccccagcgcgcttccggccgggccacgtgaccgcgcgtgcacgtgttccggcctctccgcttcgccgctccgaacctcctcctggtcgtcccggcattcgtccacgcggagccggcttgggcggggcccgggaggcggcggccggagaagccgcggagacgcgagcgccgagcgtcgcgagggagcaggcccgggcaggcaagcggcggcctccgccatgaaccccaggggcctgttccaggacttcaaccccagtaagtttctcatctacacctgcctgctgctcttctcggtgctgctgcccctccgcctggacggcatcatccaatggagctactgggccgtctttgcccccatatggctgtggaagcttctagtcgtcgcaggcgcctccgtgggcgcgggcgtttgggcccgcaaccctcgctaccgcaccgagggagaggcctgtgtggagttcaaagccatgctgatcgctgtgggcatccacctgctgctgctcatgttcgaagtcctggtctgcgacagggtggagaggggcacccacttctggctgctggtcttcatgcctctcttcttcgtgtcccccgtgtccgtggctgcctgcgtctggggctttcgacacgataggtcgctggagctggagatcctgtgctcggtcaacatcctgcagttcatcttcatcgccctaaagctggacaggattattcactggccgtggctggtggtgtttgtgcccctgtggatcctcatgtcgttcctttgcctggtcgtcctctattacatcgtctggtccctcctgttcctgcggtccctggatgtggttgccgagcagcggagaacacacgtgaccatggctatcagttggataacgattgtcgtgcctctgctcacttttgaggtcctgctggttcacagattggatggccacaatacattctcctacgtctccatatttgtccccctttggctttccttactaactttaatggccacaacatttaggcgaaaggggggcaatcattggtggtttggcattcgcagagacttctgtcagtttctgcttgaaattttcccatttttaagagaatatgggaacatttcatatgatctccatcacgaagatagtgaagatgctgaagaaacatcagttccagaagctccgaaaattgctccaatatttggaaagaaggccagagtagttataacccagagccctgggaaatacgttcccccccctcccaagttaaatattgatatgccagattaaactcctagagaggacccaggcacacacagactccacttggccttcgcctcttgttcattcatcccaaacctggaaatggaaacaggcttcaaacactcgtctcacgccgtgtttgagatcaccgcctcatcagtatgcatcatagatggaggtggtttcagtatgtgggtgtgtgtggtgtgtacctgggtaagagacttgctttccaggttcgcactttcaggtgtagctgggggcagtaagtcgaattgttttagtaggtcctcaaaaggaataaccacacagctgtttgtttaaatgctactgtacctatcaaaactattgtttaaaaagtatttttatacactgctaatctaaaattgtatttcagattgtgcctgtcataacaatagcaaatgtaaaaagttctctttcccaccacttgtttataaacctcatagttgatatttttagtgttcctactgttaaaatactctctccttgggctttgctgatactggtctttaatattctgataggtgaatttttctaatggaatgaacccatgcatatatagtatttatatgaatattttagcagtgtaatatgttgaattctagttctctgcattaccattattacgttaaagtattttttaaagcttaggtgtgaagatatgtgtctattggcagatgtccttgaaaactgcataaaacagtatgtgcctggtgtggatcttaccaaagtactaggcatgaatgtagggactgcaaatcccatgggtcttaatatttaggtgttagtaaccaaggtctctggtagtacccgttagtagaggaagaggccactgcccttgggaacttgtgacaggctctagtgtggtaccaggccataaagtgacactgttatttagcaacttgaatttttccacacaggtagtaactgtgtggaaataagcaacaagtggtttgtccatttctaagaatcttaaactattagttggctgtagtgtgaagcattacttgtcattggaaagatggagagagtggccttaaccggaagtggtcagtagaagcaggtgtcattttaagggccaaactttaatctgtcagcaatagggaaacaactgttcaaattatctttgtagataagaacagtgtttcttttttcttttcttttgttttttgttgtttgttttgttttgttttgagacagagtttcactcttgttgcccaggctggagtgcaatggcacaatcttgatctcagctcgccgcagcctccgcctcccggttcaagcgattcttctgcctcagcctcccgagtagctgggattacaggcatgcaccaccacgcctggctaatttcgtatttttaatagagacagggtttctccatgttggtcaggctggtctcaaactcctgacttgaggtgatctgcccgccttggcctcccaaagtgctgggattacaggcgggaaccactgcacccggcaggtacagtgtttctttaggtgctggtggtacaccagggaatcagggcagaagctggatcctgcaagagtaatgtttgagaacaaataaatactttcgaaaggaggtcgaaacaaaaaggagtgtaggtgttattactgcagagaagactgaatggagtccacttttcttattagtaacttactaaaaatgatctcaaatgggctccacacactttgccctggccatgaggcaaacttgttgggtttggagaaaaacacataaccctaaattcactatttttgccctatataaaacattaaaataacatgctctgtacacatgctgtcaacaaaagccagctctaggaacctgagtgccagaatgcctgagggagctacagctgggcttagttggctgggattgagctcgctgtctgagggagctcgctctgtctctctcacactggcagtttacaccagccggcagccctgagcagcagtgggtgtaactttttataaataaggattcattgattcattcatattctcaatatttcttgaagacctaccccgagccaagcatggtgccaggcagtggggatgcagtggagagcaaacagccctgcccatgcaaagtgtcctgtacggtgagaagtgtgagctgcacccacaaagggaaagagcccagtgcagcttttgcaaaatgcagggaaggatgctgctagcctcagggtgacctagaactttaagctcatctttgttttcaggagcccagtgcctcccctccacccctaaagaatatctcaaagacgtggattttcatttcagtaagatttaggggtgcatgggcaggcagtgctggaggaactgggaggcaggtttggaggctgcagtgggaccactggcccctcctggctacagtttcaggccaggagcttgttggcacctggtgcaaactcccaaacctgaggggtccccacaaccccccagcccatcttaacctcctcttcccccaagctatctggtgttggaaagccagcatctagtgtggaaacaagctttctcaccaggtaggccatccgctgtcaggaccattaggtaaaaacagaagtgacaggttgtaggaagtcgttcgatctgtgaggctgcgagcacttcagtgcctgggatttacctaactgccatgaaacactgattatccagcattcagcatgtgtcagattctgtaactatttctcctgtgatgtatcagtcagcttttgctgcaaaacagcatcagaaatctcagtggtctacaactagattcccattcttgggtagtctacaagttggcttctaggttatgctccaggctgggggtctgatcacgtctgctccacaacatgtcccgtattctgggtccctggttgaagcagcagcttaccttgggccgtgttctttctcatggcagaagcacaggaggccaagccctaccttgcaagcacaaatacagcccctgctcactttctgttggccacaacacatggccatgcctgacctctgtggggtgaggcagtgcatggccaaggaacaagcacagtccacacagggggctgtcactccgtgacctcagtattacaaaatggttctcaaggagtcgcaaaatgtgtggcagatcatccatgatttgtttcccgtgtgctttacgaatatcctgaaatttttaaaagctgtttccattagaagggatctgttggggatttgaggtgagatgagaaagaccctgcattccagcccctcagttagcagtggtgaggccggagtactccacacgggacagttttaggaaagtgctggaatccaaagtttctccggagggctatgcaaggcgctttggaaaggcgaagcctgggcgcagggagcccagccatgtaggtagaagcagcagacggtgagggaggccatccccacctggccctgccagggccctgactcagtgaaggaagctgttgggatacaggtcattcagccgggcaggaaagatgggatgaagcccagcaagttcacagggatccgggaagttgtgtggctggaaacccaggcagggctgcaccacagggaccatttgctggagatgcagcacttgccacagccaccaccactgacagcatgacacccacaaaaagggagcctccagctgcacccctgctgctgcgagtacttcctcagctgtctgccatgagcttaaggttaagtaccaggagggaggatatgattgggcaaacctcaggcatgtgttcattctgtagcttccagaacatgcgaggagagagcatctggctcctttgtctcgaggaggagggggcaggactctgccagaactcactcgataaaagattttcccaaaaggaagggtgttcagatgacaaaagtccactacaccactttccttggctatctgatgcacccccatcttcccatgcgcgcacctcagaaatcaggctcccacctgacataacacaaccatgcctcacaaaaagacagtggtttatcccttccctaggagaaaagagaggcaatgccaagctgcttcatcaactgttaatacttcttccagcccgcaacccaggatatctgcaggtgtctctccctctggtttggtcatggctctctctgttctagaatgtatgggttaaagtcggctgccacaccatgccctcggcagtgtggtccaaggacccctgagggtcctcaaggtccttcctttcccaaccccacgtggttttcttcagtcaggataccatactgcaacagaccgaaggcggaagcagctatgaggatgcagcagccttctgttaagccaggctttaaggatctgcaaaaatgtaaaacgatgccactcctactgatgaaatatattgttttggaaaatataggtttaaaaatttttttaaggtaacatgtaatggatgtatagtcttcaaatggatgaataaatgtttttcagagttaaaaaaaacacacaaaacaacaaaaaaaaaaaaaaaaacaaaaaaaaaaaacaaacaaaaaaaacaaaaacaaaaaaaacacagctcgcggcgcgcggccgcccccgcccccccaagaaaagaatccaaaccccccacccctgggggcgggcgggcgccccccctgaaagacaccacaggggccacacgttccccccgaaaaaccccgcccggcacaagggggggcggggttctcaccccaaaaaaaaaaacgccaggcgggagataaagcacgcgtttgtcaaaaccacaccaaccagaaagatctagcaggagaatcaatgtaggtatcataaccagggggacaacacagcgaaccctaaaaaaacaaacccccccccgctctcgaacgagaagaccacaagcagaagcagcaacgaagacgaacaaaacaagtagaaaagtacaaacactagtagatacaacagtaagacgcagcataagaaaagacgagacagagcaggggcacagcgcggagaaggggagcagagaggagagaacggaaggcgggcacgaagagaggagtgaggcgacgatagaagagagcgtggagagagacagatgaagatgacgcgcagcacacgagagagaagagaaggggataaaaaatgatagagagacagagggacgaggagcagtgtgagggagagagggaaagaagagagaggggaaagtggagagagcagataggaggagggaggggaggggggtgagagacaggtaggaggtgtcaggagagtggcaga

SEQ ID NO: 451554 - DNA, 6267 bp, Homo sapiens
tgtgagctcactcccgcctccatgttcccggagtcgcctggaagcgtccgcccaaggtcgcgggccgcttggggagtcagcagcgcgccaggccccttcgggccccacacgcattaggtgccttcttgatgggtacggagtgaacgcgggcggcggcgggaccgaggcagcgcccagtttgtaaccgccgcgccgcccgtgcccgcgcgcgccacaccccagcgcgcttccggccgggccacgtgaccgcgcgtgcacgtgttccggcctctccgcttcgccgctccgaacctcctcctggtcgtcccggcattcgtccacgcggagccggcttgggcggggcccgggaggcggcggccggagaagccgcggagacgcgagcgccgagcgtcgcgagggagcaggcccgggcaggcaagcggcggcctccgccatgaaccccaggggcctgttccaggacttcaaccccagtaagtttctcatctacacctgcctgctgctcttctcggtgctgctgcccctccgcctggacggcatcatccaatggagctactgggccgtctttgcccccatatggctgtggaagcttctagtcgtcgcaggcgcctccgtgggcgcgggcgtttgggcccgcaaccctcgctaccgcaccgagggagaggcctgtgtggagttcaaagccatgctgatcgctgtgggcatccacctgctgctgctcatgttcgaagtcctggtctgcgacagggtggagaggggcacccacttctggctgctggtcttcatgcctctcttcttcgtgtcccccgtgtccgtggctgcctgcgtctggggctttcgacacgataggtcgctggagctggagatcctgtgctcggtcaacatcctgcagttcatcttcatcgccctaaagctggacaggattattcactggccgtggctggtggtgtttgtgcccctgtggatcctcatgtcgttcctttgcctggtcgtcctctattacatcgtctggtccctcctgttcctgcggtccctggatgtggttgccgagcagcggagaacacacgtgaccatggctatcagttggataacgattgtcgtgcctctgctcacttttgaggtcctgctggttcacagattggatggccacaatacattctcctacgtctccatatttgtccccctttggctttccttactaactttaatggccacaacatttaggcgaaaggggggcaatcattggtggtttggcattcgcagagacttctgtcagtttctgcttgaaattttcccatttttaagagaatatgggaacatttcatatgatctccatcacgaagatagtgaagatgctgaagaaacatcagttccagaagctccgaaaattgctccaatatttggaaagaaggccagagtagttataacccagagccctgggaaatacgttcccccccctcccaagttaaatattgatatgccagattaaactcctagagaggacccaggcacacacagactccacttggccttcgcctcttgttcattcatcccaaacctggaaatggaaacaggcttcaaacactcgtctcacgccgtgtttgagatcaccgcctcatcagtatgcatcatagatggaggtggtttcagtatgtgggtgtgtgtggtgtgtacctgggtaagagacttgctttccaggttcgcactttcaggtgtagctgggggcagtaagtcgaattgttttagtaggtcctcaaaaggaataaccacacagctgtttgtttaaatgctactgtacctatcaaaactattgtttaaaaagtatttttatacactgctaatctaaaattgtatttcagattgtgcctgtcataacaatagcaaatgtaaaaagttctctttcccaccacttgtttataaacctcatagttgatatttttagtgttcctactgttaaaatactctctccttgggctttgctgatactggtctttaatattctgataggtgaatttttctaatggaatgaacccatgcatatatagtatttatatgaatattttagcagtgtaatatgttgaattctagttctctgcattaccattattacgttaaagtattttttaaagcttaggtgtgaagatatgtgtctattggcagatgtccttgaaaactgcataaaacagtatgtgcctggtgtggatcttaccaaagtactaggcatgaatgtagggactgcaaatcccatgggtcttaatatttaggtgttagtaaccaaggtctctggtagtacccgttagtagaggaagaggccactgcccttgggaacttgtgacaggctctagtgtggtaccaggccataaagtgacactgttatttagcaacttgaatttttccacacaggtagtaactgtgtggaaataagcaacaagtggtttgtccatttctaagaatcttaaactattagttggctgtagtgtgaagcattacttgtcattggaaagatggagagagtggccttaaccggaagtggtcagtagaagcaggtgtcattttaagggccaaactttaatctgtcagcaatagggaaacaactgttcaaattatctttgtagataagaacagtgtttcttttttcttttcttttgttttttgttgtttgttttgttttgttttgagacagagtttcactcttgttgcccaggctggagtgcaatggcacaatcttgatctcagctcgccgcagcctccgcctcccggttcaagcgattcttctgcctcagcctcccgagtagctgggattacaggcatgcaccaccacgcctggctaatttcgtatttttaatagagacagggtttctccatgttggtcaggctggtctcaaactcctgacttgaggtgatctgcccgccttggcctcccaaagtgctgggattacaggcgggaaccactgcacccggcaggtacagtgtttctttaggtgctggtggtacaccagggaatcagggcagaagctggatcctgcaagagtaatgtttgagaacaaataaatactttcgaaaggaggtcgaaacaaaaaggagtgtaggtgttattactgcagagaagactgaatggagtccacttttcttattagtaacttactaaaaatgatctcaaatgggctccacacactttgccctggccatgaggcaaacttgttgggtttggagaaaaacacataaccctaaattcactatttttgccctatataaaacattaaaataacatgctctgtacacatgctgtcaacaaaagccagctctaggaacctgagtgccagaatgcctgagggagctacagctgggcttagttggctgggattgagctcgctgtctgagggagctcgctctgtctctctcacactggcagtttacaccagccggcagccctgagcagcagtgggtgtaactttttataaataaggattcattgattcattcatattctcaatatttcttgaagacctaccccgagccaagcatggtgccaggcagtggggatgcagtggagagcaaacagccctgcccatgcaaagtgtcctgtacggtgagaagtgtgagctgcacccacaaagggaaagagcccagtgcagcttttgcaaaatgcagggaaggatgctgctagcctcagggtgacctagaactttaagctcatctttgttttcaggagcccagtgcctcccctccacccctaaagaatatctcaaagacgtggattttcatttcagtaagatttaggggtgcatgggcaggcagtgctggaggaactgggaggcaggtttggaggctgcagtgggaccactggcccctcctggctacagtttcaggccaggagcttgttggcacctggtgcaaactcccaaacctgaggggtccccacaaccccccagcccatcttaacctcctcttcccccaagctatctggtgttggaaagccagcatctagtgtggaaacaagctttctcaccaggtaggccatccgctgtcaggaccattaggtaaaaacagaagtgacaggttgtaggaagtcgttcgatctgtgaggctgcgagcacttcagtgcctgggatttacctaactgccatgaaacactgattatccagcattcagcatgtgtcagattctgtaactatttctcctgtgatgtatcagtcagcttttgctgcaaaacagcatcagaaatctcagtggtctacaactagattcccattcttgggtagtctacaagttggcttctaggttatgctccaggctgggggtctgatcacgtctgctccacaacatgtcccgtattctgggtccctggttgaagcagcagcttaccttgggccgtgttctttctcatggcagaagcacaggaggccaagccctaccttgcaagcacaaatacagcccctgctcactttctgttggccacaacacatggccatgcctgacctctgtggggtgaggcagtgcatggccaaggaacaagcacagtccacacagggggctgtcactccgtgacctcagtattacaaaatggttctcaaggagtcgcaaaatgtgtggcagatcatccatgatttgtttcccgtgtgctttacgaatatcctgaaatttttaaaagctgtttccattagaagggatctgttggggatttgaggtgagatgagaaagaccctgcattccagcccctcagttagcagtggtgaggccggagtactccacacgggacagttttaggaaagtgctggaatccaaagtttctccggagggctatgcaaggcgctttggaaaggcgaagcctgggcgcagggagcccagccatgtaggtagaagcagcagacggtgagggaggccatccccacctggccctgccagggccctgactcagtgaaggaagctgttgggatacaggtcattcagccgggcaggaaagatgggatgaagcccagcaagttcacagggatccgggaagttgtgtggctggaaacccaggcagggctgcaccacagggaccatttgctggagatgcagcacttgccacagccaccaccactgacagcatgacacccacaaaaagggagcctccagctgcacccctgctgctgcgagtacttcctcagctgtctgccatgagcttaaggttaagtaccaggagggaggatatgattgggcaaacctcaggcatgtgttcattctgtagcttccagaacatgcgaggagagagcatctggctcctttgtctcgaggaggagggggcaggactctgccagaactcactcgataaaagattttcccaaaaggaagggtgttcagatgacaaaagtccactacaccactttccttggctatctgatgcacccccatcttcccatgcgcgcacctcagaaatcaggctcccacctgacataacacaaccatgcctcacaaaaagacagtggtttatcccttccctaggagaaaagagaggcaatgccaagctgcttcatcaactgttaatacttcttccagcccgcaacccaggatatctgcaggtgtctctccctctggtttggtcatggctctctctgttctagaatgtatgggttaaagtcggctgccacaccatgccctcggcagtgtggtccaaggacccctgagggtcctcaaggtccttcctttcccaaccccacgtggttttcttcagtcaggataccatactgcaacagaccgaaggcggaagcagctatgaggatgcagcagccttctgttaagccaggctttaaggatctgcaaaaatgtaaaacgatgccactcctactgatgaaatatattgttttggaaaatataggtttaaaaatttttttaaggtaacatgtaatggatgtatagtcttcaaatggatgaataaatgtttttcagagttattggctttaacttctaagatgctaaatgttgacgtagctcataaacaaaagcccgttgaggtcctcggtcatttcaagagtgtgagggggtcttgtgaccaaagcatttgagaactgctgtcctatattatcatgggggaaagagaggataaagaaaatagaagtttaatgaattaaaatctgtgctttaacctttagcctaacccctgaataggcttgagtggggggttgaacgatgaattgtggctgaataaaaacctagcatattggagaagttaaatatctgtaatgggtactttagtttaagattattagttatgagcttgagctctattgc

SEQ ID NO: 451555 - DNA, 3031 bp, Homo sapiens
tgtgagctcactcccgcctccatgttcccggagtcgcctggaagcgtccgcccaaggtcgcgggccgcttggggagtcagcagcgcgccaggccccttcgggccccacacgcattaggtgccttcttgatgggtacggagtgaacgcgggcggcggcgggaccgaggcagcgcccagtttgtaaccgccgcgccgcccgtgcccgcgcgcgccacaccccagcgcgcttccggccgggccacgtgaccgcgcgtgcacgtgttccggcctctccgcttcgccgctccgaacctcctcctggtcgtcccggcattcgtccacgcggagccggcttgggcggggcccgggaggcggcggccggagaagccgcggagacgcgagcgccgagcgtcgcgagggagcaggcccgggcaggcaagcggcggcctccgccatgaaccccaggggcctgttccaggacttcaaccccagtaagtttctcatctacacctgcctgctgctcttctcggtgctgctgcccctccgcctggacggcatcatccaatggagctactgggccgtctttgcccccatatggctgtggaagcttctagtcgtcgcaggcgcctccgtgggcgcgggcgtttgggcccgcaaccctcgctaccgcaccgagggagaggcctgtgtggagttcaaagccatgctgatcgctgtgggcatccacctgctgctgctcatgttcgaagtcctggtctgcgacagggtggagaggggcacccacttctggctgctggtcttcatgcctctcttcttcgtgtcccccgtgtccgtggctgcctgcgtctggggctttcgacacgataggtcgctggagctggagatcctgtgctcggtcaacatcctgcagttcatcttcatcgccctaaagctggacaggattattcactggccgtggctggtggtgtttgtgcccctgtggatcctcatgtcgttcctttgcctggtcgtcctctattacatcgtctggtccctcctgttcctgcggtccctggatgtggttgccgagcagcggagaacacacgtgaccatggctatcagttggataacgattgtcgtgcctctgctcacttttgaggtcctgctggttcacagattggatggccacaatacattctcctacgtctccatatttgtccccctttggctttccttactaactttaatggccacaacatttaggcgaaaggggggcaatcattggtggtttggcattcgcagagacttctgtcagtttctgcttgaaattttcccatttttaagagaatatgggaacatttcatatgatctccatcacgaagatagtgaagatgctgaagaaacatcagttccagaagctccgaaaattgctccaatatttggaaagaaggccagagtagttataacccagagccctgggaaatacgttcccccccctcccaagttaaatattgatatgccagattaaactcctagagaggacccaggcacacacagactccacttggccttcgcctcttgttcattcatcccaaacctggaaatggaaacaggcttcaaacactcgtctcacgccgtgtttgagatcaccgcctcatcagtatgcatcatagatggaggtggtttcagtatgtgggtgtgtgtggtgtgtacctgggtaagagacttgctttccaggttcgcactttcaggtgtagctgggggcagtaagtcgaattgttttagtaggtcctcaaaaggaataaccacacagctgtttgtttaaatgctactgtacctatcaaaactattgtttaaaaagtatttttatacactgctaatctaaaattgtatttcagattgtgcctgtcataacaatagcaaatgtaaaaagttctctttcccaccacttgtttataaacctcatagttgatatttttagtgttcctactgttaaaatactctctccttgggctttgctgatactggtctttaatattctgataggtgaatttttctaatggaatgaacccatgcatatatagtatttatatgaatattttagcagtgtaatatgttgaattctagttctctgcattaccattattacgttaaagtattttttaaagcttaggtgtgaagatatgtgtctattggcagatgtccttgaaaactgcataaaacagtatgtgcctggtgtggatcttaccaaagtactaggcatgaatgtagggactgcaaatcccatgggtcttaatatttaggtgttagtaaccaaggtctctggtagtacccgttagtagaggaagaggccactgcccttgggaacttgtgacaggctctagtgtggtaccaggccataaagtgacactgttatttagcaacttgaatttttccacacaggtagtaactgtgtggaaataagcaacaagtggtttgtccatttctaagaatcttaaactattagttggctgtagtgtgaagcattacttgtcattggaaagatggagagagtggccttaaccggaagtggtcagtagaagcaggtgtcattttaagggccaaactttaatctgtcagcaatagggaaacaactgttccccgggacgcctgtcaccggactttgctgaggagttgaggtccctggaaccatctcccagccctggcccgcaggaggaggatggagaagtggctctggtgcttctgggcaggccctcacccggcgctgtgggccctgaagatgtggcactgtgcagcagccgccgccccgtaaggcctgggcgccgtggcctgggccctgtgccctcctagaggagcaggcacctcccccagacttggggtgggggccctgccagcttcaacaccacccttgccccaagtcttttaacctgggtgttagcattttaaagagacccccacagagttttggcccgtgactaaactaactccccacccccagcccaaaacttggggagactggaactattgatgtttggccaacccaagacttttttttgggggttaaaggagaaat

SEQ ID NO: 451556 - DNA, 4892 bp, Homo sapiens
tgtgagctcactcccgcctccatgttcccggagtcgcctggaagcgtccgcccaaggtcgcgggccgcttggggagtcagcagcgcgccaggccccttcgggccccacacgcattaggtgccttcttgatgggtacggagtgaacgcgggcggcggcgggaccgaggcagcgcccagtttgtaaccgccgcgccgcccgtgcccgcgcgcgccacaccccagcgcgcttccggccgggccacgtgaccgcgcgtgcacgtgttccggcctctccgcttcgccgctccgaacctcctcctggtcgtcccggcattcgtccacgcggagccggcttgggcggggcccgggaggcggcggccggagaagccgcggagacgcgagcgccgagcgtcgcgagggagcaggcccgggcaggcaagcggcggcctccgccatgaaccccaggggcctgttccaggacttcaaccccagtaagtttctcatctacacctgcctgctgctcttctcggtgctgctgcccctccgcctggacggcatcatccaatggagctactgggccgtctttgcccccatatggctgtggaagcttctagtcgtcgcaggcgcctccgtgggcgcgggcgtttgggcccgcaaccctcgctaccgcaccgagggagaggcctgtgtggagttcaaagccatgctgatcgctgtgggcatccacctgctgctgctcatgttcgaagtcctggtctgcgacagggtggagaggggcacccacttctggctgctggtcttcatgcctctcttcttcgtgtcccccgtgtccgtggctgcctgcgtctggggctttcgacacgataggtcgctggagctggagatcctgtgctcggtcaacatcctgcagttcatcttcatcgccctaaagctggacaggattattcactggccgtggctggtggtgtttgtgcccctgtggatcctcatgtcgttcctttgcctggtcgtcctctattacatcgtctggtccctcctgttcctgcggtccctggatgtggttgccgagcagcggagaacacacgtgaccatggctatcagttggataacgattgtcgtgcctctgctcacttttgaggtcctgctggttcacagattggatggccacaatacattctcctacgtctccatatttgtccccctttggctttccttactaactttaatggccacaacatttaggcgaaaggggggcaatcattggtggtttggcattcgcagagacttctgtcagtttctgcttgaaattttcccatttttaagagaatatgggaacatttcatatgatctccatcacgaagatagtgaagatgctgaagaaacatcagttccagaagctccgaaaattgctccaatatttggaaagaaggccagagtagttataacccagagccctgggaaatacgttcccccccctcccaagttaaatattgatatgccagattaaactcctagagaggacccaggcacacacagactccacttggccttcgcctcttgttcattcatcccaaacctggaaatggaaacaggcttcaaacactcgtctcacgccgtgtttgagatcaccgcctcatcagtatgcatcatagatggaggtggtttcagtatgtgggtgtgtgtggtgtgtacctgggtaagagacttgctttccaggttcgcactttcaggtgtagctgggggcagtaagtcgaattgttttagtaggtcctcaaaaggaataaccacacagctgtttgtttaaatgctactgtacctatcaaaactattgtttaaaaagtatttttatacactgctaatctaaaattgtatttcagattgtgcctgtcataacaatagcaaatgtaaaaagttctctttcccaccacttgtttataaacctcatagttgatatttttagtgttcctactgttaaaatactctctccttgggctttgctgatactggtctttaatattctgataggtgaatttttctaatggaatgaacccatgcatatatagtatttatatgaatattttagcagtgtaatatgttgaattctagttctctgcattaccattattacgttaaagtattttttaaagcttaggtgtgaagatatgtgtctattggcagatgtccttgaaaactgcataaaacagtatgtgcctggtgtggatcttaccaaagtactaggcatgaatgtagggactgcaaatcccatgggtcttaatatttaggtgttagtaaccaaggtctctggtagtacccgttagtagaggaagaggccactgcccttgggaacttgtgacaggctctagtgtggtaccaggccataaagtgacactgttatttagcaacttgaatttttccacacaggtagtaactgtgtggaaataagcaacaagtggtttgtccatttctaagaatcttaaactattagttggctgtagtgtgaagcattacttgtcattggaaagatggagagagtggccttaaccggaagtggtcagtagaagcaggtgtcattttaagggccaaactttaatctgtcagcaatagggaaacaactgttcaaattatctttgtagataagaacagtgtttcttttttcttttcttttgttttttgttgtttgttttgttttgttttgagacagagtttcactcttgttgcccaggctggagtgcaatggcacaatcttgatctcagctcgccgcagcctccgcctcccggttcaagcgattcttctgcctcagcctcccgagtagctgggattacaggcatgcaccaccacgcctggctaatttcgtatttttaatagagacagggtttctccatgttggtcaggctggtctcaaactcctgacttgaggtgatctgcccgccttggcctcccaaagtgctgggattacaggcgggaaccactgcacccggcaggtacagtgtttctttaggtgctggtggtacaccagggaatcagggcagaagctggatcctgcaagagtaatgtttgagaacaaataaatactttcgaaaggaggtcgaaacaaaaaggagtgtaggtgttattactgcagagaagactgaatggagtccacttttcttattagtaacttactaaaaatgatctcaaatgggctccacacactttgccctggccatgaggcaaacttgttgggtttggagaaaaacacataaccctaaattcactatttttgccctatataaaacattaaaataacatgctctgtacacatgctgtcaacaaaagccagctctaggaacctgagtgccagaatgcctgagggagctacagctgggcttagttggctgggattgagctcgctgtctgagggagctcgctctgtctctctcacactggcagtttacaccagccggcagccctgagcagcagtgggtgtaactttttataaataaggattcattgattcattcatattctcaatatttcttgaagacctaccccgagccaagcatggtgccaggcagtggggatgcagtggagagcaaacagccctgcccatgcaaagtgtcctgtacggtgagaagtgtgagctgcacccacaaagggaaagagcccagtgcagcttttgcaaaatgcagggaaggatgctgctagcctcagggtgacctagaactttaagctcatctttgttttcaggagcccagtgcctcccctccacccctaaagaatatctcaaagacgtggattttcatttcagtaagatttaggggtgcatgggcaggcagtgctggaggaactgggaggcaggtttggaggctgcagtgggaccactggcccctcctggctacagtttcaggccaggagcttgttggcacctggtgcaaactcccaaacctgaggggtccccacaaccccccagcccatcttaacctcctcttcccccaagctatctggtgttggaaagccagcatctagtgtggaaacaagctttctcaccaggtaggccatccgctgtcaggaccattaggtaaaaacagaagtgacaggttgtaggaagtcgttcgatctgtgaggctgcgagcacttcagtgcctgggatttacctaactgccatgaaacactgattatccagcattcagcatgtgtcagattctgtaactatttctcctgtgatgtatcagtcagcttttgctgcaaaacaagcatctggctcctttgtctcgaggaggagggggcaggactctgccagaactcactcgataaaagattttcccaaaaggaagggtgttcagatgacaaaagtccactacaccactttccttggctatctgatgcacccccatcttcccatgcgcgcacctcagaaatcaggctcccacctgacataacacaaccatgcctcacaaaaagacagtggtttatcccttccctaggagaaaagagaggcaatgccaagctgcttcatcaactgttaatacttcttccagcccgcaacccaggatatctgcaggtgtctctccctctggtttggtcatggctctctctgttctagaatgtatgggttaaagtcggctgccacaccatgccctcggcagtgtggtccaaggacccctgagggtcctcaaggtccttcctttcccaaccccacgtggttttcttcagtcaggataccatactgcaacagaccgaaggcggaagcagctatgaggatgcagcagccttctgttaagccaggctttaaggatctgcaaaaatgtaaaacgatgccactcctactgatgaaatatattgttttggaaaatataggtttaaaaatttttttaaggtaacatgtaatggatgtatagtcttcaaatggatgaataaatgtttttcagagtta

SEQ ID NO: 451557 - DNA, 3073 bp, Homo sapiens
tgtgagctcactcccgcctccatgttcccggagtcgcctggaagcgtccgcccaaggtcgcgggccgcttggggagtcagcagcgcgccaggccccttcgggccccacacgcattaggtgccttcttgatgggtacggagtgaacgcgggcggcggcgggaccgaggcagcgcccagtttgtaaccgccgcgccgcccgtgcccgcgcgcgccacaccccagcgcgcttccggccgggccacgtgaccgcgcgtgcacgtgttccggcctctccgcttcgccgctccgaacctcctcctggtcgtcccggcattcgtccacgcggagccggcttgggcggggcccgggaggcggcggccggagaagccgcggagacgcgagcgccgagcgtcgcgagggagcaggcccgggcaggcaagcggcggcctccgccatgaaccccaggggcctgttccaggacttcaaccccagtaagtttctcatctacacctgcctgctgctcttctcggtgctgctgcccctccgcctggacggcatcatccaatggagctactgggccgtctttgcccccatatggctgtggaagcttctagtcgtcgcaggcgcctccgtgggcgcgggcgtttgggcccgcaaccctcgctaccgcaccgagggagaggcctgtgtggagttcaaagccatgctgatcgctgtgggcatccacctgctgctgctcatgttcgaagtcctggtctgcgacagggtggagaggggcacccacttctggctgctggtcttcatgcctctcttcttcgtgtcccccgtgtccgtggctgcctgcgtctggggctttcgacacgataggtcgctggagctggagatcctgtgctcggtcaacatcctgcagttcatcttcatcgccctaaagctggacaggattattcactggccgtggctggtggtgtttgtgcccctgtggatcctcatgtcgttcctttgcctggtcgtcctctattacatcgtctggtccctcctgttcctgcggtccctggatgtggttgccgagcagcggagaacacacgtgaccatggctatcagttggataacgattgtcgtgcctctgctcacttttgaggtcctgctggttcacagattggatggccacaatacattctcctacgtctccatatttgtccccctttggctttccttactaactttaatggccacaacatttaggcgaaaggggggcaatcattggtggtttggcattcgcagagacttctgtcagtttctgcttgaaattttcccatttttaagagaatatgggaacatttcatatgatctccatcacgaagatagtgaagatgctgaagaaacatcagttccagaagctccgaaaattgctccaatatttggaaagaaggccagagtagttataacccagagccctgggaaatacgttcccccccctcccaagttaaatattgatatgccagattaaactcctagagaggacccaggcacacacagactccacttggccttcgcctcttgttcattcatcccaaacctggaaatggaaacaggcttcaaacactcgtctcacgccgtgtttgagatcaccgcctcatcagtatgcatcatagatggaggtggtttcagtatgtgggtgtgtgtggtgtgtacctgggtaagagacttgctttccaggttcgcactttcaggtgtagctgggggcagtaagtcgaattgttttagtaggtcctcaaaaggaataaccacacagctgtttgtttaaatgctactgtacctatcaaaactattgtttaaaaagtatttttatacactgctaatctaaaattgtatttcagattgtgcctgtcataacaatagcaaatgtaaaaagttctctttcccaccacttgtttataaacctcatagttgatatttttagtgttcctactgttaaaatactctctccttgggctttgctgatactggtctttaatattctgataggtgaatttttctaatggaatgaacccatgcatatatagtatttatatgaatattttagcagtgtaatatgttgaattctagttctctgcattaccattattacgttaaagtattttttaaagcttaggtgtgaagatatgtgtctattggcagatgtccttgaaaactgcataaaacagtatgtgcctggtgtggatcttaccaaagtactaggcatgaatgtagggactgcaaatcccatgggtcttaatatttaggtgttagtaaccaaggtctctggtagtacccgttagtagaggaagaggccactgcccttgggaacttgtgacaggctctagtgtggtaccaggccataaagtgacactgttatttagcaacttgaatttttccacacaggtagtaactgtgtggaaataagcaacaagtggtttgtccatttctaagaatcttaaactattagttggctgtagtgtgaagcattacttgtcattggaaagatggagagagtggccttaaccggaagtggtcagtagaagcaggtgtcattttaagggccaaactttaatctgtcagcaatagggaaacaactgttcaaattatctttgtagataagaacagtgtttcttttttcttttcttttgttttttgttgtttgttttgttttgttttgagacagagtttcactcttgttgcccaggctggagtgcaatggcacaatcttgatctcagctcgccgcagcctccgcctcccggttcaagcgattcttctgcctcagcctcccgagtagctgggattacaggcatgcaccaccacgcctggctaatttcgtatttttaatagagacagggtttctccatgttggtcaggctggtctcaaactcctgacttgaggtgatctgcccgccttggcctcccaaagtgctgggattacaggcgggaaccactgcacccggcaggtacagtgtttctttaggtgctggtggtacaccagggaatcagggcagaagctggatcctgcaagagtaatgtttgagaacaaataaatactttcgaaaggaggtcgaaaca

SEQ ID NO: 451558 - DNA, 1721 bp, Homo sapiens
cccctcggagctgattcccgggactaggttgcgggagaaagcctgttgcgtggaagataaggcggcgcgggaagtggacacagggtgggctggagctcagatctaactggactctcgctcctgctggctggacatggaggatttggaggaagatgtaaggtttattgtggatgagaccttggactttggggggctgtcaccatctgacagccgtgaggaggaagacataacagtgttggtgactccagagaaaccacttcgacggggcctctcccaccgaagtgacccaaatgcagtggcacctgccccccagggtgtgaggctcagcctaggccccctcagtccagagaagctggaggagatcctcgatgaggccaaccggctggccgctcagctggagcagtgtgccctgcaggatcgggagagcgcaggcgagggcctggggcctcgccgagtgaagcccagtcctcggcgggagacctttgtgctgaaggatagtcctgtccgagacctgctgcccactgtgaactctttgacgcggagcaccccctccccaagcagcctgacgcctcgactccggagtaatgataggaaggggtcagtcagggctctccgggctacatctggaaagaggccctccaacatgaagagggagtcacccacttgcaatctgttccctgcatccaaaagcccagcatcttctcctcttacccgatcgactcccccagtccgggggagagccgggcccagtgggagagcagcagccagcccacccacccccatcagatccgtcctggccccacagccttctaccagcaactctcaacgcctgccccggccgcagggagcagctgctaaatcttccagtcaactgcccattccctcggccatccccaggcctgccagccgaatgccactcaccagccggagtgtgccacctggcagaggtgccctacctccggattctctgtcaactcgaaaagggcttccaagaccaagcactgcaggacacagagtgcgggaaagtggacacaaggttcctgtttcccagcgactaaatcttcctgtcatgggtgccactcgcagcaatctgcagccccccaggaaagtggcagtcccaggacctaccaggtaaagagatcaggacagcaagcaagacttcagtagcaaaccactacagtcagtacctggactcgcctctacccagcagaccctgactccagcagattctggcccagggacaggaggaagagatgccaccagggctggtctcccaggagtagagaccatgggaaatggggtggattaggattgagctggagaagacttaaactctctgggttgaaagaagattaggggaaaagaggtcaccttccagcagtgaaatgaacaaatagaagatgagaagtacaggcaagtggtttgtctttatccacccccactgttgtggtcagccccagagaattttatcttcttccttggcattggttcactggacatttccacgtgagcggcctccgtagctaacctccctgccctctgaggagccatcttcctgaatcgcattctctactggactctggcctgcttggagaggtggcagcaggcacctggtcttcagaaattgtttcctgtgaattctgtgactcctaataggccagtttgtgataagcttactctatgagtcttcatttttctaaaataaagtgaatgtattttta

SEQ ID NO: 451559 - DNA, 1673 bp, Homo sapiens
cccctcggagctgattcccgggactaggttgcgggagaaagcctgttgcgtggaagataaggcggcgcgggaagtggacacagggtgggctggagctcagatctaactggactctcgctcctgctggctggacatggaggatttggaggaagatgtaaggtttattgtggatgagaccttggactttggggggctgtcaccatctgacagccgtgaggaggaagacataacagtgttggtgactccagagaaaccacttcgacggggcctctcccaccgaagtgacccaaatgcagtggcacctgccccccagggtgtgaggctcagcctaggccccctcagtccagagaagctggaggagatcctcgatgaggccaaccggctggccgctcagctggagcagtgtgccctgcaggatcgggagagcgcaggcgagggcctggggcctcgccgagtgaagcccagtcctcggcgggagacctttgtgctgaaggatagtcctgtccgagacctgctgcccactgtgaactctttgacgcggagcaccccctccccaagcagcctgacgcctcgactccggagtaatgataggaaggggtcagtcagggctctccgggctacatctggaaagaggccctccaacatgaagagggagtcacccacttgcaatctgttccctgcatccaaaagcccagcatcttctcctcttacccgatcgactcccccagtccgggggagagccgggcccagtgggagagcagcagccagtgaggagaccagagcagccaagttgcggggagcagctgctaaatcttccagtcaactgcccattccctcggccatccccaggcctgccagccgaatgccactcaccagccggagtgtgccacctggcagaggtgccctacctccggattctctgtcaactcgaaaagggcttccaagaccaagcactgcaggacacagagtgcgggaaagtggacacaaggttcctgtttcccagcgactaaatcttcctgtcatgggtgccactcgcagcaatctgcagccccccaggaaagtggcagtcccaggacctaccaggtaaagagatcaggacagcaagcaagacttcagtagcaaaccactacagtcagtacctggactcgcctctacccagcagaccctgactccagcagattctggcccagggacaggaggaagagatgccaccagggctggtctcccaggagtagagaccatgggaaatggggtggattaggattgagctggagaagacttaaactctctgggttgaaagaagattaggggaaaagaggtcaccttccagcagtgaaatgaacaaatagaagatgagaagtacaggcaagtggtttgtctttatccacccccactgttgtggtcagccccagagaattttatcttcttccttggcattggttcactggacatttccacgtgagcggcctccgtagctaacctccctgccctctgaggagccatcttcctgaatcgcattctctactggactctggcctgcttggagaggtggcagcaggcacctggtcttcagaaattgtttcctgtgaattctgtgactcctaataggccagtttgtgataagcttactctatgagtcttcatttttctaaaataaagtgaatgtattttta

SEQ ID NO: 451560 - DNA, 1620 bp, Homo sapiens
cccctcggagctgattcccgggactaggttgcgggagaaagcctgttgcgtggaagataaggcggcgcgggaagtggacacagggtgggctggagctcagatctaactggactctcgctcctgctggctggacatggaggatttggaggaagatgtaaggtttattgtggatgagaccttggactttggggggctgtcaccatctgacagccgtgaggaggaagacataacagtgttggtgactccagagaaaccacttcgacggggcctctcccaccgaagtgacccaaatgcagtggcacctgccccccagggtgtgaggctcagcctaggccccctcagtccagagaagctggaggagatcctcgatgaggccaaccggctggccgctcagctggagcagtgtgccctgcaggatcgggagagcgcaggcgagggcctggggcctcgccgagtgaagcccagtcctcggcgggagacctttgtgctgaaggatagtcctgtccgagacctgctgcccactgtgaactctttgacgcggagcaccccctccccaagcagcctgacgcctcgactccggagtaatgataggaaggggtcagtcagggctctccgggctacatctggaaagaggccctccaacatgaagagggagtcacccacttgcaatctgttccctgcatccaaaagcccagcatcttctcctcttacccgatcgactcccccagtccgggggagagccgggcccagtgggagagcagcagccagtgaggagaccagagcagccaagttgcgggcctgccagccgaatgccactcaccagccggagtgtgccacctggcagaggtgccctacctccggattctctgtcaactcgaaaagggcttccaagaccaagcactgcaggacacagagtgcgggaaagtggacacaaggttcctgtttcccagcgactaaatcttcctgtcatgggtgccactcgcagcaatctgcagccccccaggaaagtggcagtcccaggacctaccaggtaaagagatcaggacagcaagcaagacttcagtagcaaaccactacagtcagtacctggactcgcctctacccagcagaccctgactccagcagattctggcccagggacaggaggaagagatgccaccagggctggtctcccaggagtagagaccatgggaaatggggtggattaggattgagctggagaagacttaaactctctgggttgaaagaagattaggggaaaagaggtcaccttccagcagtgaaatgaacaaatagaagatgagaagtacaggcaagtggtttgtctttatccacccccactgttgtggtcagccccagagaattttatcttcttccttggcattggttcactggacatttccacgtgagcggcctccgtagctaacctccctgccctctgaggagccatcttcctgaatcgcattctctactggactctggcctgcttggagaggtggcagcaggcacctggtcttcagaaattgtttcctgtgaattctgtgactcctaataggccagtttgtgataagcttactctatgagtcttcatttttctaaaataaagtgaatgtattttta

SEQ ID NO: 451561 - DNA, 1609 bp, Homo sapiens
cccctcggagctgattcccgggactaggttgcgggagaaagcctgttgcgtggaagataaggcggcgcgggaagtggacacagggtgggctggagctcagatctaactggactctcgctcctgctggctggacatggaggatttggaggaagatgtaaggtttattgtggatgagaccttggactttggggggctgtcaccatctgacagccgtgaggaggaagacataacagtgttggtgactccagagaaaccacttcgacggggcctctcccaccgaagtgacccaaatgcagtggcacctgccccccagggtgtgaggctcagcctaggccccctcagtccagagaagctggaggagatcctcgatgaggccaaccggctggccgctcagctggagcagtgtgccctgcaggatcgggagagcgcaggcgagggcctggggcctcgccgagtgaagcccagtcctcggcgggagacctttgtgctgaaggatagtcctgtccgagacctgctgcccactgtgaactctttgacgcggagcaccccctccccaagcagcctgacgcctcgactccggagtaatgataggaaggggtcagtcagggctctccgggctacatctggaaagaggccctccaacatgaagagggagtcacccacttgcaatctgttccctgcatccaaaagcccagcatcttctcctcttacccgatcgactcccccagtccgggggagagccgggcccagtgggagagcagcagccagcccacccacccccatcagatccgtcctggccccacagccttctaccagcaactctcaacgcctgccccggccgcagggagcagctgctaaatcttccagtcaactgcccattccctcggccatccccaggcctgccagccgaatgccactcaccagccggagtgtgccacctggcagaggtgccctacctccggattctctgtcaactcgaaaagggcttccaagaccaagcactgcaggacacagagtgcgggaaagtggacacaaggttcctgtttcccagcgactaaatcttcctgtcatgggtgccactcgcagcaatctgcagccccccaggaaagtggcagtcccaggacctaccaggtaaagagatcaggacagcaagcaagacttcagtagcaaaccactacagtcagtacctggactcgcctctacccagcagaccctgactccagcagattctggcccagggacaggaggaagagatgccaccagggctggtctcccaggagtagagaccatgggaaatggggtggattaggattgagctggagaagacttaaactctctgggttgaaagaagattaggggaaaagaggtcaccttccagcagtgaaatgaacaaatagaagatgagaagtacaggcaagtggtttgtctttatccacccccactgttgtggtcagccccagagaattttatcttcttccttggcattggttcactggacatttccacgtgagcggcctccgtagctaacctccctgccctctgaggggttctgcactccccaagccacctttccactccctgcatcacacgcgagacacctccagaccca

SEQ ID NO: 451562 - DNA, 1380 bp, Homo sapiens
cccctcggagctgattcccgggactaggttgcgggagaaagcctgttgcgtggaagataaggcggcgcgggaagtggacacagggtgggctggagctcagatctaactggactctcgctcctgctggctggacatggaggatttggaggaagatgtaaggtttattgtggatgagaccttggactttggggggctgtcaccatctgacagccgtgaggaggaagacataacagtgttggtgactccagagaaaccacttcgacggggcctctcccaccgaagtgacccaaatgcagtggcacctgccccccagggtgtgaggctcagcctaggccccctcagtccagagaagctggaggagatcctcgatgaggccaaccggctggccgctcagctggagcagtgtgccctgcaggatcgggagagcgcaggcgagggcctggggcctcgccgagtgaagcccagtcctcggcgggagacctttgtgctgaaggatagtcctgtccgagacctgctgcccactgtgaactctttgacgcggagcaccccctccccaagcagcctgacgcctcgactccggagtaatgataggaaggggtcagtcagggctctccgggctacatctggaaagaggccctccaacatgaagagggagtcacccacttgcaatctgttccctgcatccaaaagcccagcatcttctcctcttacccgatcgactcccccagtccgggggagagccgggcccagtgggagagcagcagccagtgaggagaccagagcagccaagttgcgggtgagtgggagtggggagtttgtgggattgaccctgaaatttctccacccctctccaccaggcccacccacccccatcagatccgtcctggccccacagccttctaccagcaactctcaacgcctgccccggccgcagggagcagctgctaaatcttccagtcaactgcccattccctcggccatccccaggcctgccagccgaatgccactcaccagccggagtgtgccacctggcagaggtgccctacctccggattctctgtcaactcgaaaagggcttccaagaccaagcactgcaggacacagagtgcgggaaagtggacacaagggtaagaggtcaggaggaagaatgcccgcccttgcccagcgtgtcctcaccctcccagagctgtcaacagtgaccacttttgccatccttattgcaattcaattggaagatggggagactgagttacagagaggatatggggctggacagagtctgagtcttagttttcaaatacctcatggtcagggggagagtactaatcccacactcgctcccttcatccagtatttcttttcgaggtcagttaaacttgc

SEQ ID NO: 451563 - DNA, 2538 bp, Homo sapiens
ggcacgagggttgcttggaggttggcggcgcggggctgaaggctagcaaaccgagcgatcatgtcgcacaaacaaatttactattcggacaaatacgacgacgaggagtttgagtatcgacatgtcatgctgcccaaggacatagccaagctggtccctaaaacccatctgatgtctgaatctgaatggaggaatcttggcgttcagcagagtcagggatgggtccattatatgatccatgaaccagaacctcacatcttgctgttccggcgcccactacccaagaaaccaaagaaatgaagctggcaagctacttttcagcctcaagctttacacagctgtccttacttcctaacatctttctgataacattattatgttgccttcttgtttctcactttgatatttaaaagatgttcaatacactgtttgaatgtgctggtaactgctttgcttcttgagtagagccaccaccaccatagcccagccagatgagtgctctgtggacccacagcctaagctgagtgtgaccccagaagccacgatgtgctctgtatccagaacacacttggcagatggaggaagcatctgagtttgagaccatggctgttacagggatcatgtaaacttgctgtttttgttttttcctgccgggtgttgtatgtgtggtgacttgcggatttatgtttcagtgtactggaaactttccattttattcaagaaatctgttcatgttaaaagccttgattaaagaggaagtttttataaaaaaaaaaaaaaaaaaaaaaaaaattgcgggagaaagcctgttgcgtggaagataaggcggcgcgggaagtggacacagggtgggctggagctgcgagccttgggcagaatggatacctgaggaaaggtatggtttctctccagctcagatctaactggactctcgctcctgctggctggacatggaggatttggaggaagatgtaaggtttattgtggatgagaccttggactttggggggctgtcaccatctgacagccgtgaggaggaagacataacagtgttggtgactccagagaaaccacttcgacggggcctctcccaccgaagtgacccaaatgcagtggcacctgccccccagggtgtgaggctcagcctaggccccctcagtccagagaagctggaggagatcctcgatgaggccaaccggctggccgctcagctggagcagtgtgccctgcaggatcgggagagcgcaggcgagggcctggggcctcgccgagtgaagcccagtcctcggcgggagacctttgtgctgaaggatagtcctgtccgagacctgctgcccactgtgaactctttgacgcggagcaccccctccccaagcagcctgacgcctcgactccggagtaatgataggaaggggtcagtcagggctctccgggctacatctggaaagaggccctccaacatgaagagggagtcacccacttgcaatctgttccctgcatccaaaagcccagcatcttctcctcttacccgatcgactcccccagtccgggggagagccgggcccagtgggagagcagcagccagcccacccacccccatcagatccgtcctggccccacagccttctaccagcaactctcaacgcctgccccggccgcagggagcagctgctaaatcttccagtcaactgcccattccctcggccatccccaggcctgccagccgaatgccactcaccagccggagtgtgccacctggcagaggtgccctacctccggattctctgtcaactcgaaaagggcttccaagaccaagcactgcaggacacagagtgcgggaaagtggacacaaggttcctgtttcccagcgactaaatcttcctgtcatgggtgccactcgcagcaatctgcagccccccaggaaagtggcagtcccaggacctaccaggtaaagagatcaggacagcaagcaagacttcagtagcaaaccactacagtcagtacctggactcgcctctacccagcagaccctgactccagcagattctggcccagggacaggaggaagagatgccaccagggctggtctcccaggagtagagaccatgggaaatggggtggattaggattgagctggagaagacttaaactctctgggttgaaagaagattaggggaaaagaggtcaccttccagcagtgaaatgaacaaatagaagatgagaagtacaggcaagtggtttgtctttatccacccccactgttgtggtcagccccagagaattttatcttcttccttggcattggttcactggacatttccacgtgagcggcctccgtagctaacctccctgccctctgaggagccatcttcctgaatcgcattctctactggactctggcctgcttggagaggtggcagcaggcacctggtcttcagaaattgtttcctgtgaattctgtgactcctaataggccagtttgtgataagcttactctatgagtcttcatttttctaaaataaagtgaatgtattttta

SEQ ID NO: 451564 - DNA, 2043 bp, Homo sapiens
ggcacgagggttgcttggaggttggcggcgcggggctgaaggctagcaaaccgagcgatcatgtcgcacaaacaaatttactattcggacaaatacgacgacgaggagtttgagtatcgacatgtcatgctgcccaaggacatagccaagctggtccctaaaacccatctgatgtctgaatctgaatggaggaatcttggcgttcagcagagtcagggatgggtccattatatgatccatgaaccagaacctcacatcttgctgttccggcgcccactacccaagaaaccaaagaaatgaagctggcaagctacttttcagcctcaagctttacacagctgtccttacttcctaacatctttctgataacattattatgttgccttcttgtttctcactttgatatttaaaagatgttcaatacactgtttgaatgtgctggtaactgctttgcttcttgagtagagccaccaccaccatagcccagccagatgagtgctctgtggacccacagcctaagctgagtgtgaccccagaagccacgatgtgctctgtatccagaacacacttggcagatggaggaagcatctgagtttgagaccatggctgttacagggatcatgtaaacttgctgtttttgttttttcctgccgggtgttgtatgtgtggtgacttgcggatttatgtttcagtgtactggaaactttccattttattcaagaaatctgttcatgttaaaagccttgattaaagaggaagtttttataaaaaaaaaaaaaaaaaaaaaaaaaattgcgggagaaagcctgttgcgtggaagataaggcggcgcgggaagtggacacagggtgggctggagctcagatctaactggactctcgctcctgctggctggacatggaggatttggaggaagatgtaaggtttattgtggatgagaccttggactttggggggctgtcaccatctgacaggagtcacccacttgcaatctgttccctgcatccaaaagcccagcatcttctcctcttacccgatcgactcccccagtccgggggagagccgggcccagtgggagagcagcagccagcccacccacccccatcagatccgtcctggccccacagccttctaccagcaactctcaacgcctgccccggccgcagggagcagctgctaaatcttccagtcaactgcccattccctcggccatccccaggcctgccagccgaatgccactcaccagccggagtgtgccacctggcagaggtgccctacctccggattctctgtcaactcgaaaagggcttccaagaccaagcactgcaggacacagagtgcgggaaagtggacacaaggttcctgtttcccagcgactaaatcttcctgtcatgggtgccactcgcagcaatctgcagccccccaggaaagtggcagtcccaggacctaccaggtaaagagatcaggacagcaagcaagacttcagtagcaaaccactacagtcagtacctggactcgcctctacccagcagaccctgactccagcagattctggcccagggacaggaggaagagatgccaccagggctggtctcccaggagtagagaccatgggaaatggggtggattaggattgagctggagaagacttaaactctctgggttgaaagaagattaggggaaaagaggtcaccttccagcagtgaaatgaacaaatagaagatgagaagtacaggcaagtggtttgtctttatccacccccactgttgtggtcagccccagagaattttatcttcttccttggcattggttcactggacatttccacgtgagcggcctccgtagctaacctccctgccctctgaggagccatcttcctgaatcgcattctctactggactctggcctgcttggagaggtggcagcaggcacctggtcttcagaaattgtttcctgtgaattctgtgactcctaataggccagtttgtgataagcttactctatgagtcttcatttttctaaaataaagtgaatgtattttta

SEQ ID NO: 451565 - DNA, 2713 bp, Homo sapiens
ggcacgagggttgcttggaggttggcggcgcggggctgaaggctagcaaaccgagcgatcatgtcgcacaaacaaatttactattcggacaaatacgacgacgaggagtttgagtatcgacatgtcatgctgcccaaggacatagccaagctggtccctaaaacccatctgatgtctgaatctgaatggaggaatcttggcgttcagcagagtcagggatgggtccattatatgatccatgaaccagaacctcacatcttgctgttccggcgcccactacccaagaaaccaaagaaatgaagctggcaagctacttttcagcctcaagctttacacagctgtccttacttcctaacatctttctgataacattattatgttgccttcttgtttctcactttgatatttaaaagatgttcaatacactgtttgaatgtgctggtaactgctttgcttcttgagtagagccaccaccaccatagcccagccagatgagtgctctgtggacccacagcctaagctgagtgtgaccccagaagccacgatgtgctctgtatccagaacacacttggcagatggaggaagcatctgagtttgagaccatggctgttacagggatcatgtaaacttgctgtttttgttttttcctgccgggtgttgtatgtgtggtgacttgcggatttatgtttcagtgtactggaaactttccattttattcaagaaatctgttcatgttaaaagccttgattaaagaggaagtttttataaaaaaaaaaaaaaaaaaaaaaaaaattgcgggagaaagcctgttgcgtggaagataaggcggcgcgggaagtggacacagggtgggctggagggaggtgtgcttcgcgtgtgatgccagggagtggaaaggtggcttggggagtgcagaaccctgaggatagtggcggggaggaagatggggcgtgcaggccgcccccagtgaggagaggccaggatgcagggcggctccagggcaatctgggcagttgggggagccctccgtatcgttcccggaggtagcaggagtagctgtgcgggaggtgccactcctgggcgcttgctttgcctccagcatgacccccgaccctggcttgcaccctgaatctagctgcgagccttgggcagaatggatacctgaggaaaggtatggtttctctccagctcagatctaactggactctcgctcctgctggctggacatggaggatttggaggaagatgtaaggtttattgtggatgagaccttggactttggggggctgtcaccatctgacagccgtgaggaggaagacataacagtgttggtgactccagagaaaccacttcgacggggcctctcccaccgaagtgacccaaatgcagtggcacctgccccccagggtgtgaggctcagcctaggccccctcagtccagagaagctggaggagatcctcgatgaggccaaccggctggccgctcagctggagcagtgtgccctgcaggatcgggagagcgcaggcgagggcctggggcctcgccgagtgaagcccagtcctcggcgggagacctttgtgctgaaggatagtcctgtccgagacctgctgcccactgtgaactctttgacgcggagcaccccctccccaagcagcctgacgcctcgactccggagtaatgataggaaggggtcagtcagggctctccgggctacatctggaaagaggccctccaacatgaagagggagtcacccacttgcaatctgttccctgcatccaaaagcccagcatcttctcctcttacccgatcgactcccccagtccgggggagagccgggcccagtgggagagcagcagccagtgaggagaccagagcagccaagttgcgggcctgccagccgaatgccactcaccagccggagtgtgccacctggcagaggtgccctacctccggattctctgtcaactcgaaaagggcttccaagaccaagcactgcaggacacagagtgcgggaaagtggacacaaggttcctgtttcccagcgactaaatcttcctgtcatgggtgccactcgcagcaatctgcagccccccaggaaagtggcagtcccaggacctaccaggtaaagagatcaggacagcaagcaagacttcagtagcaaaccactacagtcagtacctggactcgcctctacccagcagaccctgactccagcagattctggcccagggacaggaggaagagatgccaccagggctggtctcccaggagtagagaccatgggaaatggggtggattaggattgagctggagaagacttaaactctctgggttgaaagaagattaggggaaaagaggtcaccttccagcagtgaaatgaacaaatagaagatgagaagtacaggcaagtggtttgtctttatccacccccactgttgtggtcagccccagagaattttatcttcttccttggcattggttcactggacatttccacgtgagcggcctccgtagctaacctccctgccctctgaggagccatcttcctgaatcgcattctctactggactctggcctgcttggagaggtggcagcaggcacctggtcttcagaaattgtttcctgtgaattctgtgactcctaataggccagtttgtgataagcttactctatgagtcttcatttttctaaaataaagtgaatgtattttta

SEQ ID NO: 451566 - DNA, 632 bp, Homo sapiens
  misc_feature (22)..(22): n is a, c, g, or t
gtgactccgaggattaaaagtncactcttctatatctaccaggtaaagagatcaggacagcaagcaagacttcagtagcaaaccactacagtcagtacctggactcgcctctacccagcagaccctgactccagcagattctggcccagggacaggaggaagagatgccaccagggctggtctcccaggagtagagaccatgggaaatggggtggattaggattgagctggagaagacttaaactctctgggttgaaagaagattaggggaaaagaggtcaccttccagcagtgaaatgaacaaatagaagatgagaagtacaggcaagtggtttgtctttatccacccccactgttgtggtcagccccagagaattttatcttcttccttggcattggttcactggacatttccacgtgagcggcctccgtagctaacctccctgccctctgaggagccatcttcctgaatcgcattctctactggactctggcctgcttggagaggtggcagcaggcacctggtcttcagaaattgtttcctgtgaattctgtgactcctaataggccagtttgtgataagcttactctatgagtcttcatttttctaaaataaagtgaatgtattttta

SEQ ID NO: 451567 - DNA, 879 bp, Homo sapiens
cccctcggagctgattcccgggactaggttgcgggagaaagcctgttgcgtggaagataaggcggcgcgggaagtggacacagggtgggctggagctcagatctaactggactctcgctcctgctggctggacatggaggatttggaggaagatgtaaggtttattgtggatgagaccttggactttggggggctgtcaccatctgacagccgtgaggaggaagacataacagtgttggtgactccagagaaaccacttcgacggggcctctcccaccgaagtgacccaaatgcagtggcacctgccccccagggtgtgaggctcagcctaggccccctcagtccagagaagctggaggagatcctcgatgaggccaaccggctggccgctcagctggagcagtgtgccctgcaggatcgggagagcgcaggcgagggcctggggcctcgccgagtgaagcccagtcctcggcgggagacctttgtgctgaaggatagtcctgtccgagacctgctgcccactgtgaactctttgacgcggagcaccccctccccaagcagcctgacgcctcgactccggagtaatgataggaaggggtcagtcagggctctccgggctacatctggaaagaggccctccaacatgaagagggtgagttgagagagttgagttggaggtgtgccccagacatggtgtgtgccatgatgcagggagtggtttccttattggtaaaacagggatagcatttctacatctagaattgttggaattaaatgagaaccatgaaaaaagagaaccaaaactcttaccacagtgtctgagtatatgtctatgataaactcaataaatggtattggcaatagtgatggtgatggtga

SEQ ID NO: 451568 - DNA, 2011 bp, Homo sapiens
ggcacgagggttgcttggaggttggcggcgcggggctgaaggctagcaaaccgagcgatcatgtcgcacaaacaaatttactattcggacaaatacgacgacgaggagtttgagtatcgacatgtcatgctgcccaaggacatagccaagctggtccctaaaacccatctgatgtctgaatctgaatggaggaatcttggcgttcagcagagtcagggatgggtccattatatgatccatgaaccagaacctcacatcttgctgttccggcgcccactacccaagaaaccaaagaaatgaagctggcaagctacttttcagcctcaagctttacacagctgtccttacttcctaacatctttctgataacattattatgttgccttcttgtttctcactttgatatttaaaagatgttcaatacactgtttgaatgtgctggtaactgctttgcttcttgagtagagccaccaccaccatagcccagccagatgagtgctctgtggacccacagcctaagctgagtgtgaccccagaagccacgatgtgctctgtatccagaacacacttggcagatggaggaagcatctgagtttgagaccatggctgttacagggatcatgtaaacttgctgtttttgttttttcctgccgggtgttgtatgtgtggtgacttgcggatttatgtttcagtgtactggaaactttccattttattcaagaaatctgttcatgttaaaagccttgattaaagaggaagtttttataaaaaaaaaaaaaaaaaaaaaaaaaattgcgggagaaagcctgttgcgtggaagataaggcggcgcgggaagtggacacagggtgggctggagggaggtgtgcttcgcgtgtgatgccagggagtggaaaggtggcttggggagtgcagaaccctgaggatagtggcggggaggaagatggggcgtgcaggccgcccccagtgaggagaggccaggatgcagggcggctccagggcaatctgggcagttgggggagccctccgtatcgttcccggaggtagcaggagtagctgtgcgggaggtgccactcctgggcgcttgctttgcctccagcatgacccccgaccctggcttgcaccctgaatctagctgcgagccttgggcagaatggatacctgaggaaaggtatggtttctctccagctcagatctaactggactctcgctcctgctggctggacatggaggatttggaggaagatgtaaggtttattgtggatgagaccttggactttggggggctgtcaccatctgacagccgtgaggaggaagacataacagtgttggtgactccagagaaaccacttcgacggggcctctcccaccgaagtgacccaaatgcagtggcacctgccccccagggtgtgaggctcagcctaggccccctcagtccagagaagctggaggagatcctcgatgaggccaaccggctggccgctcagctggagcagtgtgccctgcaggatcgggagagcgcaggcgagggcctggggcctcgccgagtgaagcccagtcctcggcgggagacctttgtgctgaaggatagtcctgtccgagacctgctgcccactgtgaacttctctgggttgaaagaagattaggggaaaagaggtcaccttccagcagtgaaatgaacaaatagaagatgagaagtacaggcaagtggtttgtctttatccacccccactgttgtggtcagccccagagaattttatcttcttccttggcattggttcactggacatttccacgtgagcggcctccgtagctaacctccctgccctctgaggagccatcttcctgaatcgcattctctactggactctggcctgcttggagaggtggcagcaggcacctggtcttcagaaattgtttcctgtgaattctgtgactcctaataggccagtttgtgataagcttactctatgagtcttcatttttctaaaataaagtgaatgtattttta

SEQ ID NO: 451569 - DNA, 1524 bp, Homo sapiens
ggcacgagggttgcttggaggttggcggcgcggggctgaaggctagcaaaccgagcgatcatgtcgcacaaacaaatttactattcggacaaatacgacgacgaggagtttgagtatcgacatgtcatgctgcccaaggacatagccaagctggtccctaaaacccatctgatgtctgaatctgaatggaggaatcttggcgttcagcagagtcagggatgggtccattatatgatccatgaaccagaacctcacatcttgctgttccggcgcccactacccaagaaaccaaagaaatgaagctggcaagctacttttcagcctcaagctttacacagctgtccttacttcctaacatctttctgataacattattatgttgccttcttgtttctcactttgatatttaaaagatgttcaatacactgtttgaatgtgctggtaactgctttgcttcttgagtagagccaccaccaccatagcccagccagatgagtgctctgtggacccacagcctaagctgagtgtgaccccagaagccacgatgtgctctgtatccagaacacacttggcagatggaggaagcatctgagtttgagaccatggctgttacagggatcatgtaaacttgctgtttttgttttttcctgccgggtgttgtatgtgtggtgacttgcggatttatgtttcagtgtactggaaactttccattttattcaagaaatctgttcatgttaaaagccttgattaaagaggaagtttttataaaaaaaaaaaaaaaaaaaaaaaaaattgcgggagaaagcctgttgcgtggaagataaggcggcgcgggaagtggacacagggtgggctggagggaggtgtgcttcgcgtgtgatgccagggagtggaaaggtggcttggggagtgcagaaccctgaggatagtggcggggaggaagatggggcgtgcaggccgcccccagtgaggagaggccaggatgcagggcggctccagggcaatctgggcagttgggggagccctccgtatcgttcccggaggtagcaggagtagctgtgcgggaggtgccactcctgggcgcttgctttgcctccagcatgacccccgaccctggcttgcaccctgaatctagctgcgagccttgggcagaatggatacctgaggaaaggtatggtttctctccagctcagatctaactggactctcgctcctgctggctggacatggaggatttggaggaagtgttgtggtcagccccagagaattttatcttcttccttggcattggttcactggacatttccacgtgagcggcctccgtagctaacctccctgccctctgaggagccatcttcctgaatcgcattctctactggactctggcctgcttggagaggtggcagcaggcacctggtcttcagaaattgtttcctgtgaattctgtgactcctaataggccagtttgtgataagcttactctatgagtcttcatttttctaaaataaagtgaatgtattttta

SEQ ID NO: 451570 - DNA, 2485 bp, Homo sapiens
ggcacgagggttgcttggaggttggcggcgcggggctgaaggctagcaaaccgagcgatcatgtcgcacaaacaaatttactattcggacaaatacgacgacgaggagtttgagtatcgacatgtcatgctgcccaaggacatagccaagctggtccctaaaacccatctgatgtctgaatctgaatggaggaatcttggcgttcagcagagtcagggatgggtccattatatgatccatgaaccagaacctcacatcttgctgttccggcgcccactacccaagaaaccaaagaaatgaagctggcaagctacttttcagcctcaagctttacacagctgtccttacttcctaacatctttctgataacattattatgttgccttcttgtttctcactttgatatttaaaagatgttcaatacactgtttgaatgtgctggtaactgctttgcttcttgagtagagccaccaccaccatagcccagccagatgagtgctctgtggacccacagcctaagctgagtgtgaccccagaagccacgatgtgctctgtatccagaacacacttggcagatggaggaagcatctgagtttgagaccatggctgttacagggatcatgtaaacttgctgtttttgttttttcctgccgggtgttgtatgtgtggtgacttgcggatttatgtttcagtgtactggaaactttccattttattcaagaaatctgttcatgttaaaagccttgattaaagaggaagtttttataaaaaaaaaaaaaaaaaaaaaaaaaattgcgggagaaagcctgttgcgtggaagataaggcggcgcgggaagtggacacagggtgggctggagctcagatctaactggactctcgctcctgctggctggacatggaggatttggaggaagatgtaaggtttattgtggatgagaccttggactttggggggctgtcaccatctgacagccgtgaggaggaagacataacagtgttggtgactccagagaaaccacttcgacggggcctctcccaccgaagtgacccaaatgcagtggcacctgccccccagggtgtgaggctcagcctaggccccctcagtccagagaagctggaggagatcctcgatgaggccaaccggctggccgctcagctggagcagtgtgccctgcaggatcgggagagcgcaggcgagggcctggggcctcgccgagtgaagcccagtcctcggcgggagacctttgtgctgaaggatagtcctgtccgagacctgctgcccactgtgaactctttgacgcggagcaccccctccccaagcagcctgacgcctcgactccggagtaatgataggaaggggtcagtcagggctctccgggctacatctggaaagaggccctccaacatgaagagggagtcacccacttgcaatctgttccctgcatccaaaagcccagcatcttctcctcttacccgatcgactcccccagtccgggggagagccgggcccagtgggagagcagcagccagcccacccacccccatcagatccgtcctggccccacagccttctaccagcaactctcaacgcctgccccggccgcagggagcagctgctaaatcttccagtcaactgcccattccctcggccatccccaggcctgccagccgaatgccactcaccagccggagtgtgccacctggcagaggtgccctacctccggattctctgtcaactcgaaaagggcttccaagaccaagcactgcaggacacagagtgcgggaaagtggacacaaggttcctgtttcccagcgactaaatcttcctgtcatgggtgccactcgcagcaatctgcagccccccaggaaagtggcagtcccaggacctaccaggtaaagagatcaggacagcaagcaagacttcagtagcaaaccactacagtcagtacctggactcgcctctacccagcagaccctgactccagcagattctggcccagggacaggaggaagagatgccaccagggctggtctcccaggagtagagaccatgggaaatggggtggattaggattgagctggagaagacttaaactctctgggttgaaagaagattaggggaaaagaggtcaccttccagcagtgaaatgaacaaatagaagatgagaagtacaggcaagtggtttgtctttatccacccccactgttgtggtcagccccagagaattttatcttcttccttggcattggttcactggacatttccacgtgagcggcctccgtagctaacctccctgccctctgaggagccatcttcctgaatcgcattctctactggactctggcctgcttggagaggtggcagcaggcacctggtcttcagaaattgtttcctgtgaattctgtgactcctaataggccagtttgtgataagcttactctatgagtcttcatttttctaaaataaagtgaatgtattttta

SEQ ID NO: 451571 - DNA, 1811 bp, Homo sapiens
cccctcggagctgattcccgggactaggttgcgggagaaagcctgttgcgtggaagataaggcggcgcgggaagtggacacagggtgggctggagctcagatctaactggactctcgctcctgctggctggacatggaggatttggaggaagatgtaaggtttattgtggatgagaccttggactttggggggctgtcaccatctgacagccgtgaggaggaagacataacagtgttggtgactccagagaaaccacttcgacggggcctctcccaccgaagtgacccaaatgcagtggcacctgccccccagggtgtgaggctcagcctaggccccctcagtccagagaagctggaggagatcctcgatgaggccaaccggctggccgctcagctggagcagtgtgccctgcaggatcgggagagcgcaggcgagggcctggggcctcgccgagtgaagcccagtcctcggcgggagacctttgtgctgaaggatagtcctgtccgagacctgctgcccactgtgaactctttgacgcggagcaccccctccccaagcagcctgacgcctcgactccggagtaatgataggaaggggtcagtcagggctctccgggctacatctggaaagaggccctccaacatgaagagggagtcacccacttgcaatctgttccctgcatccaaaagcccagcatcttctcctcttacccgatcgactcccccagtccgggggagagccgggcccagtgggagagcagcagccagtgaggagaccagagcagccaagttgcgggtgagtgggagtggggagtttgtgggattgaccctgaaatttctccacccctctccaccaggcccacccacccccatcagatccgtcctggccccacagccttctaccagcaactctcaacgcctgccccggccgcagggagcagctgctaaatcttccagtcaactgcccattccctcggccatccccaggcctgccagccgaatgccactcaccagccggagtgtgccacctggcagaggtgccctacctccggattctctgtcaactcgaaaagggcttccaagaccaagcactgcaggacacagagtgcgggaaagtggacacaaggttcctgtttcccagcgactaaatcttcctgtcatgggtgccactcgcagcaatctgcagccccccaggaaagtggcagtcccaggacctaccaggtaaagagatcaggacagcaagcaagacttcagtagcaaaccactacagtcagtacctggactcgcctctacccagcagaccctgactccagcagattctggcccagggacaggaggaagagatgccaccagggctggtctcccaggagtagagaccatgggaaatggggtggattaggattgagctggagaagacttaaactctctgggttgaaagaagattaggggaaaagaggtcaccttccagcagtgaaatgaacaaatagaagatgagaagtacaggcaagtggtttgtctttatccacccccactgttgtggtcagccccagagaattttatcttcttccttggcattggttcactggacatttccacgtgagcggcctccgtagctaacctccctgccctctgaggagccatcttcctgaatcgcattctctactggactctggcctgcttggagaggtggcagcaggcacctggtcttcagaaattgtttcctgtgaattctgtgactcctaataggccagtttgtgataagcttactctatgagtcttcatttttctaaaataaagtgaatgtattttta

SEQ ID NO: 451572 - DNA, 1851 bp, Homo sapiens
cccctcggagctgattcccgggactaggttgcgggagaaagcctgttgcgtggaagataaggcggcgcgggaagtggacacagggtgggctggagctcagatctaactggactctcgctcctgctggctggacatggaggatttggaggaagatgtaaggtttattgtggatgagaccttggactttggggggctgtcaccatctgacagccgtgaggaggaagacataacagtgttggtgactccagagaaaccacttcgacggggcctctcccaccgaagtgacccaaatgcagtggcacctgccccccagggtgtgaggctcagcctaggccccctcagtccagagaagctggaggagatcctcgatgaggccaaccggctggccgctcagctggagcagtgtgccctgcaggatcgggagagcgcaggcgagggcctggggcctcgccgagtgaagcccagtcctcggcgggagacctttgtgctgaaggatagtcctgtccgagacctgctgcccactgtgaactctttgacgcggagcaccccctccccaagcagcctgacgcctcgactccggagtaatgataggaaggggtcagtcagggctctccgggctacatctggaaagaggccctccaacatgaagagggagtcacccacttgcaatctgttccctgcatccaaaagcccagcatcttctcctcttacccgatcgactcccccagtccgggggagagccgggcccagtgggagagcagcagccagcccacccacccccatcagatccgtcctggccccacagccttctaccagcaactctcaacgcctgccccggccgcagggagcagctgctaaatcttccagtcaactgcccattccctcggccatccccaggcctgccagccgaatgccactcaccagccggagtgtgccacctggcagaggtgccctacctccggattctctgtcaactcgaaaagggcttccaagaccaagcactgcaggacacagagtgcgggaaagtggacacaaggttcctgtttcccagcgactaaatcttcctgtcatgggtgccactcgcagcaatctgcagccccccaggaaagtggcagtcccaggacctaccaggtaaagagatcaggacagcaagcaagacttcagtagcaaaccactacagtcagtacctggactcgcctctacccagcagaccctgactccagcagattctggcccagggacaggaggaagagatgccaccagggctggtctcccaggagtagagaccatgggaaatggggtggattaggattgagctggagaagacttaaactctctgggttgaaagaagattaggggaaaagaggtcaccttccagcagtgaaatgaacaaatagaagatgagaagtacaggcaagtggtttgtctttatccacccccactgttgtggtcagccccagagaattttatcttcttccttggcattggttcactggacatttccacgtgagcggcctccgtagctaacctccctgccctctgaggagccatcttcctgaatcgcattctctactggactctggcctgcttggagaggtggcagcaggcacctggtcttcagaaattgtttcctgtgaattctgtgactcctaataggccagtttgtgataagcttactctatgagtcttcatttttctaaaataaagtgaatgtatttttatattctctgtatatctggaagtcgatcctgctcctatttctttctctttttttagacagaatcttgctctgtcacccaagatcgcgccactgcattccagcctggtggcagagtgagactccatctcaaa

SEQ ID NO: 451573 - DNA, 2523 bp, Homo sapiens
ggcacgagggttgcttggaggttggcggcgcggggctgaaggctagcaaaccgagcgatcatgtcgcacaaacaaatttactattcggacaaatacgacgacgaggagtttgagtatcgacatgtcatgctgcccaaggacatagccaagctggtccctaaaacccatctgatgtctgaatctgaatggaggaatcttggcgttcagcagagtcagggatgggtccattatatgatccatgaaccagaacctcacatcttgctgttccggcgcccactacccaagaaaccaaagaaatgaagctggcaagctacttttcagcctcaagctttacacagctgtccttacttcctaacatctttctgataacattattatgttgccttcttgtttctcactttgatatttaaaagatgttcaatacactgtttgaatgtgctggtaactgctttgcttcttgagtagagccaccaccaccatagcccagccagatgagtgctctgtggacccacagcctaagctgagtgtgaccccagaagccacgatgtgctctgtatccagaacacacttggcagatggaggaagcatctgagtttgagaccatggctgttacagggatcatgtaaacttgctgtttttgttttttcctgccgggtgttgtatgtgtggtgacttgcggatttatgtttcagtgtactggaaactttccattttattcaagaaatctgttcatgttaaaagccttgattaaagaggaagtttttataaaaaaaaaaaaaaaaaaaaaaaaaattgcgggagaaagcctgttgcgtggaagataaggcggcgcgggaagtggacacagggtgggctggagggaggtgtgcttcgcgtgtgatgccagggagtggaaagctcagatctaactggactctcgctcctgctggctggacatggaggatttggaggaagatgtaaggtttattgtggatgagaccttggactttggggggctgtcaccatctgacagccgtgaggaggaagacataacagtgttggtgactccagagaaaccacttcgacggggcctctcccaccgaagtgacccaaatgcagtggcacctgccccccagggtgtgaggctcagcctaggccccctcagtccagagaagctggaggagatcctcgatgaggccaaccggctggccgctcagctggagcagtgtgccctgcaggatcgggagagcgcaggcgagggcctggggcctcgccgagtgaagcccagtcctcggcgggagacctttgtgctgaaggatagtcctgtccgagacctgctgcccactgtgaactctttgacgcggagcaccccctccccaagcagcctgacgcctcgactccggagtaatgataggaaggggtcagtcagggctctccgggctacatctggaaagaggccctccaacatgaagagggagtcacccacttgcaatctgttccctgcatccaaaagcccagcatcttctcctcttacccgatcgactcccccagtccgggggagagccgggcccagtgggagagcagcagccagcccacccacccccatcagatccgtcctggccccacagccttctaccagcaactctcaacgcctgccccggccgcagggagcagctgctaaatcttccagtcaactgcccattccctcggccatccccaggcctgccagccgaatgccactcaccagccggagtgtgccacctggcagaggtgccctacctccggattctctgtcaactcgaaaagggcttccaagaccaagcactgcaggacacagagtgcgggaaagtggacacaaggttcctgtttcccagcgactaaatcttcctgtcatgggtgccactcgcagcaatctgcagccccccaggaaagtggcagtcccaggacctaccaggtaaagagatcaggacagcaagcaagacttcagtagcaaaccactacagtcagtacctggactcgcctctacccagcagaccctgactccagcagattctggcccagggacaggaggaagagatgccaccagggctggtctcccaggagtagagaccatgggaaatggggtggattaggattgagctggagaagacttaaactctctgggttgaaagaagattaggggaaaagaggtcaccttccagcagtgaaatgaacaaatagaagatgagaagtacaggcaagtggtttgtctttatccacccccactgttgtggtcagccccagagaattttatcttcttccttggcattggttcactggacatttccacgtgagcggcctccgtagctaacctccctgccctctgaggagccatcttcctgaatcgcattctctactggactctggcctgcttggagaggtggcagcaggcacctggtcttcagaaattgtttcctgtgaattctgtgactcctaataggccagtttgtgataagcttactctatgagtcttcatttttctaaaataaagtgaatgtattttta

SEQ ID NO: 451574 - DNA, 2814 bp, Homo sapiens
ggcacgagggttgcttggaggttggcggcgcggggctgaaggctagcaaaccgagcgatcatgtcgcacaaacaaatttactattcggacaaatacgacgacgaggagtttgagtatcgacatgtcatgctgcccaaggacatagccaagctggtccctaaaacccatctgatgtctgaatctgaatggaggaatcttggcgttcagcagagtcagggatgggtccattatatgatccatgaaccagaacctcacatcttgctgttccggcgcccactacccaagaaaccaaagaaatgaagctggcaagctacttttcagcctcaagctttacacagctgtccttacttcctaacatctttctgataacattattatgttgccttcttgtttctcactttgatatttaaaagatgttcaatacactgtttgaatgtgctggtaactgctttgcttcttgagtagagccaccaccaccatagcccagccagatgagtgctctgtggacccacagcctaagctgagtgtgaccccagaagccacgatgtgctctgtatccagaacacacttggcagatggaggaagcatctgagtttgagaccatggctgttacagggatcatgtaaacttgctgtttttgttttttcctgccgggtgttgtatgtgtggtgacttgcggatttatgtttcagtgtactggaaactttccattttattcaagaaatctgttcatgttaaaagccttgattaaagaggaagtttttataaaaaaaaaaaaaaaaaaaaaaaaaattgcgggagaaagcctgttgcgtggaagataaggcggcgcgggaagtggacacagggtgggctggagggaggtgtgcttcgcgtgtgatgccagggagtggaaaggtggcttggggagtgcagaaccctgaggatagtggcggggaggaagatggggcgtgcaggccgcccccagtgaggagaggccaggatgcagggcggctccagggcaatctgggcagttgggggagccctccgtatcgttcccggaggtagcaggagtagctgtgcgggaggtgccactcctgggcgcttgctttgcctccagcatgacccccgaccctggcttgcaccctgaatctagctgcgagccttgggcagaatggatacctgaggaaaggtatggtttctctccagctcagatctaactggactctcgctcctgctggctggacatggaggatttggaggaagatgtaaggtttattgtggatgagaccttggactttggggggctgtcaccatctgacagccgtgaggaggaagacataacagtgttggtgactccagagaaaccacttcgacggggcctctcccaccgaagtgacccaaatgcagtggcacctgccccccagggtgtgaggctcagcctaggccccctcagtccagagaagctggaggagatcctcgatgaggccaaccggctggccgctcagctggagcagtgtgccctgcaggatcgggagagcgcaggcgagggcctggggcctcgccgagtgaagcccagtcctcggcgggagacctttgtgctgaaggatagtcctgtccgagacctgctgcccactgtgaactctttgacgcggagcaccccctccccaagcagcctgacgcctcgactccggagtaatgataggaaggggtcagtcagggctctccgggctacatctggaaagaggccctccaacatgaagagggagtcacccacttgcaatctgttccctgcatccaaaagcccagcatcttctcctcttacccgatcgactcccccagtccgggggagagccgggcccagtgggagagcagcagccagcccacccacccccatcagatccgtcctggccccacagccttctaccagcaactctcaacgcctgccccggccgcagggagcagctgctaaatcttccagtcaactgcccattccctcggccatccccaggcctgccagccgaatgccactcaccagccggagtgtgccacctggcagaggtgccctacctccggattctctgtcaactcgaaaagggcttccaagaccaagcactgcaggacacagagtgcgggaaagtggacacaaggttcctgtttcccagcgactaaatcttcctgtcatgggtgccactcgcagcaatctgcagccccccaggaaagtggcagtcccaggacctaccaggtaaagagatcaggacagcaagcaagacttcagtagcaaaccactacagtcagtacctggactcgcctctacccagcagaccctgactccagcagattctggcccagggacaggaggaagagatgccaccagggctggtctcccaggagtagagaccatgggaaatggggtggattaggattgagctggagaagacttaaactctctgggttgaaagaagattaggggaaaagaggtcaccttccagcagtgaaatgaacaaatagaagatgagaagtacaggcaagtggtttgtctttatccacccccactgttgtggtcagccccagagaattttatcttcttccttggcattggttcactggacatttccacgtgagcggcctccgtagctaacctccctgccctctgaggagccatcttcctgaatcgcattctctactggactctggcctgcttggagaggtggcagcaggcacctggtcttcagaaattgtttcctgtgaattctgtgactcctaataggccagtttgtgataagcttactctatgagtcttcatttttctaaaataaagtgaatgtattttta

SEQ ID NO: 451575 - DNA, 1606 bp, Homo sapiens
cccctcggagctgattcccgggactaggttgcgggagaaagcctgttgcgtggaagataaggcggcgcgggaagtggacacagggtgggctggagctcagatctaactggactctcgctcctgctggctggacatggaggatttggaggaagatgtaaggtttattgtggatgagaccttggactttggggggctgtcaccatctgacagccgtgaggaggaagacataacagtgttggtgactccagagaaaccacttcgacggggcctctcccaccgaagtgacccaaatgcagtggcacctgccccccagggtgtgaggctcagcctaggccccctcagtccagagaagctggaggagatcctcgatgaggccaaccggctggccgctcagctggagcagtgtgccctgcaggatcgggagagcgcaggcgagggcctggggcctcgccgagtgaagcccagtcctcggcgggagacctttgtgctgaaggatagtcctgtccgagacctgctgcccactgtgaactctttgacgcggagcaccccctccccaagcagcctgacgcctcgactccggagtaatgataggaaggggtcagtcagggctctccgggctacatctggaaagaggccctccaacatgaagagggcccacccacccccatcagatccgtcctggccccacagccttctaccagcaactctcaacgcctgccccggccgcagggagcagctgctaaatcttccagtcaactgcccattccctcggccatccccaggcctgccagccgaatgccactcaccagccggagtgtgccacctggcagaggtgccctacctccggattctctgtcaactcgaaaagggcttccaagaccaagcactgcaggacacagagtgcgggaaagtggacacaaggttcctgtttcccagcgactaaatcttcctgtcatgggtgccactcgcagcaatctgcagccccccaggaaagtggcagtcccaggacctaccaggtaaagagatcaggacagcaagcaagacttcagtagcaaaccactacagtcagtacctggactcgcctctacccagcagaccctgactccagcagattctggcccagggacaggaggaagagatgccaccagggctggtctcccaggagtagagaccatgggaaatggggtggattaggattgagctggagaagacttaaactctctgggttgaaagaagattaggggaaaagaggtcaccttccagcagtgaaatgaacaaatagaagatgagaagtacaggcaagtggtttgtctttatccacccccactgttgtggtcagccccagagaattttatcttcttccttggcattggttcactggacatttccacgtgagcggcctccgtagctaacctccctgccctctgaggagccatcttcctgaatcgcattctctactggactctggcctgcttggagaggtggcagcaggcacctggtcttcagaaattgtttcctgtgaattctgtgactcctaataggccagtttgtgataagcttactctatgagtcttcatttttctaaaataaagtgaatgtattttta

SEQ ID NO: 451576 - DNA, 2490 bp, Homo sapiens
ggcacgagggttgcttggaggttggcggcgcggggctgaaggctagcaaaccgagcgatcatgtcgcacaaacaaatttactattcggacaaatacgacgacgaggagtttgagtatcgacatgtcatgctgcccaaggacatagccaagctggtccctaaaacccatctgatgtctgaatctgaatggaggaatcttggcgttcagcagagtcagggatgggtccattatatgatccatgaaccagaacctcacatcttgctgttccggcgcccactacccaagaaaccaaagaaatgaagctggcaagctacttttcagcctcaagctttacacagctgtccttacttcctaacatctttctgataacattattatgttgccttcttgtttctcactttgatatttaaaagatgttcaatacactgtttgaatgtgctggtaactgctttgcttcttgagtagagccaccaccaccatagcccagccagatgagtgctctgtggacccacagcctaagctgagtgtgaccccagaagccacgatgtgctctgtatccagaacacacttggcagatggaggaagcatctgagtttgagaccatggctgttacagggatcatgtaaacttgctgtttttgttttttcctgccgggtgttgtatgtgtggtgacttgcggatttatgtttcagtgtactggaaactttccattttattcaagaaatctgttcatgttaaaagccttgattaaagaggaagtttttataaaaaaaaaaaaaaaaaaaaaaaaaattgcgggagaaagcctgttgcgtggaagataaggcggcgcgggaagtggacacagggtgggctggagctgcgagccttgggcagaatggatacctgaggaaaggtatggtttctctccagctcagatctaactggactctcgctcctgctggctggacatggaggatttggaggaagatgtaaggtttattgtggatgagaccttggactttggggggctgtcaccatctgacagccgtgaggaggaagacataacagtgttggtgactccagagaaaccacttcgacggggcctctcccaccgaagtgacccaaatgcagtggcacctgccccccagggtgtgaggctcagcctaggccccctcagtccagagaagctggaggagatcctcgatgaggccaaccggctggccgctcagctggagcagtgtgccctgcaggatcgggagagcgcaggcgagggcctggggcctcgccgagtgaagcccagtcctcggcgggagacctttgtgctgaaggatagtcctgtccgagacctgctgcccactgtgaactctttgacgcggagcaccccctccccaagcagcctgacgcctcgactccggagtaatgataggaaggggtcagtcagggctctccgggctacatctggaaagaggccctccaacatgaagagggagtcacccacttgcaatctgttccctgcatccaaaagcccagcatcttctcctcttacccgatcgactcccccagtccgggggagagccgggcccagtgggagagcagcagccagtgaggagaccagagcagccaagttgcggggagcagctgctaaatcttccagtcaactgcccattccctcggccatccccaggcctgccagccgaatgccactcaccagccggagtgtgccacctggcagaggtgccctacctccggattctctgtcaactcgaaaagggcttccaagaccaagcactgcaggacacagagtgcgggaaagtggacacaaggttcctgtttcccagcgactaaatcttcctgtcatgggtgccactcgcagcaatctgcagccccccaggaaagtggcagtcccaggacctaccaggtaaagagatcaggacagcaagcaagacttcagtagcaaaccactacagtcagtacctggactcgcctctacccagcagaccctgactccagcagattctggcccagggacaggaggaagagatgccaccagggctggtctcccaggagtagagaccatgggaaatggggtggattaggattgagctggagaagacttaaactctctgggttgaaagaagattaggggaaaagaggtcaccttccagcagtgaaatgaacaaatagaagatgagaagtacaggcaagtggtttgtctttatccacccccactgttgtggtcagccccagagaattttatcttcttccttggcattggttcactggacatttccacgtgagcggcctccgtagctaacctccctgccctctgaggagccatcttcctgaatcgcattctctactggactctggcctgcttggagaggtggcagcaggcacctggtcttcagaaattgtttcctgtgaattctgtgactcctaataggccagtttgtgataagcttactctatgagtcttcatttttctaaaataaagtgaatgtattttta

SEQ ID NO: 451577 - DNA, 751 bp, Homo sapiens
cccctcggagctgattcccgggactaggttgcgggagaaagcctgttgcgtggaagataaggcggcgcgggaagtggacacagggtgggctggagctcagatctaactggactctcgctcctgctggctggacatggaggatttggaggaagatgtaaggtttattgtggatgagaccttggactttggggggctgtcaccatctgacagccgtgaggaggaagacataacagtgttggtgactccagagaaaccacttcgacggggcctctcccaccgaagtgacccaaatgcagtggcacctgccccccagggtgtgaggctcagcctaggccccctcagtccagagaagctggaggagatcctcgatgaggccaaccggctggccgctcagctggagcagtgtgccctgcaggatcgggagagcgcaggcgagggcctggggcctcgccgagtgaagcccagtcctcggcgggagacctttgtgctgaaggatagtcctgtccgagacctgctgcccactgtgaactctttgacgcggagcaccccctccccaagcagcctgacgcctcgactccggagtaatgataggaaggggtcagtcagggctctccgggctacatctggaaagaggccctccaacatgaagaggagtcaccacttgcagtctgtcctgattcaaaagccagatcttctctcttaacgatgatcccagtcgggaagcggccatgaaaacggaaggacaacgcaa

SEQ ID NO: 451578 - DNA, 2141 bp, Homo sapiens
ggcacgagggttgcttggaggttggcggcgcggggctgaaggctagcaaaccgagcgatcatgtcgcacaaacaaatttactattcggacaaatacgacgacgaggagtttgagtatcgacatgtcatgctgcccaaggacatagccaagctggtccctaaaacccatctgatgtctgaatctgaatggaggaatcttggcgttcagcagagtcagggatgggtccattatatgatccatgaaccagaacctcacatcttgctgttccggcgcccactacccaagaaaccaaagaaatgaagctggcaagctacttttcagcctcaagctttacacagctgtccttacttcctaacatctttctgataacattattatgttgccttcttgtttctcactttgatatttaaaagatgttcaatacactgtttgaatgtgctggtaactgctttgcttcttgagtagagccaccaccaccatagcccagccagatgagtgctctgtggacccacagcctaagctgagtgtgaccccagaagccacgatgtgctctgtatccagaacacacttggcagatggaggaagcatctgagtttgagaccatggctgttacagggatcatgtaaacttgctgtttttgttttttcctgccgggtgttgtatgtgtggtgacttgcggatttatgtttcagtgtactggaaactttccattttattcaagaaatctgttcatgttaaaagccttgattaaagaggaagtttttataaaaaaaaaaaaaaaaaaaaaaaaaattgcgggagaaagcctgttgcgtggaagataaggcggcgcgggaagtggacacagggtgggctggagggaggtgtgcttcgcgtgtgatgccagggagtggaaaggtggcttggggagtgcagaaccctgaggatagtggcggggaggaagatggggcgtgcaggccgcccccagtgaggagaggccaggatgcagggcggctccagggcaatctgggcagttgggggagccctccgtatcgttcccggaggtagcaggagtagctgtgcgggaggtgccactcctgggcgcttgctttgcctccagcatgacccccgaccctggcttgcaccctgaatctagctgcgagccttgggcagaatggatacctgaggaaaggtatggtttctctccagctcagatctaactggactctcgctcctgctggctggacatggaggatttggaggaagatgtaaggtttattgtggatgagaccttggactttggggggctgtcaccatctgacagccgtgaggaggaagacataacagtgttggtgactccagagaaaccacttcgacggggcctctcccaccgaagtgacccaaatgcagtggcacctgccccccagggtgtgaggctcagcctaggccccctcagtccagagaagctggaggagatcctcgatgaggccaaccggctggccgctcagctggagcagtgtgccctgcaggatcgggagagcgcaggcgagggcctggggcctcgccgagtgaagcccagtcctcggcgggagacctttgtgctgaaggatagtcctgtccgagacctgctgcccactgtgaacttctctgggttgaaagaagattaggggaaaagaggtcaccttccagcagtgaaatgaacaaatagaagatgagaagtacaggcaagtggtttgtctttatccacccccactgttgtggtcagccccagagaattttatcttcttccttggcattggttcactggacatttccacgtgagcggcctccgtagctaacctccctgccctctgaggagccatcttcctgaatcgcattctctactggactctggcctgcttggagaggtggcagcaggcacctggtcttcagaaattgtttcctgtgaattctgtgactcctaataggccagtttgtgataagcttactctatgagtcttcatttttctaaaataaagtgaatgtatttttatattctctgtatatctggaagtcgatcctgctcctatttctttctctttttttagacagaatcttgctctgtcacccaagatcgcgccactgcattccagcctggtggcagagtgagactccatctcaaa

SEQ ID NO: 451579 - DNA, 213 bp, Homo sapiens
tatcttaatttagagttacattctttgttaaagtgaattataatgtacattaggacagaatatacaacatattttaaagcggcttattttaaaaaaaaggctttcagtaagtatgtgttagaatgctaaaataatcatatacagaaacatttacattttaataagtgggaatacagcagccttgtcttactatacttttgtaataaataatgg

SEQ ID NO: 451580 - DNA, 336 bp, Homo sapiens
ctagacgatccctaaggctggtctgggtccctaaataaggaacggctggagagactactgacacgctaccaggaaatgcctgaaccaaagttcatgtatgggagtcactactcttccccgggttatgtacttttttatcttgttaggattgcaccagagtatatgctgtgcctgcagaatggaagatttgataatgcagatagaatgttcaacaggtttgatacaaatgccttgcttatcatttttaacactttctgattgtatatatacaacatacttgtttcaaagcactggatataataaaaaagtaaagaaatgtaaaaaatcactaattgt

SEQ ID NO: 451581 - DNA, 3574 bp, Homo sapiens
gtagagacagggtcttgctttgttgcccaggctggtctcgaactcctggcttcaaggaatcctccagcttcaacttccaaaagcattgggattaccggcatgagccatcactccagccccttagggcttatataccataggggaggggtggttcagaagggatgtgtaggacaattgaagtataataacatcaagttgtttgaattaaggacagaacatactgggtagatacctgctcttacacaaggaacaatagataaagtagaaatcttagaggccttcccagaactggggtcaatcagaagtcaacacggaggattagcttccaagatggagctgctttcgcctccacatccagcaattccactcttagattccaattccactcaacagaaatggaaacataggtccataaaaaaactgtacatgactgtgtacagcagccttattcacaatagccaaaatgtggaaacaactgaaatgtccatcaactgatgaatggataaacaaaatgcaacagaatatgctccagcaatctaaaggaacgaagtactgtacagatacatgctacaacatagatgaaccttgaaagcattacgctaaatgaaagaagccagacacaaaaggccacatattgtatggctccatttatatgaaatatccagaataggcaaacccatagagacaggaaattgattattgtttgctagggctggggtttggagggtagagttaggaagagtgacagctagagggtatgggtttcttttacatgtgatgaaaatgttctcaaattgtggtgattgttgaacatatctggaaatatactaaaaatcgctgaatggtatactttaaatggttgacttgtttggtatgtgagttatatcccaataaagctgttatataaaaaaaaatcatgcgagcaattatctcaacaatcaagagactgtgttaaagattctttgcttggccaaacttcagttaggcttctgaatcttctcccaggtccttgtgtgcacttccttgtaaatgcagtgttaggaagtaacactgccacggcagtttagcaagaatcccccaccctccatatgtgatcaaaattctttactcctacccttagtatctgaccccctggcctgccttcactgggactcctgttaggttggttcagccagaatttcccccagaattgatgtttcctcttagcagttttccgaacacctgctccttgctccttggctataaatctccacttattcctggtgtatttggaatagttacgactgagttgccttcacccctttaacttccgtctttttttttttttcacaatggaggacacaaaacgttgttatttcaagtctttgtggccaacagattggtggtttatgggccagcatccctttttatgcgtaaaatatttaaaacgcagcctgcaatggttggtaaagtggtgaaacgtttagtgtgtgaggtcggatcctggtctggccgctggccctggcgatcctctgaggcggcctgagtttggggcgcctcgtgtcaccgcgcgcccctcctccgggcctgagtcacggtgccgccggagtccccacgcgaggatgctgcggtgagcgcggccgggacgccgcgtcgggctctcggccgcccagcggcgccgcaggggaagccaggccggcagccgcgcgctccccagccggccaccaatcccgccctccccggctcctccggacctcctcggcaggcggcggcggggcctgcctgtgcgctctgcgcccgcccgcgcctaccctccatggcgtttatccggaagaagcagcaggagcagcagctgcagctctactccaaggagaggtgcgcgcccagctgaagaagggcccagccgggggcctagtcggggccggtcgtggggacgccggccggagatctgagggacgggaggcggcgtgggggccgggcacggaggcaggggccggacgcgtgtccagggcctgggctgggggctgtggcggaaacctgaggtcggggtgagaggccgggggcctggtctgggccggagcctgccggggacaggaactggatgacgggccaggccagattccaccgcggagccgaggcatgccgagctatccggcagtgcaggtcccggcggccgcgggcagctcacccggaaggccgcgcggggtccgggcgtggatcccggcacgcgagcccgggcgttcgcaggggaggattttccttgctgctgcttaacttggaggagtactactttgaacagcatagagccaatcacattttgcacaagggcagtcaccatgaaaggaaaatcagaggctccttaaaaatatgttcaaaatcggtgatttttgaaccagattcaatatcccagcccatcatcaagattcctttgagagactgtataaaaataggaaagcatggagaaaatggagccaatagacacttcacaaaggcaaaatctgggggtatttcactcattttcagtcaggtatatttcattaaagaacataatgttgttgcaccatataaaatagaaaggggcaaaatggaatatgtttttgaattggatgttcccgggaaagtggaagatgttgtggagacgttgcttcagcttcacagagcatcctgccttgacaaattgggtgaccaaaccgccatgataacagctattttgcagtctcgtttagctagaacatcatttgacaaaaacaggttccaaaacatttctgaaaagctgcacatggaatgcaaagcagaaatggtgacgcctctggtgactaatcctggacacgtgtgcatcacggacacaaacctgtattttcagcccctcaacggctacccgaaacctgtggtccagataacactccaagatgtccgccgcatctacaaaaggaggcacggcctcatgcctctgggcttggaagtattttgcacagaagatgatctgtgttccgacatctacctaaagttctatgaacctcaagatagagatgatctctatttttacattgccacatacctagagcaccatgtggcggagcacactgctgagagctacatgctgcagtggcagcgtggacacctttccaactatcagtacctccttcacctcaacaacctggccgaccgcagctgcaacgacctctcccagtaccctgtgtttccatggataatacatgattattccagctcagaactagatttgtcaaatccaggaaccttccgggatctcagtaagccagtaggggccctaaataaggaacggctggagagactactgacacgctaccaggaaatgcctgaaccaaagttcatgtatgggagtcactactcttccccgggttatgtacttttttatcttgttaggattgcaccagagtatatgctgtgcctgcagaatggaagatttgataatgcagatagaatgttcaacaggtttgatacaaatgccttgcttatcatttttaacactttctgattgtatatatacaacatacttgtttcaaagcactggatataataaaaaagtaaagaaatgtaaaaaatcactaattgt

SEQ ID NO: 451582 - DNA, 3519 bp, Homo sapiens
  misc_feature (3464)..(3464): n is a, c, g, or t
gtagagacagggtcttgctttgttgcccaggctggtctcgaactcctggcttcaaggaatcctccagcttcaacttccaaaagcattgggattaccggcatgagccatcactccagccccttagggcttatataccataggggaggggtggttcagaagggatgtgtaggacaattgaagtataataacatcaagttgtttgaattaaggacagaacatactgggtagatacctgctcttacacaaggaacaatagataaagtagaaatcttagaggccttcccagaactggggtcaatcagaagtcaacacggaggattagcttccaagatggagctgctttcgcctccacatccagcaattccactcttagattccaattccactcaacagaaatggaaacataggtccataaaaaaactgtacatgactgtgtacagcagccttattcacaatagccaaaatgtggaaacaactgaaatgtccatcaactgatgaatggataaacaaaatgcaacagaatatgctccagcaatctaaaggaacgaagtactgtacagatacatgctacaacatagatgaaccttgaaagcattacgctaaatgaaagaagccagacacaaaaggccacatattgtatggctccatttatatgaaatatccagaataggcaaacccatagagacaggaaattgattattgtttgctagggctggggtttggagggtagagttaggaagagtgacagctagagggtatgggtttcttttacatgtgatgaaaatgttctcaaattgtggtgattgttgaacatatctggaaatatactaaaaatcgctgaatggtatactttaaatggttgacttgtttggtatgtgagttatatcccaataaagctgttatataaaaaaaaatcatgcgagcaattatctcaacaatcaagagactgtgttaaagattctttgcttggccaaacttcagttaggcttctgaatcttctcccaggtccttgtgtgcacttccttgtaaatgcagtgttaggaagtaacactgccacggcagtttagcaagaatcccccaccctccatatgtgatcaaaattctttactcctacccttagtatctgaccccctggcctgccttcactgggactcctgttaggttggttcagccagaatttcccccagaattgatgtttcctcttagcagttttccgaacacctgctccttgctccttggctataaatctccacttattcctggtgtatttggaatagttacgactgagttgccttcacccctttaacttccgtctttttttttttttcacaatggaggacacaaaacgttgttatttcaagtctttgtggccaacagattggtggtttatgggccagcatccctttttatgcgtaaaatatttaaaacgcagcctgcaatggttggtaaagtggtgaaacgtttagtgtgtgaggtcggatcctggtctggccgctggccctggcgatcctctgaggcggcctgagtttggggcgcctcgtgtcaccgcgcgcccctcctccgggcctgagtcacggtgccgccggagtccccacgcgaggatgctgcggtgagcgcggccgggacgccgcgtcgggctctcggccgcccagcggcgccgcaggggaagccaggccggcagccgcgcgctccccagccggccaccaatcccgccctccccggctcctccggacctcctcggcaggcggcggcggggcctgcctgtgcgctctgcgcccgcccgcgcctaccctccatggcgtttatccggaagaagcagcaggagcagcagctgcagctctactccaaggagaggtgcgcgcccagctgaagaagggcccagccgggggcctagtcggggccggtcgtggggacgccggccggagatctgagggacgggaggcggcgtgggggccgggcacggaggcaggggccggacgcgtgtccagggcctgggctgggggctgtggcggaaacctgaggtcggggtgagaggccgggggcctggtctgggccggagcctgccggggacaggaactggatgacgggccaggccagattccaccgcggagccgaggcatgccgagctatccggcagtgcaggtcccggcggccgcgggcagctcacccggaaggccgcgcggggtccgggcgtggatcccggcacgcgagcccgggcgttcgcaggggaggattttccttgctgctgcttaacttggaggagtactactttgaacagcatagagccaatcacattttgcacaagggcagtcaccatgaaaggaaaatcagaggctccttaaaaatatgttcaaaatcggtgatttttgaaccagattcaatatcccagcccatcatcaagattcctttgagagactgtataaaaataggaaagcatggagaaaatggagccaatagacacttcacaaaggcaaaatctgggggtatttcactcattttcagtcaggtatatttcattaaagaacataatgttgttgcaccatataaaatagaaaggggcaaaatggaatatgtttttgaattggatgttcccgggaaagtggaagatgttgtggagacgttgcttcagcttcacagagcatcctgccttgacaaattgggtgaccaaaccgccatgataacagctattttgcagtctcgtttagctagaacatcatttgacaaaaacaggttccaaaacatttctgaaaagctgcacatggaatgcaaagcagaaatggtgacgcctctggtgactaatcctggacacgtgtgcatcacggacacaaacctgtattttcagcccctcaacggctacccgaaacctgtggtccagataacactccaagatgtccgccgcatctacaaaaggaggcacggcctcatgcctctgggcttggaagtattttgcacagaagatgatctgtgttccgacatctacctaaagttctatgaacctcaagatagagatgatctctatttttacattgccacatacctagagcaccatgtggcggagcacactgctgagagctacatgctgcagtggcagcgtggacacctttccaactatcagtacctccttcacctcaacaacctggccgaccgcagctgcaacgacctctcccagtaccctgtgtttccatggataatacatgattattccagctcagaactagatttgtcaaatccaggaaccttccgggatctcagtaagccagtaggggccctaaataaggaacggctggagagactactgacacgctaccaggaaatgcctgaaccaaagttcatgtatgggagtcactactcttccccgggttatgtacttttttatcttgttaggattgcaccagagtatatgctgtgcctgcagaatggaagatttgataatgcagatagaatgttcaacagttatttggcanaaaactttgggaaaaaaactggttcttggaatgggtggcaaccgggaatttttaa

SEQ ID NO: 451583 - DNA, 2575 bp, Homo sapiens
gtagagacagggtcttgctttgttgcccaggctggtctcgaactcctggcttcaaggaatcctccagcttcaacttccaaaagcattgggattaccggcatgagccatcactccagccccttagggcttatataccataggggaggggtggttcagaagggatgtgtaggacaattgaagtataataacatcaagttgtttgaattaaggacagaacatactgggtagatacctgctcttacacaaggaacaatagataaagtagaaatcttagaggccttcccagaactggggtcaatcagaagtcaacacggaggattagcttccaagatggagctgctttcgcctccacatccagcaattccactcttagattccaattccactcaacagaaatggaaacataggtccataaaaaaactgtacatgactgtgtacagcagccttattcacaatagccaaaatgtggaaacaactgaaatgtccatcaactgatgaatggataaacaaaatgcaacagaatatgctccagcaatctaaaggaacgaagtactgtacagatacatgctacaacatagatgaaccttgaaagcattacgctaaatgaaagaagccagacacaaaaggccacatattgtatggctccatttatatgaaatatccagaataggcaaacccatagagacaggaaattgattattgtttgctagggctggggtttggagggtagagttaggaagagtgacagctagagggtatgggtttcttttacatgtgatgaaaatgttctcaaattgtggtgattgttgaacatatctggaaatatactaaaaatcgctgaatggtatactttaaatggttgacttgtttggtatgtgagttatatcccaataaagctgttatataaaaaaaaatcatgcgagcaattatctcaacaatcaagagactgtgttaaagattctttgcttggccaaacttcagttaggcttctgaatcttctcccaggtccttgtgtgcacttccttgtaaatgcagtgttaggaagtaacactgccacggcagtttagcaagaatcccccaccctccatatgtgatcaaaattctttactcctacccttagtatctgaccccctggcctgccttcactgggactcctgttaggttggttcagccagaatttcccccagaattgatgtttcctcttagcagttttccgaacacctgctccttgctccttggctataaatctccacttattcctggtgtatttggaatagttacgactgagttgccttcacccctttaacttccgtctttttttttttttcacaatggaggacacaaaacgttgttatttcaagtctttgtggccaacagattggtggtttatgggccagcatccctttttatgcgtaaaatatttaaaacgcagcctgcaatggttggtaaagtggtgaaacgtttagtgtgtgaggtcggatcctggtctggccgctggccctggcgatcctctgaggcggcctgagtttggggcgcctcgtgtcaccgcgcgcccctcctccgggcctgagtcacggtgccgccggagtccccacgcgaggatgctgcggtgagcgcggccgggacgccgcgtcgggctctcggccgcccagcggcgccgcaggggaagccaggccggcagccgcgcgctccccagccggccaccaatcccgccctccccggctcctccggacctcctcggcaggcggcggcggggcctgcctgtgcgctctgcgcccgcccgcgcctaccctccatggcgtttatccggaagaagcagcaggagcagcagctgcagctctactccaaggagaggtgcgcgcccagctgaagaagggcccagccgggggcctagtcggggccggtcgtggggacgccggccggagatctgagggacgggaggcggcgtgggggccgggcacggaggcaggggccggacgcgtgtccagggcctgggctgggggctgtggcggaaacctgaggtcggggtgagaggccgggggcctggtctgggccggagcctgccggggacaggaactggatgacgggccaggccagattccaccgcggagccgaggcatgccgagctatccggcagtgcaggtcccggcggccgcgggcagctcacccggaaggccgcgcggggtccgggcgtggatcccggcacgcgagcccgggcgttcgcaggggagggtgagtacgctgcccggcgggcaccccctttctaatccttccccttaatcgggtccaggcactcggcgccggcgccgcagagttggtcgccgggcggcaccgagcaggccggcgaccacccactcgcattgccgcgcctttttcctgccgactcctttagacacaggactagctccatgccctggaaggctgggaggggggccgccggaaaggcctgattctgaggaaagccaaggtcctgcctcccaaacacttgctccccgcgcagtggaccttgtgttggaaagctttgcagtcgaaatcgcggtgcggcagcggagcactcattctcaccagcatccca

SEQ ID NO: 451584 - DNA, 1206 bp, Homo sapiens
aggaaataataaatagagcagcaaattatgtagacttgctcccctagaactctcattccagtggggaagttacactaggtaaaacatgcagattttatcatagcaggttctgtacacatgttcttaaagtagcatagtttggcacacttcttctcttcctgtattttgatatcttcccctttttgttagggcaaaatggaatatgtttttgaattggatgttcccgggaaagtggaagatgttgtggagacgttgcttcagcttcacagagcatcctgccttgacaaattgggtgaccaaaccgccatgataacagctattttgcagtctcgtttagctagaacatcatttgacaaaaacaggttccaaaacatttctgaaaagctgcacatggaatgcaaagcagaaatggtgacgcctctggtgactaatcctggacacgtgtgcatcacggacacaaacctgtattttcagcccctcaacggctacccgaaacctgtggtccagataacactccaagatgtccgccgcatctacaaaaggaggcacggcctcatgcctctgggcttggaagtattttgcacagaagatgatctgtgttccgacatctacctaaagttctatgaacctcaagatagagatgatctctatttttacattgccacatacctagagcaccatgtggcggagcacactgctgagagctacatgctgcagtggcagcgtggacacctttccaactatcagtacctccttcacctcaacaacctggccgaccgcagctgcaacgacctctcccagtaccctgtgtttccatggataatacatgattattccagctcagaactagatttgtcaaatccaggaaccttccgggatctcagtaagccagtaggggccctaaataaggaacggctggagagactactgacacgctaccaggaaatgcctgaaccaaagttcatgtatgggagtcactactcttccccgggttatgtacttttttatcttgttaggattgcaccagagtatatgctgtgcctgcagaatggaagatttgataatgcagatagaatgttcaacaggtttgatacaaatgccttgcttatcatttttaacactttctgattgtatatatacaacatacttgtttcaaagcactggatataataaaaaagtaaagaaatgtaaaaaatcactaattgt

SEQ ID NO: 451585 - DNA, 3196 bp, Homo sapiens
gtagagacagggtcttgctttgttgcccaggctggtctcgaactcctggcttcaaggaatcctccagcttcaacttccaaaagcattgggattaccggcatgagccatcactccagccccttagggcttatataccataggggaggggtggttcagaagggatgtgtaggacaattgaagtataataacatcaagttgtttgaattaaggacagaacatactgggtagatacctgctcttacacaaggaacaatagataaagtagaaatcttagaggccttcccagaactggggtcaatcagaagtcaacacggaggattagcttccaagatggagctgctttcgcctccacatccagcaattccactcttagattccaattccactcaacagaaatggaaacataggtccataaaaaaactgtacatgactgtgtacagcagccttattcacaatagccaaaatgtggaaacaactgaaatgtccatcaactgatgaatggataaacaaaatgcaacagaatatgctccagcaatctaaaggaacgaagtactgtacagatacatgctacaacatagatgaaccttgaaagcattacgctaaatgaaagaagccagacacaaaaggccacatattgtatggctccatttatatgaaatatccagaataggcaaacccatagagacaggaaattgattattgtttgctagggctggggtttggagggtagagttaggaagagtgacagctagagggtatgggtttcttttacatgtgatgaaaatgttctcaaattgtggtgattgttgaacatatctggaaatatactaaaaatcgctgaatggtatactttaaatggttgacttgtttggtatgtgagttatatcccaataaagctgttatataaaaaaaaatcatgcgagcaattatctcaacaatcaagagactgtgttaaagattctttgcttggccaaacttcagttaggcttctgaatcttctcccaggtccttgtgtgcacttccttgtaaatgcagtgttaggaagtaacactgccacggcagtttagcaagaatcccccaccctccatatgtgatcaaaattctttactcctacccttagtatctgaccccctggcctgccttcactgggactcctgttaggttggttcagccagaatttcccccagaattgatgtttcctcttagcagttttccgaacacctgctccttgctccttggctataaatctccacttattcctggtgtatttggaatagttacgactgagttgccttcacccctttaacttccgtctttttttttttttcacaatggaggacacaaaacgttgttatttcaagtctttgtggccaacagattggtggtttatgggccagcatccctttttatgcgtaaaatatttaaaacgcagcctgcaatggttggtaaagtggtgaaacgtttagtgtgtgaggtcggatcctggtctggccgctggccctggcgatcctctgaggcggcctgagtttggggcgcctcgtgtcaccgcgcgcccctcctccgggcctgagtcacggtgccgccggagtccccacgcgaggatgctgcggtgagcgcggccgggacgccgcgtcgggctctcggccgcccagcggcgccgcaggggaagccaggccggcagccgcgcgctccccagccggccaccaatcccgccctccccggctcctccggacctcctcggcaggcggcggcggggcctgcctgtgcgctctgcgcccgcccgcgcctaccctccatggcgtttatccggaagaagcagcaggagcagcagctgcagctctactccaaggagagattttccttgctgctgcttaacttggaggagtactactttgaacagcatagagccaatcacattttgcacaagggcagtcaccatgaaaggaaaatcagaggctccttaaaaatatgttcaaaatcggtgatttttgaaccagattcaatatcccagcccatcatcaagattcctttgagagactgtataaaaataggaaagcatggagaaaatggagccaatagacacttcacaaaggcaaaatctgggggtatttcactcattttcagtcaggtatatttcattaaagaacataatgttgttgcaccatataaaatagaaaggggcaaaatggaatatgtttttgaattggatgttcccgggaaagtggaagatgttgtggagacgttgcttcagcttcacagagcatcctgccttgacaaattgggtgaccaaaccgccatgataacagctattttgcagtctcgtttagctagaacatcatttgacaaaaacaggttccaaaacatttctgaaaagctgcacatggaatgcaaagcagaaatggtgacgcctctggtgactaatcctggacacgtgtgcatcacggacacaaacctgtattttcagcccctcaacggctacccgaaacctgtggtccagataacactccaagatgtccgccgcatctacaaaaggaggcacggcctcatgcctctgggcttggaagtattttgcacagaagatgatctgtgttccgacatctacctaaagttctatgaacctcaagatagagatgatctctatttttacattgccacatacctagagcaccatgtggcggagcacactgctgagagctacatgctgcagtggcagcgtggacacctttccaactatcagtacctccttcacctcaacaacctggccgaccgcagctgcaacgacctctcccagtaccctgtgtttccatggataatacatgattattccagctcagaactagatttgtcaaatccaggaaccttccgggatctcagtaagccagtaggggccctaaataaggaacggctggagagactactgacacgctaccaggaaatgcctgaaccaaagttcatgtatgggagtcactactcttccccgggttatgtacttttttatcttgttaggattgcaccagagtatatgctgtgcctgcagaatggaagatttgataatgcagatagaatgttcaacaggtttgatacaaatgccttgcttatcatttttaacactttctgattgtatatatacaacatacttgtttcaaagcactggatataataaaaaagtaaagaaatgtaaaaaatcactaattgt

SEQ ID NO: 451586 - DNA, 3652 bp, Homo sapiens
gtagagacagggtcttgctttgttgcccaggctggtctcgaactcctggcttcaaggaatcctccagcttcaacttccaaaagcattgggattaccggcatgagccatcactccagccccttagggcttatataccataggggaggggtggttcagaagggatgtgtaggacaattgaagtataataacatcaagttgtttgaattaaggacagaacatactgggtagatacctgctcttacacaaggaacaatagataaagtagaaatcttagaggccttcccagaactggggtcaatcagaagtcaacacggaggattagcttccaagatggagctgctttcgcctccacatccagcaattccactcttagattccaattccactcaacagaaatggaaacataggtccataaaaaaactgtacatgactgtgtacagcagccttattcacaatagccaaaatgtggaaacaactgaaatgtccatcaactgatgaatggataaacaaaatgcaacagaatatgctccagcaatctaaaggaacgaagtactgtacagatacatgctacaacatagatgaaccttgaaagcattacgctaaatgaaagaagccagacacaaaaggccacatattgtatggctccatttatatgaaatatccagaataggcaaacccatagagacaggaaattgattattgtttgctagggctggggtttggagggtagagttaggaagagtgacagctagagggtatgggtttcttttacatgtgatgaaaatgttctcaaattgtggtgattgttgaacatatctggaaatatactaaaaatcgctgaatggtatactttaaatggttgacttgtttggtatgtgagttatatcccaataaagctgttatataaaaaaaaatcatgcgagcaattatctcaacaatcaagagactgtgttaaagattctttgcttggccaaacttcagttaggcttctgaatcttctcccaggtccttgtgtgcacttccttgtaaatgcagtgttaggaagtaacactgccacggcagtttagcaagaatcccccaccctccatatgtgatcaaaattctttactcctacccttagtatctgaccccctggcctgccttcactgggactcctgttaggttggttcagccagaatttcccccagaattgatgtttcctcttagcagttttccgaacacctgctccttgctccttggctataaatctccacttattcctggtgtatttggaatagttacgactgagttgccttcacccctttaacttccgtctttttttttttttcacaatggaggacacaaaacgttgttatttcaagtctttgtggccaacagattggtggtttatgggccagcatccctttttatgcgtaaaatatttaaaacgcagcctgcaatggttggtaaagtggtgaaacgtttagtgtgtgaggtcggatcctggtctggccgctggccctggcgatcctctgaggcggcctgagtttggggcgcctcgtgtcaccgcgcgcccctcctccgggcctgagtcacggtgccgccggagtccccacgcgaggatgctgcggtgagcgcggccgggacgccgcgtcgggctctcggccgcccagcggcgccgcaggggaagccaggccggcagccgcgcgctccccagccggccaccaatcccgccctccccggctcctccggacctcctcggcaggcggcggcggggcctgcctgtgcgctctgcgcccgcccgcgcctaccctccatggcgtttatccggaagaagcagcaggagcagcagctgcagctctactccaaggagaggtgcgcgcccagctgaagaagggcccagccgggggcctagtcggggccggtcgtggggacgccggccggagatctgagggacgggaggcggcgtgggggccgggcacggaggcaggggccggacgcgtgtccagggcctgggctgggggctgtggcggaaacctgaggtcggggtgagaggccgggggcctggtctgggccggagcctgccggggacaggaactggatgacgggccaggccagattccaccgcggagccgaggcatgccgagctatccggcagtgcaggtcccggcggccgcgggcagctcacccggaaggccgcgcggggtccgggcgtggatcccggcacgcgagcccgggcgttcgcaggggaggattttccttgctgctgcttaacttggaggagtactactttgaacagcatagagccaatcacattttgcacaagggcagtcaccatgaaaggaaaatcagaggctccttaaaaatatgttcaaaatcggtgatttttgaaccagattcaatatcccagcccatcatcaagattcctttgagagactgtataaaaataggaaagcatggagaaaatggagccaatagacacttcacaaaggcaaaatctgggggtatttcactcattttcagtcaggtatatttcattaaagaacataatgttgttgcaccatataaaatagaaaggggcaaaatggaatatgtttttgaattggatgttcccgggaaagtggaagatgttgtggagacgttgcttcagcttcacagagcatcctgccttgacaaattgggtgaccaaaccgccatgataacagctattttgcagtctcgtttagctagaacatcatttgacaaaaacaggttccaaaacatttctgaaaagctgcacatggaatgcaaagcagaaatggtgacgcctctggtgactaatcctggacacgtgtgcatcacggacacaaacctgtattttcagcccctcaacggctacccgaaacctgtggtccagataacactccaagatgtccgccgcatctacaaaaggaggcacggcctcatgcctctgggcttggaagtattttgcacagaagatgatctgtgttccgacatctacctaaagttctatgaacctcaagatagagatgatctctatttttacattgccacatacctagagcaccatgtggcggagcacactgctgagagctacatgctgcagtggcagcgtggacacctttccaactatcagtacctccttcacctcaacaacctggccgaccgcagctgcaacgacctctcccagtaccctgtgtttccatggataatacatgattattccagctcagaactagatttgtcaaatccaggaaccttccgggatctcagtaagccagtaggggccctaaataaggaacggctggagagactactgacacgctaccaggaaatgcctgaaccaaagttcatgtatgggagtcactactcttccccgggttatgtacttttttatcttgttaggattgcaccagagtatatgctgtgcctgcagaatggaagatttgataatgcagatagaatgttcaacagtattgcagaaacttggaaaaactgtctggatggtgcaacggattttaaagagttaattccagaattctatggtgatgatgtgagctttctagtcaatagcctgaagttggatttgggaaagagacaaggaggacagatggttgacgatgtggagcttcccccttgggcttccagtcccgaggactttctccagaaggcc

SEQ ID NO: 451587 - DNA, 2625 bp, Homo sapiens
gtagagacagggtcttgctttgttgcccaggctggtctcgaactcctggcttcaaggaatcctccagcttcaacttccaaaagcattgggattaccggcatgagccatcactccagccccttagggcttatataccataggggaggggtggttcagaagggatgtgtaggacaattgaagtataataacatcaagttgtttgaattaaggacagaacatactgggtagatacctgctcttacacaaggaacaatagataaagtagaaatcttagaggccttcccagaactggggtcaatcagaagtcaacacggaggattagcttccaagatggagctgctttcgcctccacatccagcaattccactcttagattccaattccactcaacagaaatggaaacataggtccataaaaaaactgtacatgactgtgtacagcagccttattcacaatagccaaaatgtggaaacaactgaaatgtccatcaactgatgaatggataaacaaaatgcaacagaatatgctccagcaatctaaaggaacgaagtactgtacagatacatgctacaacatagatgaaccttgaaagcattacgctaaatgaaagaagccagacacaaaaggccacatattgtatggctccatttatatgaaatatccagaataggcaaacccatagagacaggaaattgattattgtttgctagggctggggtttggagggtagagttaggaagagtgacagctagagggtatgggtttcttttacatgtgatgaaaatgttctcaaattgtggtgattgttgaacatatctggaaatatactaaaaatcgctgaatggtatactttaaatggttgacttgtttggtatgtgagttatatcccaataaagctgttatataaaaaaaaatcatgcgagcaattatctcaacaatcaagagactgtgttaaagattctttgcttggccaaacttcagttaggcttctgaatcttctcccaggtccttgtgtgcacttccttgtaaatgcagtgttaggaagtaacactgccacggcagtttagcaagaatcccccaccctccatatgtgatcaaaattctttactcctacccttagtatctgaccccctggcctgccttcactgggactcctgttaggttggttcagccagaatttcccccagaattgatgtttcctcttagcagttttccgaacacctgctccttgctccttggctataaatctccacttattcctggtgtatttggaatagttacgactgagttgccttcacccctttaacttccgtctttttttttttttcacaatggaggacacaaaacgttgttatttcaagtctttgtggccaacagattggtggtttatgggccagcatccctttttatgcgtaaaatatttaaaacgcagcctgcaatggttggtaaagtggtgaaacgtttagtgtgtgaggtcggatcctggtctggccgctggccctggcgatcctctgaggcggcctgagtttggggcgcctcgtgtcaccgcgcgcccctcctccgggcctgagtcacggtgccgccggagtccccacgcgaggatgctgcggtgagcgcggccgggacgccgcgtcgggctctcggccgcccagcggcgccgcaggggaagccaggccggcagccgcgcgctccccagccggccaccaatcccgccctccccggctcctccggacctcctcggcaggcggcggcggggcctgcctgtgcgctctgcgcccgcccgcgcctaccctccatggcgtttatccggaagaagcagcaggagcagcagctgcagctctactccaaggagaggtgcgcgcccagctgaagaagggcccagccgggggcctagtcggggccggtcgtggggacgccggccggagatctgagggacgggaggcggcgtgggggccgggcacggaggcaggggccggacgcgtgtccagggcctgggctgggggctgtggcggaaacctgaggtcggggtgagaggccgggggcctggtctgggccggagcctgccggggacaggaactggatgacgggccaggccagattccaccgcggagccgaggcatgccgagctatccggcagtgcaggtcccggcggccgcgggcagctcacccggaaggccgcgcggggtccgggcgtggatcccggcacgcgagcccgggcgttcgcaggggaggattttccttgctgctgcttaacttggaggagtactactttgaacagcatagagccaatcacattttgcacaagggcagtcaccatgaaaggaaaatcagaggctccttaaaaatatgttcaaaatcggtgatttttgaaccagattcaatatcccagcccatcatcaagattcctttgagagactgtataaaaataggaaagcatggagaaaatggagccaatagacacttcacaaaggcaaaatctgggggtatttcactcattttcagtcaggtatatttcattaaagaacataatgttgttgcaccatataaaatagaaagggtaagtaaagcttttcatgtatttccagcaatttatatagtcattttgaacaataaaattttgtgact

SEQ ID NO: 451588 - DNA, 302 bp, Homo sapiens
ttctggaagggcccatggcatgtgggcccggctcactgctctcctctacccccaggtgtgcatcccctttgaccaggccaacctgaccgtcaagctgccagatggatacgaattcaagttccccaaccgcctcaacctggaggccatcaactacatggcagctgacggtgacttcaagatcaaatgtgtggcctttgactgaaatcagccagcccatggccccccaataaaaggcagctgcctctgctccctctgaaaaaaaaaatattccatataaaagcagccgcaattcgagcctattt

SEQ ID NO: 451589 - DNA, 576 bp, Homo sapiens
tgctccagagaacgctgaaaagttgccaggacccgagacaagctgcccaggatgggcccttctaggtcgggggtggagggtggttgtgtccaggctggtggcggggggggcgggggaaattcccttccaccacccccaagctgggaggttggggtggcagggaggtgagaatcttcctcgggccccagggaaagggttcaagtttctggcagaagaaaccactcaaaccagttaactcttgcccacccactcggggtgccagggaacagcagtgcccagcagtttgctcaatcttgttaaccctgagccagcccagccacagcccgactgcagggctattctccctaatgcagagaggccgtgtttttcagggtctcctctctagcccctgggcctctttgcagagaggggcttgaaggagaatagtggggtcgcccgcccctagccacttcctctccagcagaggggccggcccctccattcagtgtgacggtgggccaagtgtcggcccctccccagcctgatcctctccatctgcgatgggacagagcaccccatctcccaagtcactcttga

SEQ ID NO: 451590 - DNA, 747 bp, Homo sapiens
  misc_feature (23)..(24): n is a, c, g, or t
  misc_feature (28)..(28): n is a, c, g, or t
  misc_feature (31)..(31): n is a, c, g, or t
aatatacggctaggtacgaggcnnggtngcngtctctcgggtggagtcttctgacagctggtgcgcctgcccgggaacatcctcctggactcaatcatggcttgtggtctggtcgccagcaacctgaatctcaaacctggagagtgccttcgagtgcgaggcgaggtggctcctgacgctaagagcttcgtgctgaacctgggcaaagacagcaacaacctgtgcctgcacttcaaccctcgcttcaacgcccacggcgacgccaacaccatcgtgtgcaacagcaaggacggcggggcctgggggaccgagcagcgggaggctgtctttcccttccagcctggaagtgttgcagaggtgtgcatcaccttcgaccaggccaacctgaccgtcaagctgccagatggatacgaattcaagttccccaaccgcctcaacctggaggccatcaactacatggcagctgacggtgacttcaagatcaaatgtgtggcctttgactgaaatcagccagcccatggcccccaataaaggcagctgcctctgctccctctgaaaaaaaaaaaaaaaaaaaaaaaaaaaaaaaaaaaaaaaaaaaaaaccccgggggcctctatttggggggggggggaaaaaggggaaaaaaaggggccaggggaaaaggggtccgaccccattttttgggaaaaggggggaaaagcggggggccacaaaagggggggggaaaataaaaacggggtcctgtac

SEQ ID NO: 451591 - DNA, 878 bp, Homo sapiens
  misc_feature (23)..(24): n is a, c, g, or t
  misc_feature (28)..(28): n is a, c, g, or t
  misc_feature (31)..(31): n is a, c, g, or t
aatatacggctaggtacgaggcnnggtngcngtctctcgggtggagtcttctgacagctggtgcgcctgcccgggaacatcctcctggactcaatcatggcttgtggtctggtcgccagcaacctgaatctcaaacctggagagtgccttcgagtgcgaggcgaggtggctcctgacgctaagagcttcgtgctgaacctgggcaaagacagcaacaacctgtgcctgcacttcaaccctcgcttcaacgcccacggcgacgccaacaccatcgtgtgcaacagcaaggacggcggggcctgggggaccgagcagcgggaggctgtctttcccttccagcctggaagtgttgcagaggtgtgcatcaccttcgaccaggccaacctgaccgtcaagctgccagatggatacgaattcaagttccccaaccgcctcaacctggaggccatcaactacatggcagctgacggtgacttcaagatcaaatgtgtggcctttgactgaaatcagccagcccatggcccccaataaaggcagctgcctctgctccctctgaaaaaaaaaaaaaaaaaaaaaaaaaaggggggggggaaaaagttccccctcgggggcccaggtttaggcgcgtcccccggttttttttgtccgaaggggggccccctaatgggggcgcccgtatatataggcaaggggcggggccggcgtttacccgcgtccggcgcgggcaaacacgggtcgctgcgaacttttggggagagaccctttcctcgctgcgcgcgcccatgtgggcacccttccgacgggattgacgccttgggaaattaccttcgggttatggtgttaccccgcatttcgcgtgaaagtgtcgggtggtgact

SEQ ID NO: 451592 - DNA, 604 bp, Homo sapiens
  misc_feature (23)..(24): n is a, c, g, or t
  misc_feature (28)..(28): n is a, c, g, or t
  misc_feature (31)..(31): n is a, c, g, or t
aatatacggctaggtacgaggcnnggtngcngtctctcgggtggagtcttctgacagctggtgcgcctgcccgggaacatcctcctggactcaatcatggcttgtggtctggtcgccagcaacctgaatctcaaacctggagagtgccttcgagtgcgaggcgaggtggctcctgacgctaagagcttcgtgctgaacctgggcaaagacagcaacaacctgtgcctgcacttcaaccctcgcttcaacgcccacggcgacgccaacaccatcgtgtgcaacagcaaggacggcggggcctgggggaccgagcagcgggaggctgtctttcccttccagcctggaagtgttgcagaggtgtgcatcaccttcgaccaggccaacctgaccgtcaagctgccagatggatacgaattcaagttccccaaccgcctcaacctggaggccatcaactacatggcagctgacggtgacttcaagatcaaatgtgtggcctttgactgaaatcagccagcccatggccccccaataaaaggcagctgcctctgctccctctgaaaaaaaaaatattccatataaaagcagccgcaattcgagcctattt

SEQ ID NO: 451593 - DNA, 758 bp, Homo sapiens
  misc_feature (23)..(24): n is a, c, g, or t
  misc_feature (28)..(28): n is a, c, g, or t
  misc_feature (31)..(31): n is a, c, g, or t
  misc_feature (610)..(610): n is a, c, g, or t
  misc_feature (612)..(612): n is a, c, g, or t
  misc_feature (615)..(616): n is a, c, g, or t
aatatacggctaggtacgaggcnnggtngcngtctctcgggtggagtcttctgacagctggtgcgcctgcccgggaacatcctcctggactcaatcatggcttgtggtctggtcgccagcaacctgaatctcaaacctggagagtgccttcgagtgcgaggcgaggtggctcctgacgctaagagcttcgtgctgaacctgggcaaagacagcaacaacctgtgcctgcacttcaaccctcgcttcaacgcccacggcgacgccaacaccatcgtgtgcaacagcaaggacggcggggcctgggggaccgagcagcgggaggctgtctttcccttccagcctggaagtgttgcagaggtgtgcatcaccttcgaccaggccaacctgaccgtcaagctgccagatggatacgaattcaagttccccaaccgcctcaacctggaggccatcaactacatggcagctgacggtgacttcaagatcaaatgtgtggcctttgactgaaatcagccagcccatggcccccaataaaggcagctgcctctgctccctctgaaaaaaaaaaaaacaaaaaaaaaaaaaaaaaaacaaaaaacaaaaaaaacacaananaannaaaaaaaaaaaaaaaaaaaaagaggggggggcggcacccaccatatatctacccccgggggggcgcccacaaatgacacgccgcccccaccttgtttgtaaaaagaggggggcgccccccaaagggggaggataaaaaaaac

SEQ ID NO: 451594 - DNA, 892 bp, Homo sapiens
  misc_feature (23)..(24): n is a, c, g, or t
  misc_feature (28)..(28): n is a, c, g, or t
  misc_feature (31)..(31): n is a, c, g, or t
aatatacggctaggtacgaggcnnggtngcngtctctcgggtggagtcttctgacagctggtgcgcctgcccgggaacatcctcctggactcaatcatggcttgtggtctggtcgccagcaacctgaatctcaaacctggagagtgccttcgagtgcgaggcgaggtggctcctgacgctaagagcttcgtgctgaacctgggcaaagacagcaacaacctgtgcctgcacttcaaccctcgcttcaacgcccacggcgacgccaacaccatcgtgtgcaacagcaaggacggcggggcctgggggaccgagcagcgggaggctgtctttcccttccagcctggaagtgttgcagaggtgtgcatcaccttcgaccaggccaacctgaccgtcaagctgccagatggatacgaattcaagttccccaaccgcctcaacctggaggccatcaactacatggcagctgacggtgacttcaagatcaaatgtgtggcctttgactgaaatcagccagcccatggcccccaataaaggcagctgcctctgctccctctgaaaaaaaaaaaaaaaaaaaaaaaaaaacaaaaaaaaaaaagggggggggggcaaaaagaatccccgggggggcccaatttccgttcccctttttgttgtacaggtgcgcctagagggaagggaataaaaacgcaaggggcggggcgcgcttaaacacggtcggcggggaccccgccgctcggattccgggaaggacctacgcgggccggcgcctgtcgcccctccacggattagcgccgggaatacacctcgcgttcggttcccccgctacggcgggaatcgtcccttgtgaatgcggccggcaacacagaacccacaaaaagccgacagaggccgc

SEQ ID NO: 451595 - DNA, 732 bp, Homo sapiens
  misc_feature (23)..(24): n is a, c, g, or t
  misc_feature (28)..(28): n is a, c, g, or t
  misc_feature (31)..(31): n is a, c, g, or t
  misc_feature (580)..(580): n is a, c, g, or t
  misc_feature (588)..(589): n is a, c, g, or t
  misc_feature (593)..(593): n is a, c, g, or t
  misc_feature (595)..(595): n is a, c, g, or t
  misc_feature (606)..(606): n is a, c, g, or t
aatatacggctaggtacgaggcnnggtngcngtctctcgggtggagtcttctgacagctggtgcgcctgcccgggaacatcctcctggactcaatcatggcttgtggtctggtcgccagcaacctgaatctcaaacctggagagtgccttcgagtgcgaggcgaggtggctcctgacgctaagagcttcgtgctgaacctgggcaaagacagcaacaacctgtgcctgcacttcaaccctcgcttcaacgcccacggcgacgccaacaccatcgtgtgcaacagcaaggacggcggggcctgggggaccgagcagcgggaggctgtctttcccttccagcctggaagtgttgcagaggtgtgcatcaccttcgaccaggccaacctgaccgtcaagctgccagatggatacgaattcaagttccccaaccgcctcaacctggaggccatcaactacatggcagctgacggtgacttcaagatcaaatgtgtggcctttgactgaaatcagccagcccatggcccccaataaaggcagctgcctctgctccctctgaaaaaaaaaaaaaaaaaaaaaaatnccggggcnnctangncgggggggggnaaaaagggggaggactgggcctggggtcaaagggggtctggacccagtttttttggccaaaggggggaaaagggcgggccccaaaagggggggcgaaaatcgaaaaaccagggaaccggttaggag

SEQ ID NO: 451596 - DNA, 1179 bp, Homo sapiens
  misc_feature (23)..(24): n is a, c, g, or t
  misc_feature (28)..(28): n is a, c, g, or t
  misc_feature (31)..(31): n is a, c, g, or t
  misc_feature (601)..(601): n is a, c, g, or t
  misc_feature (604)..(604): n is a, c, g, or t
  misc_feature (607)..(608): n is a, c, g, or t
  misc_feature (611)..(611): n is a, c, g, or t
  misc_feature (613)..(613): n is a, c, g, or t
  misc_feature (615)..(616): n is a, c, g, or t
  misc_feature (619)..(619): n is a, c, g, or t
  misc_feature (622)..(622): n is a, c, g, or t
aatatacggctaggtacgaggcnnggtngcngtctctcgggtggagtcttctgacagctggtgcgcctgcccgggaacatcctcctggactcaatcatggcttgtggtctggtcgccagcaacctgaatctcaaacctggagagtgccttcgagtgcgaggcgaggtggctcctgacgctaagagcttcgtgctgaacctgggcaaagacagcaacaacctgtgcctgcacttcaaccctcgcttcaacgcccacggcgacgccaacaccatcgtgtgcaacagcaaggacggcggggcctgggggaccgagcagcgggaggctgtctttcccttccagcctggaagtgttgcagaggtgtgcatcaccttcgaccaggccaacctgaccgtcaagctgccagatggatacgaattcaagttccccaaccgcctcaacctggaggccatcaactacatggcagctgacggtgacttcaagatcaaatgtgtggcagcttcgtgctgaacctgggcaaagacagcaacaacctgtgcctgcacttcaaccctcgcttcaacgcccacggcgacgccaacaccatcgtgtgcacagcaagganggnggnnccngngnnacnagnagctgcctctgctccctctgaaaaaaaaaaaaaaaaaaaaaacctcgaagggcacactctagtgccgcgggcgccggaaaaacagagacggtacggaaaagggcccagtggccaataccgtgtcaccggaacccagtttcctggcccacaggggcgaaaaccgcgccgcggcccccccctaatcgcgggacgccgggaactcgaactctccgaaataagcccgggtgtaacccgcgtggccttacaaggaatccgcggcaaaaaaccccccccccacacacccacaccgcgagcccacaccgacccaccacccaccccgcaccacacgcgcaccggaaaatccaccacaagacggcgggacgagcaggccgagcgaataggcggcgcggtccacccgccggaccaaccccggccgactcccgaccacccactcgcccgccgcaaagacgcggtgaccgcacacgcgcttgtgccgcgtcgcggccccagcgctgcgtgaggagcctacctatgcactcgcccggcccccacatccgcaccccaactcacctacccaa

SEQ ID NO: 451597 - DNA, 2001 bp, Homo sapiens
  misc_feature (1800)..(1800): n is a, c, g, or t
caaagtgctggggttacaggcatgagccaccgtgcccgggagtattattattattatttgttaattcgccccataattactaagcatctttttctggtgtgccccacttgtgctgggcaccgggaatacagagatgtacaagacaggacgggaggtcaccatctggagggagtcactgaccttgaccaaacgggctaggatgctaatgacttcaagaatcaagcgagccctcctgtgcagcccccattgtacagatgagcaaacaggggaagaggggcaggagcaggtggcatggccagagctagaatccaggtttcttgtctctgttagtgagttcttccagcaaggtgcgttcatgggatactgagtgacagattagtcagtcagtggggctggagctggccgaggtggcctcatgcccacccgttaccccagcttcgtgctgaacctgggcaaagacagcaacaacctgtgcctgcacttcaaccctcgcttcaacgcccacggcgacgccaacaccatcgtgtgcaacagcaaggacggcggggcctgggggaccgagcagcgggaggctgtctttcccttccagcctggaagtgttgcagaggtgtgcatcaccttcgaccaggccaacctgaccgtcaagctgccagatggatacgaattcaagttccccaaccgcctcaacctggaggccatcaactacatggcagctgacggtgacttcaagatcaaatgtgtggcctttgactgaaatcagccagcccatggcccccaataaaggcagctgcctctgctccctctgaaaaaaaaaaaaaaaaaaaaaaaaaaaaaaaaaaaaaaaaaaaaaacaaacaaaaaagaggggcgcgcgcgcgcgccaaaaaagatatctcccccgagagagggcgcccaaaagtgtatatcaggcatacaccccgggtattactcgctgagtaacacccaagagggggggccccccacaatagatgaggggcgagcgcgcactgaaataatatactaacggtgcgaggagacaagcagggcgcgcccgcaccgtctgtttacaacaaccagcgcgcgcggtggacaagcggggggcaaaacaaacggctggcgaacacacccagggggaggaacaaccctctgtgtgagcaaaggaggacgcacactcactactacccactgctcgggggggaggcggagcccaccaccacatatatgtgggggggccaacacaacaatacctcgtacctcaaacgaggaactatatctacaaacgaccgcgctccctcaaagggggggcaaccaacactatactacacgagccacgtcttaccaacaacagcgggttcaaacaaaccaccaggcgcgggcggcacaacaaaccaccaaactaccacgcgcagcaaatataattagcggcacaggacgtacggtagcgacgagaaacagaacgaaagtttttcgccgcgcgcccaccacacgacacgcggaggagacgtaatagtgaagcatacgtgtgtgaggacagaacaacaaccatttattttataatacccccgcgcgggagcctccctgcagccaggggaatgaacatagaatcacagaggacggagacagacagcagagccgccagaccaaacgaaccacgccaggccacaacgctcagcgcgcacgacacgaagagcagcgacaagcgagagagaacacagaagcgccggagcgccgagacaggagagaggcgggcaagcacggcgcggcacggagcacgaacacagtggacaacagaggacacgncccgcggggggacgtgagcaggcacgagccgcagagtgacagaggcagacgagagcaagcgacggacagagaaaacgtgaacgccgcgacactcaagcatacagaagagagacataggcgccaaggagagtagacaatcagcgcagacatggagcgacgacgcgatagcggcaaagcagaccgacgacgccgaatgaacaa

SEQ ID NO: 451598 - DNA, 1043 bp, Homo sapiens
  misc_feature (23)..(24): n is a, c, g, or t
  misc_feature (28)..(28): n is a, c, g, or t
  misc_feature (31)..(31): n is a, c, g, or t
  misc_feature (1043)..(1043): n is a, c, g, or t
aatatacggctaggtacgaggcnnggtngcngtctctcgggtggagtcttctgacagctggtgcgcctgcccgggaacatcctcctggactcaatcatggcttgtggtctggtcgccagcaacctgaatctcaaacctggagagtgccttcgagtgcgaggcgaggtggctcctgacgctaagagcttcgtgctgaacctgggcaaagacagcaacaacctgtgcctgcacttcaaccctcgcttcaacgcccacggcgacgccaacaccatcgtgtgcaacagcaaggacggcggggcctgggggaccgagcagcgggaggctgtctttcccttccagcctggaagtgttgcagaggtgtgcatcaccttcgaccaggccaacctgaccgtcaagctgccagatggatacgaattcaagttccccaaccgcctcaacctggaggccatcaactacatggcagctgacggtgacttcaagatcaaatgtgtggcctttgactgaaatcagccagcccatggcccccaataaaggcagctgcctctgctccctctgaaaaaaaaaaaaaaagaaacaaaaaaaaaaaagaaaaaagaaaaaaaagaaagaaaaaaaaaaaaaagtctggggggtttttttttggggggggggaagaaaaagagttaaaaagggggagcagggggtaatgtgtttccaagccccttttttgtgaaagaggggagaacgggggggccccatatgggggggttatttttttgtgtgcctgttttttatttttatttgttggtagaacagcagaaaataagagaggacagaaggaggagaaaaggagaagaggaaagaggaaaagaggaaagtagagaggacgaggaagggagagagcgacgaggtaggaaggagaggaaacgggaagagacagagacgggaggaggacagtaaggagaggacagaagagggaagcaaggaggagagaggagcgggaaaggaagaggcgagggaacatgagggagacgagggaaagaggggaggaggagcgagggggn

SEQ ID NO: 451599 - DNA, 1210 bp, Homo sapiens
  misc_feature (23)..(24): n is a, c, g, or t
  misc_feature (28)..(28): n is a, c, g, or t
  misc_feature (31)..(31): n is a, c, g, or t
aatatacggctaggtacgaggcnnggtngcngtctctcgggtggagtcttctgacagctggtgcgcctgcccgggaacatcctcctggactcaatcatggcttgtggtctggtcgccagcaacctgaatctcaaacctggagagtgccttcgagtgcgaggcgaggtggctcctgacgctaagagcttcgtgctgaacctgggcaaagacagcaacaacctgtgcctgcacttcaaccctcgcttcaacgcccacggcgacgccaacaccatcgtgtgcaacagcaaggacggcggggcctgggggaccgagcagcgggaggctgtctttcccttccagcctggaagtgttgcagaggtgtgcatcaccttcgaccaggccaacctgaccgtcaagctgccagatggatacgaattcaagttccccaaccgcctcaacctggaggccatcaactacatggcagctgacggtgacttcaagatcaaatgtgtggcctttgactgaaatcagccagcccatggcccccaataaaggcagctgcctctgctccctctgaaaaaaaaaaaaaaaaaaaaaaaaaaagaaaaaaaaaaaaaaaaaaaaaaaaaaaaaaaaaaaaaaaaaaaaaaaagggggggggggcgcctttttttttttttttttttttttttcttattgagtggtgttggtggacacagcccacaaatattgggggagcgagcgcaccccggtgaagagccggggcgaaaatacaaacagaagggtgggcgtcgaaccacacccaaccaggtcgggcagggggagccaacaaaccaatcgattccaagaagccgagcgaggcagaatggaaagctaagaactacggttgggggacatacactgaacaagagaggaaactaggattgtccaccacacgacaacaagcataacgaggagagagggaacaccacaagaagaaatatgcatacgggggagggccgaacaaaacacccccaccaaagcaggaggggggcaaaaaagccaccacataacatggggggggggtacgaacaacaggccccgctgtggccgcgaaacaagaggaagcaggctaaagggggcaatacagagcgcagcacacacgcagcagagagggacgagccaagcagaggacagtcccgcggggacagcaagggagagcaaatgagggcccccaaagtcagggacgacg

SEQ ID NO: 451600 - DNA, 906 bp, Homo sapiens
  misc_feature (23)..(24): n is a, c, g, or t
  misc_feature (28)..(28): n is a, c, g, or t
  misc_feature (31)..(31): n is a, c, g, or t
aatatacggctaggtacgaggcnnggtngcngtctctcgggtggagtcttctgacagctggtgcgcctgcccgggaacatcctcctggactcaatcatggcttgtggtctggtcgccagcaacctgaatctcaaacctggagagtgccttcgagtgcgaggcgaggtggctcctgacgctaagagcttcgtgctgaacctgggcaaagacagcaacaacctgtgcctgcacttcaaccctcgcttcaacgcccacggcgacgccaacaccatcgtgtgcaacagcaaggacggcggggcctgggggaccgagcagcgggaggctgtctttcccttccagcctggaagtgttgcagaggccaacctgaccgtcaagctgccagatggatacgaattcaagttccccaaccgcctcaacctggaggccatcaactacatggcagctgacggtgacttcaagatcaaatgtgtggcctttgactgaaatcagccagcccatggcccccaataaaggcagctgcctctgctccctctgaactaaaaaaaaaaaaaaaaaaaaaaaaaaaaatttttgggcggcctgggccctgaagaaagctctcataaacccaactcggttgtgggcagcgggggcccaagttgaggataacgacgacaatgggctaacaacggggtgttcccaagaggaaaacccggggcccaggacaaatggaggacgaggagattttctcaccacattaataaaacacgcgcccggggagtaaaacccaggagacgtgttctagaacaaacactccaagaggtaggattcataggaggggccaaataaggggagtgcttatacaacaggagagttaccaacgaagagcctgagtactacaatttaacggccccggcgcgggtgggc

SEQ ID NO: 451601 - DNA, 519 bp, Homo sapiens
  misc_feature (23)..(24): n is a, c, g, or t
  misc_feature (28)..(28): n is a, c, g, or t
  misc_feature (31)..(31): n is a, c, g, or t
aatatacggctaggtacgaggcnnggtngcngtctctcgggtggagtcttctgacagctggtgcgcctgcccgggaacatcctcctggactcaatcatggcttgtggtctggtcgccagcaacctgaatctcaaacctggagagtgccttcgagtgcgaggcgaggtggctcctgacgctaagagcttcgtgctgaacctgggcaaagacagcaacaacctgtgcctgcacttcaaccctcgcttcaacgcccacggcgacgccaacaccatcgtgtgcaacagcaaggacggcggggcctgggggaccgagcagcgggaggctgtctttcccttccagcctggaagtgttgcagaggtgtgcatcaccttcgaccagctgacggtgacttcaagatcaaatgtgtggcctttgactgaaatcagccagcccatggccccccaataaaaggcagctgcctctgctccctctgaaaaaaaaaatattccatataaaagcagccgcaattcgagcctattt

SEQ ID NO: 451602 - DNA, 442 bp, Homo sapiens
  misc_feature (23)..(24): n is a, c, g, or t
  misc_feature (28)..(28): n is a, c, g, or t
  misc_feature (31)..(31): n is a, c, g, or t
aatatacggctaggtacgaggcnnggtngcngtctctcgggtggagtcttctgacagctggtgcgcctgcccgggaacatcctcctggactcaatcatggcttgtggtctggtcgccagcaacctgaatctcaaacctggagagtgccttcgagtgcgaggcgaggtggctcctgacgctaagagcttcgtgctgaacctgggcaaagacagcaacaacctgtgcctgcacttcaaccctcgcttcaacgcccacggcgacgccaacaccatcgtgtgcaacagcaaggacggcggggcctgggggaccgagcagctgtaggctgtctatcccttcagccttgaagtgttgagaagtgtgcatcacctttgacaggccacctgaccgtaagctgccagatgatattcaggttcccaccgcttcctgaggccatactactgcg

SEQ ID NO: 451603 - DNA, 393 bp, Homo sapiens
  misc_feature (23)..(24): n is a, c, g, or t
  misc_feature (28)..(28): n is a, c, g, or t
  misc_feature (31)..(31): n is a, c, g, or t
aatatacggctaggtacgaggcnnggtngcngtctctcgggtggagtcttctgacagctggtgcgcctgcccgggaacatcctcctggactcaatcatggcttgtggtctggtcgccagcaacctgaatctcaaacctggagagtgccttcgagtgcgaggcgaggtggctcctgacgctaagagcttcgtgctgaacctgggcaaagacagcaacaacctgtgcctgcacttcaaccctcgcttcaacgcccacggcgacgccaacaccatcgtgtgcaacagcaaggacggcggggcctgggggaccgacgttggatgcagtcagcggcgttgggtgcagtcacgcgttggatgcagtcagcgcgttgatgcagtcagcgcgtgacgtagg

SEQ ID NO: 451604 - DNA, 389 bp, Homo sapiens
  misc_feature (23)..(24): n is a, c, g, or t
  misc_feature (28)..(28): n is a, c, g, or t
  misc_feature (31)..(31): n is a, c, g, or t
aatatacggctaggtacgaggcnnggtngcngtctctcgggtggagtcttctgacagctggtgcgcctgcccgggaacatcctcctggactcaatcatggcttgtggtctggtcgccagcaacctgaatctcaaacctggagagtgccttcgagtgcgaggcgaggtggctcctgacgctaagagcttcgtgctgaacctgggcaaagacagcaacaacctgtgcctgcacttcaaccctcgcttcaacgcccacggcgacgccaacaccatcgtgtgcaacagcaaggacggcggggcctgggggaccgacaataaaaggcagctgcctctgctccctctgaaaaaaaaaatattccatataaaagcagccgcaattcgagcctattt

SEQ ID NO: 451605 - DNA, 575 bp, Homo sapiens
  misc_feature (23)..(24): n is a, c, g, or t
  misc_feature (28)..(28): n is a, c, g, or t
  misc_feature (31)..(31): n is a, c, g, or t
aatatacggctaggtacgaggcnnggtngcngtctctcgggtggagtcttctgacagctggtgcgcctgcccgggaacatcctcctggactcaatcatggcttgtggtctggtcgccagcaacctgaatctcaaacctggagagtgccttcgagtgcgaggcgaggtggctcctgacgctaagaggtgtgcatcaccttcgaccaggccaacctgaccgtcaagctgccagatggatacgaattcaagttccccaaccgcctcaacctggaggccatcaactacatggcagctgacggtgacttcaagatcaaatgtgtggcctttgactgaaatcagccagcccatggcccccaataaaggcagctgcctctgctccctctgaaaaaaaaaaaaaaaaaaaaaaaaaaaaaaaaaaaaaaaaaaaaaaccccgggggcctctatttggggggggggggaaaaaggggaaaaaaaggggccaggggaaaaggggtccgaccccattttttgggaaaaggggggaaaagcggggggccacaaaagggggggggaaaataaaaacggggtcctgtac

SEQ ID NO: 451606 - DNA, 388 bp, Homo sapiens
  misc_feature (23)..(24): n is a, c, g, or t
  misc_feature (28)..(28): n is a, c, g, or t
  misc_feature (31)..(31): n is a, c, g, or t
aatatacggctaggtacgaggcnnggtngcngtctctcgggtggagtcttctgacagctggtgcgcctgcccgggaacatcctcctggactcaatcatggcttgtggtctggtcgccagcaacctgaatctcaaacctggagagtgccttcgagtgcgaggcgaggtggctcctgacgctaagagcttcgtgctgaacctgggcaaagacagcaacaacctgtgcctgcacttcaaccctcgcttcaacgcccacggcgacgccaacaccatcgtgtgcaacagcaaggaccccaaaagagcaaagaccccaaaagagcaaagacagcaaaagagcaaagacaccaaaagagcaaagaccaaaagagctcagaccccataagagctta

SEQ ID NO: 451607 - DNA, 1152 bp, Homo sapiens
  misc_feature (23)..(24): n is a, c, g, or t
  misc_feature (28)..(28): n is a, c, g, or t
  misc_feature (31)..(31): n is a, c, g, or t
aatatacggctaggtacgaggcnnggtngcngtctctcgggtggagtcttctgacagctggtgcgcctgcccgggaacatcctcctggactcaatcatggcttgtggtctggtcgccagcaacctagcttcgtgctgaacctgggcaaagacagcaacaacctgtgcctgcacttcaaccctcgcttcaacgcccacggcgacgccaacaccatcgtgtgcaacagcaaggacggcggggcctgggggaccgagcagcgggaggctgtctttcccttccagcctggaagtgttgcagaggtgtgcatcaccttcgaccaggccaacctgaccgtcaagctgccagatggatacgaattcaagttccccaaccgcctcaacctggaggccatcaactacatggcagctgacggtgacttcaagatcaaatgtgtggcctttgactgaaatcagccagcccatggcccccaataaaggcagctgcctctgctccctctgaaaaaaaaaaaaaaaaaaaaaaaaaaagaaaaaaaaaaaaaaaaaaaaaaaaaaaaaaaaaaaaaaaaaaaaaaaagggggggggggcgcctttttttttttttttttttttttttcttattgagtggtgttggtggacacagcccacaaatattgggggagcgagcgcaccccggtgaagagccggggcgaaaatacaaacagaagggtgggcgtcgaaccacacccaaccaggtcgggcagggggagccaacaaaccaatcgattccaagaagccgagcgaggcagaatggaaagctaagaactacggttgggggacatacactgaacaagagaggaaactaggattgtccaccacacgacaacaagcataacgaggagagagggaacaccacaagaagaaatatgcatacgggggagggccgaacaaaacacccccaccaaagcaggaggggggcaaaaaagccaccacataacatggggggggggtacgaacaacaggccccgctgtggccgcgaaacaagaggaagcaggctaaagggggcaatacagagcgcagcacacacgcagcagagagggacgagccaagcagaggacagtcccgcggggacagcaagggagagcaaatgagggcccccaaagtcagggacgacg

SEQ ID NO: 451608 - DNA, 868 bp, Homo sapiens
  misc_feature (23)..(24): n is a, c, g, or t
  misc_feature (28)..(28): n is a, c, g, or t
  misc_feature (31)..(31): n is a, c, g, or t
  misc_feature (290)..(290): n is a, c, g, or t
  misc_feature (293)..(293): n is a, c, g, or t
  misc_feature (296)..(297): n is a, c, g, or t
  misc_feature (300)..(300): n is a, c, g, or t
  misc_feature (302)..(302): n is a, c, g, or t
  misc_feature (304)..(305): n is a, c, g, or t
  misc_feature (308)..(308): n is a, c, g, or t
  misc_feature (311)..(311): n is a, c, g, or t
aatatacggctaggtacgaggcnnggtngcngtctctcgggtggagtcttctgacagctggtgcgcctgcccgggaacatcctcctggactcaatcatggcttgtggtctggtcgccagcaacctgaatctcaaacctggagagtgccttcgagtgcgaggcgaggtggctcctgacgctaagagcttcgtgctgaacctgggcaaagacagcaacaacctgtgcctgcacttcaaccctcgcttcaacgcccacggcgacgccaacaccatcgtgtgcacagcaagganggnggnnccngngnnacnagnagctgcctctgctccctctgaaaaaaaaaaaaaaaaaaaaaacctcgaagggcacactctagtgccgcgggcgccggaaaaacagagacggtacggaaaagggcccagtggccaataccgtgtcaccggaacccagtttcctggcccacaggggcgaaaaccgcgccgcggcccccccctaatcgcgggacgccgggaactcgaactctccgaaataagcccgggtgtaacccgcgtggccttacaaggaatccgcggcaaaaaaccccccccccacacacccacaccgcgagcccacaccgacccaccacccaccccgcaccacacgcgcaccggaaaatccaccacaagacggcgggacgagcaggccgagcgaataggcggcgcggtccacccgccggaccaaccccggccgactcccgaccacccactcgcccgccgcaaagacgcggtgaccgcacacgcgcttgtgccgcgtcgcggccccagcgctgcgtgaggagcctacctatgcactcgcccggcccccacatccgcaccccaactcacctacccaa

SEQ ID NO: 451609 - DNA, 348 bp, Homo sapiens
  misc_feature (23)..(24): n is a, c, g, or t
  misc_feature (28)..(28): n is a, c, g, or t
  misc_feature (31)..(31): n is a, c, g, or t
aatatacggctaggtacgaggcnnggtngcngtctctcgggtggagtcttctgacagctggtgcgcctgcccgggaacatcctcctggactcaatcatggcttgtggtctggtcgccagcaacctgaatctcaaacctggagagtgccttcgagtgcgaggcgaggtggctcctgacgctaagaggtgagaagtgaagtcggggtggtgggcggcagggacgggcttggtccagcagggagggcgtggccggccaagcccacatctcctccctggccgggagcgggttaacggccagccgccgatgctgcgttttctgggtgactcacttcccccgcagggtctgggc

SEQ ID NO: 451610 - DNA, 260 bp, Homo sapiens
  misc_feature (23)..(24): n is a, c, g, or t
  misc_feature (28)..(28): n is a, c, g, or t
  misc_feature (31)..(31): n is a, c, g, or t
aatatacggctaggtacgaggcnnggtngcngtctctcgggtggagtcttctgacagctggtgcgcctgcccgggaacatcctcctggactcaatcatggcttgtggtctggtcgccagcaacctgaatctcaaacctggagagtgccttcgagtgcgaggcgaggtggctcctgacgctaagagttaggtgaccttggaccagtcaaccaacctcacctagcctcagtttgttagaaaaacaaggggggaggtggttgt

SEQ ID NO: 451611 - DNA, 718 bp, Homo sapiens
  misc_feature (23)..(24): n is a, c, g, or t
  misc_feature (28)..(28): n is a, c, g, or t
  misc_feature (31)..(31): n is a, c, g, or t
  misc_feature (622)..(622): n is a, c, g, or t
  misc_feature (625)..(625): n is a, c, g, or t
  misc_feature (627)..(628): n is a, c, g, or t
  misc_feature (630)..(630): n is a, c, g, or t
aatatacggctaggtacgaggcnnggtngcngtctctcgggtggagtcttctgacagctggtgcgcctgcccgggaacatcctcctggactcaatcatggcttgtggtctggtcgccagcaacctgaatctcaaacctggagagtgccttcgagtgcgaggcgaggtggctcctgacgctaagagcttcgtgctgaacctgggcaaagacagcaacaacctgtgcctgcacttcaaccctcgcttcaacgcccacggcgacgccaacaccatcgtgtgcaacagcaaggacggcggggcctgggggaccgagcagcgggaggctgtctttcccttccagcctggaagtgttgcagaggtgtgcatcaccttcgaccaggccaacctgaccgtcaagctgccagatggatacgaattcaagttccccaaccgcctcaacctggaggccatcaactacatggcagctgacggtgacttcaagatcaaatgtgtggcctttgactgaaatcagccagcccatggcccccaataaaggcagctgcctctgctccctctgaaaaaaaaaaaaaaaaaaaaaaaaaaaaaaaaacccgggggcgtttttttcggggggggggaaaaanggngnngnaaggggcggggcaaggtgtttcctgggccccctttttttggacaggggggaattgcgggccccaaaggggggggggaaaaatgaaacg

SEQ ID NO: 451612 - DNA, 1751 bp, Homo sapiens
  misc_feature (23)..(24): n is a, c, g, or t
  misc_feature (28)..(28): n is a, c, g, or t
  misc_feature (31)..(31): n is a, c, g, or t
  misc_feature (1550)..(1550): n is a, c, g, or t
aatatacggctaggtacgaggcnnggtngcngtctctcgggtggagtcttctgacagctggtgcgcctgcccgggaacatcctcctggactcaatcatggcttgtggtctggtcgccagcaacctgaatctcaaacctggagagtgccttcgagtgcgaggcgaggtggctcctgacgctaagagcttcgtgctgaacctgggcaaagacagcaacaacctgtgcctgcacttcaaccctcgcttcaacgcccacggcgacgccaacaccatcgtgtgcaacagcaaggacggcggggcctgggggaccgagcagcgggaggctgtctttcccttccagcctggaagtgttgcagaggtgtgcatcaccttcgaccaggccaacctgaccgtcaagctgccagatggatacgaattcaagttccccaaccgcctcaacctggaggccatcaactacatggcagctgacggtgacttcaagatcaaatgtgtggcctttgactgaaatcagccagcccatggcccccaataaaggcagctgcctctgctccctctgaaaaaaaaaaaaaaaaaaaaaaaaaaaaaaaaaaaaaaaaaaaaaacaaacaaaaaagaggggcgcgcgcgcgcgccaaaaaagatatctcccccgagagagggcgcccaaaagtgtatatcaggcatacaccccgggtattactcgctgagtaacacccaagagggggggccccccacaatagatgaggggcgagcgcgcactgaaataatatactaacggtgcgaggagacaagcagggcgcgcccgcaccgtctgtttacaacaaccagcgcgcgcggtggacaagcggggggcaaaacaaacggctggcgaacacacccagggggaggaacaaccctctgtgtgagcaaaggaggacgcacactcactactacccactgctcgggggggaggcggagcccaccaccacatatatgtgggggggccaacacaacaatacctcgtacctcaaacgaggaactatatctacaaacgaccgcgctccctcaaagggggggcaaccaacactatactacacgagccacgtcttaccaacaacagcgggttcaaacaaaccaccaggcgcgggcggcacaacaaaccaccaaactaccacgcgcagcaaatataattagcggcacaggacgtacggtagcgacgagaaacagaacgaaagtttttcgccgcgcgcccaccacacgacacgcggaggagacgtaatagtgaagcatacgtgtgtgaggacagaacaacaaccatttattttataatacccccgcgcgggagcctccctgcagccaggggaatgaacatagaatcacagaggacggagacagacagcagagccgccagaccaaacgaaccacgccaggccacaacgctcagcgcgcacgacacgaagagcagcgacaagcgagagagaacacagaagcgccggagcgccgagacaggagagaggcgggcaagcacggcgcggcacggagcacgaacacagtggacaacagaggacacgncccgcggggggacgtgagcaggcacgagccgcagagtgacagaggcagacgagagcaagcgacggacagagaaaacgtgaacgccgcgacactcaagcatacagaagagagacataggcgccaaggagagtagacaatcagcgcagacatggagcgacgacgcgatagcggcaaagcagaccgacgacgccgaatgaacaa

SEQ ID NO: 451613 - DNA, 694 bp, Homo sapiens
  misc_feature (23)..(24): n is a, c, g, or t
  misc_feature (28)..(28): n is a, c, g, or t
  misc_feature (31)..(31): n is a, c, g, or t
  misc_feature (568)..(569): n is a, c, g, or t
  misc_feature (582)..(582): n is a, c, g, or t
aatatacggctaggtacgaggcnnggtngcngtctctcgggtggagtcttctgacagctggtgcgcctgcccgggaacatcctcctggactcaatcatggcttgtggtctggtcgccagcaacctgaatctcaaacctggagagtgccttcgagtgcgaggcgaggtggctcctgacgctaagagcttcgtgctgaacctgggcaaagacagcaacaacctgtgcctgcacttcaaccctcgcttcaacgcccacggcgacgccaacaccatcgtgtgcaacagcaaggacggcggggcctgggggaccgagcagcgggaggctgtctttcccttccagcctggaagtgttgcagaggtgtgcatcaccttcgaccaggccaacctgaccgtcaagctgccagatggatacgaattcaagttccccaaccgcctcaacctggaggccatcaactacatggcagctgacggtgacttcaagatcaaatgtgtggcctttgactgaaatcagccagcccatggcccccaataaaggcagctgcctctgctccctctgaaaaagaagaagnnggggaaaaaaggnaccttcgaggggtggggccccggtcaccccaatttcaccccttataggtgaagttcgttatttaccaaattcaaactgggccccgtgggtttttaaccaacctggtcgttga

SEQ ID NO: 451614 - DNA, 777 bp, Homo sapiens
  misc_feature (23)..(24): n is a, c, g, or t
  misc_feature (28)..(28): n is a, c, g, or t
  misc_feature (31)..(31): n is a, c, g, or t
  misc_feature (630)..(630): n is a, c, g, or t
aatatacggctaggtacgaggcnnggtngcngtctctcgggtggagtcttctgacagctggtgcgcctgcccgggaacatcctcctggactcaatcatggcttgtggtctggtcgccagcaacctgaatctcaaacctggagagtgccttcgagtgcgaggcgaggtggctcctgacgctaagagcttcgtgctgaacctgggcaaagacagcaacaacctgtgcctgcacttcaaccctcgcttcaacgcccacggcgacgccaacaccatcgtgtgcaacagcaaggacggcggggcctgggggaccgagcagcgggaggctgtctttcccttccagcctggaagtgttgcagaggtgtgcatcaccttcgaccaggccaacctgaccgtcaagctgccagatggatacgaattcaagttccccaaccgcctcaacctggaggccatcaactacatggcagctgacggtgacttcaagatcaaatgtgtggcctttgactgaaatcagccagcccatggcccccaataaaggcagctgcctctgctccctctaaaaaaaaaaaacaaaaacacaaaacacctttttggggcggtggggcctagaaaaagtttttaacaccattcttgngggcgcgggcccagtgttaggcacctgggccaccgctggcccaaggacaccgggcaggaccgggtggtttttccaaaaaaaccgcgggcacccgctgttgacacccagggcgtccgggcctagcggcttccacacggcccaggccta

SEQ ID NO: 451615 - DNA, 927 bp, Homo sapiens
  misc_feature (23)..(24): n is a, c, g, or t
  misc_feature (28)..(28): n is a, c, g, or t
  misc_feature (31)..(31): n is a, c, g, or t
aatatacggctaggtacgaggcnnggtngcngtctctcgggtggagtcttctgacagctggtgcgcctgcccgggaacatcctcctggactcaatcatggcttgtggtctggtcgccagcaacctgaatctcaaacctggagagtgccttcgagtgcgaggcgaggtggctcctgacgctaagagcttcgtgctgaacctgggcaaagacagcaacaacctgtgcctgcacttcaaccctcgcttcaacgcccacggcgacgccaacaccatcgtgtgcaacagcaaggacggcggggcctgggggaccgagcagcgggaggctgtctttcccttccagcctggaagtgttgcagaggtgtgcatcaccttcgaccaggccaacctgaccgtcaagctgccagatggatacgaattcaagttccccaaccgcctcaacctggaggccatcaactacatggcagctgacggtgacttcaagatcaaatgtgtggcctttgactgaaatcagccagcccatggcccccaataaaggcagctgcctctgctccctctgaactaaaaaaaaaaaaaaaaaaaaaaaaaaaaatttttgggcggcctgggccctgaagaaagctctcataaacccaactcggttgtgggcagcgggggcccaagttgaggataacgacgacaatgggctaacaacggggtgttcccaagaggaaaacccggggcccaggacaaatggaggacgaggagattttctcaccacattaataaaacacgcgcccggggagtaaaacccaggagacgtgttctagaacaaacactccaagaggtaggattcataggaggggccaaataaggggagtgcttatacaacaggagagttaccaacgaagagcctgagtactacaatttaacggccccggcgcgggtgggc

SEQ ID NO: 451616 - DNA, 759 bp, Homo sapiens
  misc_feature (23)..(24): n is a, c, g, or t
  misc_feature (28)..(28): n is a, c, g, or t
  misc_feature (31)..(31): n is a, c, g, or t
aatatacggctaggtacgaggcnnggtngcngtctctcgggtggagtcttctgacagctggtgcgcctgcccgggaacatcctcctggactcaatcatggcttgtggtctggtcgccagcaacctgaatctcaaacctggagagtgccttcgagtgcgaggcgaggtggctcctgacgctaagagcttcgtgctgaacctgggcaaagacagcaacaacctgtgcctgcacttcaaccctcgcttcaacgcccacggcgacgccaacaccatcgtgtgcaacagcaaggacggcggggcctgggggaccgagcagcgggaggctgtctttcccttccagcctggaagtgttgcagaggtgtgcatcaccttcgaccaggccaacctgaccgtcagagccttgccagattggatacagaatttccaaagttcatccaaatcgggcttcaaccttgggaaggtcatcgtactacgattggcagcattgacaggtcgacgttcgagagatccacaatgttgtggttctttgacttgaaagatcagcccaagtctccattggcaccccccaaataagaggggctatgcgtgccttcgtggttccccatcttgtaataaaaagcaatacatgtgtccaggtttatttaatggggggaggggcgcacaaaaccattgattatcccacccctttcggggcggccctaaaaaagaaaagtgtagatcacgcacatatttttcggggttactcatagtggtttcccat

SEQ ID NO: 451617 - DNA, 455 bp, Homo sapiens
  misc_feature (23)..(24): n is a, c, g, or t
  misc_feature (28)..(28): n is a, c, g, or t
  misc_feature (31)..(31): n is a, c, g, or t
aatatacggctaggtacgaggcnnggtngcngtctctcgggtggagtcttctgacagctggtgcgcctgcccgggaacatcctcctggactcaatcatggcttgtggtctggtcgccagcaacctgaatctcaaacctggagagtgccttcgagtgcgaggcgaggtggctcctgacgctaagagcttcgtgctgaacctgggcaaagacagcaacaacctgtgcctgcacttcaaccctcgcttcaacgcccacggcgacgccaacaccatcgtgtgcaacagcaaggacggcggggcctgggggaccgagcagcgggaggctgtctttcccttccagcctggaagtgttgcaggtgggctgcagaccggaaccggggaccagggacaggggctgggtgggctggggcggggctgggttagtgactagagaccttggccctgcctgctctttcc

SEQ ID NO: 451618 - DNA, 868 bp, Homo sapiens
tgctccagagaacgctgaaaagttgccaggacccgagacaagctgcccaggatgggcccttctagggaatctcaaacctggagagtgccttcgagtgcgaggcgaggtggctcctgacgctaagagcttcgtgctgaacctgggcaaagacagcaacaacctgtgcctgcacttcaaccctcgcttcaacgcccacggcgacgccaacaccatcgtgtgcaacagcaaggacggcggggcctgggggaccgagcagcgggaggctgtctttcccttccagcctggaagtgttgcagaggtgtgcatcaccttcgaccaggccaacctgaccgtcaagctgccagatggatacgaattcaagttccccaaccgcctcaacctggaggccatcaactacatggcagctgacggtgacttcaagatcaaatgtgtggcctttgactgaaatcagccagcccatggcccccaataaaggcagctgcctctgctccctctgaactaaaaaaaaaaaaaaaaaaaaaaaaaaaaatttttgggcggcctgggccctgaagaaagctctcataaacccaactcggttgtgggcagcgggggcccaagttgaggataacgacgacaatgggctaacaacggggtgttcccaagaggaaaacccggggcccaggacaaatggaggacgaggagattttctcaccacattaataaaacacgcgcccggggagtaaaacccaggagacgtgttctagaacaaacactccaagaggtaggattcataggaggggccaaataaggggagtgcttatacaacaggagagttaccaacgaagagcctgagtactacaatttaacggccccggcgcgggtgggc

SEQ ID NO: 451619 - DNA, 906 bp, Homo sapiens
  misc_feature (23)..(24): n is a, c, g, or t
  misc_feature (28)..(28): n is a, c, g, or t
  misc_feature (31)..(31): n is a, c, g, or t
aatatacggctaggtacgaggcnnggtngcngtctctcgggtggagtcttctgacagctggtgcgcctgcccgggaacatcctcctggactcaatcatggcttgtggtctggtcgccagcaacctgaatctcaaacctggagagtgccttcgagtgcgaggcgaggtggctcctgacgctaagagtgagttcttccagcaaggtgcgttcatgggatactgagtgacagattagtcagtcagtggggctggagctggccgaggtggcctcatgcccacccgttaccccagcttcgtgctgaacctgggcaaagacagcaacaacctgtgcctgcacttcaaccctcgcttcaacgcccacggcgacgccaacaccatcgtgtgcaacagcaaggacggcggggcctgggggaccgagcagcgggaggctgtctttcccttccagcctggaagtgttgcagaggtgtgcatcaccttcgaccaggccaacctgaccgtcaagctgccagatggatacgaattcaagttccccaaccgcctcaacctggaggccatcaactacatggcagctgacggtgacttcaagatcaaatgtgtggcctttgactgaaatcagccagcccatggcccccaataaaggcagctgcctctgctccctctgaaaaaaaaaaaaaaaaaaaaaaaaaaaaaccggggggaatcaaatgccgggaacgcgggacacaccagagggaaaaacgaaggggccaaagagggcacaaaggcagtgataccccggaacccgacgatttcctgtggacacaggcgggaaaaaccgagcacgggaacacccaaaagaggagaaggcggaaataaatacacaaaacacccacggttaaacacgggaataatgaacaacgggcagaaa

SEQ ID NO: 451620 - DNA, 429 bp, Homo sapiens
gcccgagagagagagagagagagagagagagagagagaggtgtgcatcaccttcgaccaggccaacctgaccgtcaagctgccagatggatacgaattcaagttccccaaccgcctcaacctggaggccatcaactacatggcagctgacggtgacttcaagatcaaatgtgtggcctttgactgaaatcagccagcccatggcccccaataaaggcagctgcctctgctccctctgaaaaaaaaaaaaaaaaaaaaaaaaaaaaaaaaaaaaaaaaaaaaaaccccgggggcctctatttggggggggggggaaaaaggggaaaaaaaggggccaggggaaaaggggtccgaccccattttttgggaaaaggggggaaaagcggggggccacaaaagggggggggaaaataaaaacggggtcctgtac

SEQ ID NO: 451621 - DNA, 637 bp, Homo sapiens
gctgcaggaattcggcacgaggagagagagagagagagagagagagagagagagagagagagagagagagagagagagagagagctagagagagagagctcgtgccgtattcggcacgagttttgtaatcagaatttttagaaagtattttgctgatttaaaggcttaggcatgttcaaacgcctgcaaaactacttatcactcagctttagtttttctaatccaagaaggcagggcagttaacctttttggtgccaatgtgaaatgtaaatgattttatgtttttcctgctttgtggatgaaaaatatttctgagtggtagttttttgacaggtagaccatgtcttatcttgtttcaaaataagtatttctgattttatccttaatccttgctagtttaagcctgcctaagtcactttactaaaagatctttgttaactcagtattttaaacatctgtcagcttatgtaggtaaaagtagaagcatgtttgtacactgcttgtagttatagtgacagctttccatgttgagattctcatatcatcttgtatcttaaagtttcatgtgagtttttccccccctgggttgtttacaatgtttttttggccccgggttggcttttcctcttccttcctt

SEQ ID NO: 451622 - DNA, 2699 bp, Homo sapiens
cgctcatcgagggacgcccggcccaagtggctggggccaagccgcagagcggagttggcatttccagattggggctcgggccgcgcctcctccgggaccctccccttggaccgagccgatcgccgcggggcagttcgggccggctgtcctggcgcgaaaaggtggacaagtcctattttcaagagaagatgacttttaacagttttgaaggatctaaaacttgtgtacctgcagacatcaataaggaagaagaatttgtagaagagtttaatagattaaaaacttttgctaattttccaagtggtagtcctgtttcagcatcaacactggcacgagcagggtttctttatactggtgaaggagataccgtgcggtgctttagttgtcatgcagctgtagatagatggcaatatggagactcagcagttggaagacacaggaaagtatccccaaattgcagatttatcaacggcttttatcttgaaaatagtgccacgcagtctacaaattctggtatccagaatggtcagtacaaagttgaaaactatctgggaagcagagatcattttgccttagacaggccatctgagacacatgcagactatcttttgagaactgggcaggttgtagatatatcagacaccatatacccgaggaaccctgccatgtatagtgaagaagctagattaaagtcctttcagaactggccagactatgctcacctaaccccaagagagttagcaagtgctggactctactacacaggtattggtgaccaagtgcagtgcttttgttgtggtggaaaactgaaaaattgggaaccttgtgatcgtgcctggtcagaacacaggcgacactttcctaattgcttctttgttttgggccggaatcttaatattcgaagtgaatctgatgctgtgagttctgataggaatttcccaaattcaacaaatcttccaagaaatccatccatggcagattatgaagcacggatctttacttttgggacatggatatactcagttaacaaggagcagcttgcaagagctggattttatgctttaggtgaaggtgataaagtaaagtgctttcactgtggaggagggctaactgattggaagcccagtgaagacccttgggaacaacatgctaaatggtatccagggtgcaaatatctgttagaacagaagggacaagaatatataaacaatattcatttaactcattcacttgaggagtgtctggtaagaactactgagaaaacaccatcactaactagaagaattgatgataccatcttccaaaatcctatggtacaagaagctatacgaatggggttcagtttcaaggacattaagaaaataatggaggaaaaaattcagatatctgggagcaactataaatcacttgaggttctggttgcagatctagtgaatgctcagaaagacagtatgcaagatgagtcaagtcagacttcattacagaaagagattagtactgaagagcagctaaggcgcctgcaagaggagaagctttgcaaaatctgtatggatagaaatattgctatcgtttttgttccttgtggacatctagtcacttgtaaacaatgtgctgaagcagttgacaagtgtcccatgtgctacacagtcattactttcaagcaaaaaatttttatgtcttaatctaactctatagtaggcatgttatgttgttcttattaccctgattgaatgtgtgatgtgaactgactttaagtaatcaggattgaattccattagcatttgctaccaagtaggaaaaaaaatgtacatggcagtgttttagttggcaatataatctttgaatttcttgatttttcagggtattagctgtattatccattttttttactgttatttaattgaaaccatagactaagaataagaagcatcatactataactgaacacaatgtgtattcatagtatactgatttaatttctaagtgtaagtgaattaatcatctggattttttattcttttcagataggcttaacaaatggagctttctgtatataaatgtggagattagagttaatctccccaatcacataatttgttttgtgtgaaaaaggaataaattgttccatgctggtggaaagatagagattgtttttagaggttggttgttgtgttttaggattctgtccattttcttttaaagttataaacacgtacttgtgcgaattatgtttttaaagtgatttgccattgttgaaagcgtatttaatgatagaatactatcgagccaacatgtactgacatggaaagatgtcaaagatatgttaagtgtaaaatgcaagtggcaaaacactatgtatagtctgagccagatcaaagtatgtatgtttttaatatgcatagaacaaaagatttggaaagatatacaccaaactgttaaatgtggtttctcttcggggagggggggattgggggaggggccccagaggggttttagaggggccttttcactttcgacttttttcattttgttctgttcgaattttttataagtatgtattacgaccccgaagggttttatgggaactaacatcagtaacctaacccccgtgactatcctgtgctcttcctagggagctgtgttgtttcccacccaccacccttccctctgaacaaatgcctgagtgctggggcactttg

SEQ ID NO: 451623 - DNA, 3762 bp, Homo sapiens
cgctcatcgagggacgcccggcccaagtggctggggccaagccgcagagcggagttggcatttccagattggggctcgggccgcgcctcctccgggaccctccccttggaccgagccgatcgccgcggggcagttcgggccggctgtcctggcgcgaaaaggtggacaagtcctattttcaagagaagatgacttttaacagttttgaaggatctaaaacttgtgtacctgcagacatcaataaggaagaagaatttgtagaagagtttaatagattaaaaacttttgctaattttccaagtggtagtcctgtttcagcatcaacactggcacgagcagggtttctttatactggtgaaggagataccgtgcggtgctttagttgtcatgcagctgtagatagatggcaatatggagactcagcagttggaagacacaggaaagtatccccaaattgcagatttatcaacggcttttatcttgaaaatagtgccacgcagtctacaaattctggtatccagaatggtcagtacaaagttgaaaactatctgggaagcagagatcattttgccttagacaggccatctgagacacatgcagactatcttttgagaactgggcaggttgtagatatatcagacaccatatacccgaggaaccctgccatgtatagtgaagaagctagattaaagtcctttcagaactggccagactatgctcacctaaccccaagagagttagcaagtgctggactctactacacaggtattggtgaccaagtgcagtgcttttgttgtggtggaaaactgaaaaattgggaaccttgtgatcgtgcctggtcagaacacaggcgacactttcctaattgcttctttgttttgggccggaatcttaatattcgaagtgaatctgatgctgtgagttctgataggaatttcccaaattcaacaaatcttccaagaaatccatccatggcagattatgaagcacggatctttacttttgggacatggatatactcagttaacaaggagcagcttgcaagagctggattttatgctttaggtgaaggtgataaagtaaagtgctttcactgtggaggagggctaactgattggaagcccagtgaagacccttgggaacaacatgctaaatggtatccagggtgcaaatatctgttagaacagaagggacaagaatatataaacaatattcatttaactcattcacttgaggagtgtctggtaagaactactgagaaaacaccatcactaactagaagaattgatgataccatcttccaaaatcctatggtacaagaagctatacgaatggggttcagtttcaaggacattaagaaaataatggaggaaaaaattcagatatctgggagcaactataaatcacttgaggttctggttgcagatctagtgaatgctcagaaagacagtatgcaagatgagtcaagtcagacttcattacagaaagagattagtactgaagagcagctaaggcgcctgcaagaggagaagctttgcaaaatctgtatggatagaaatattgctatcgtttttgttccttgtggacatctagtcacttgtaaacaatgtgctgaagcagttgacaagtgtcccatgtgctacacagtcattactttcaagcaaaaaatttttatgtcttaatctaactctatagtaggcatgttatgttgttcttattaccctgattgaatgtgtgatgtgaactgactttaagtaatcaggattgaattccattagcatttgctaccaagtaggaaaaaaaatgtacatggcagtgttttagttggcaatataatctttgaatttcttgatttttcagggtattagctgtattatccattttttttactgttatttaattgaaaccatagactaagaataagaagcatcatactataactgaacacaatgtgtattcatagtatactgatttaatttctaagtgtaagtgaattaatcatctggattttttattcttttcagataggcttaacaaatggagctttctgtatataaatgtggagattagagttaatctccccaatcacataatttgttttgtgtgaaaaaggaataaattgttccatgctggtggaaagatagagattgtttttagaggttggttgttgtgttttaggattctgtccattttcttttaaagttataaacacgtacttgtgcgaattatgtttttaaagtgatttgccattgttgaaagcgtatttaatgatagaatactatcgagccaacatgtactgacatggaaagatgtcaaagatatgttaagtgtaaaatgcaagtggcaaaacactatgtatagtctgagccagatcaaagtatgtatgtttttaatatgcatagaacaaaagatttggaaagatatacaccaaactgttaaatgtggtttctcttcggggagggggggattgggggaggggccccagaggggttttagaggggccttttcactttcgacttttttcattttgttctgttcgaattttttataagtatgtattacttttgtaatcagaatttttagaaagtattttgctgatttaaaggcttaggcatgttcaaacgcctgcaaaactacttatcactcagctttagtttttctaatccaagaaggcagggcagttaacctttttggtgccaatgtgaaatgtaaatgattttatgtttttcctgctttgtggatgaaaaatatttctgagtggtagttttttgacaggtagaccatgtcttatcttgtttcaaaataagtatttctgattttgtaaaatgaaatataaaatatgtctcagatcttccaattaattagtaaggattcatccttaatccttgctagtttaagcctgcctaagtcactttactaaaagatctttgttaactcagtattttaaacatctgtcagcttatgtaggtaaaagtagaagcatgtttgtacactgcttgtagttatagtgacagctttccatgttgagattctcatatcatcttgtatcttaaagtttcatgtgagtttttaccgttaggatgattaagatgtatataggacaaaatgttaagtctttcctctacctacatttgttttcttggctagtaatagtagtagatacttctgaaataaatgttctctcaagatccttaaaacctcttggaaattataaaaatattggcaagaaaagaagaatagttgtttaaatattttttaaaaaacacttgaataagaatcagtagggtataaactagaagtttaaaaatgcttcatagaacgtccagggtttacattacaagattctcacaacaaacctattgtagaggtgagtaaggcatgttactacagaggaaagtttgagagtaaaactgtaaaaaattatatttttgttgtactttctaagagaaagagtattgttatgttctcctaacttctgttgattactactttaagtgatattcatttaaaacattgcaaatttattttatttatttaattttctttttgagatggagtcttgcttgtcacccaggctggagtgcagtggagtgatctctgctcactgcaacctccgccttctgggttcaagcgattctcgtgcctcagcttcctgagtagctggaattacaggcaggtgccaccatgcccgactaatttttttttatttttagtagagacggggtttcaccatgttggccaggctggtatcaaactcctgac

SEQ ID NO: 451624 - DNA, 2720 bp, Homo sapiens
cgctcatcgagggacgcccggcccaagtggctggggccaagccgcagagcggagttggcatttccagattggggctcgggccgcgcctcctccgggaccctccccttggaccgagccgatcgccgcggggcagttcgggccggctgtcctggcgcggtgaaggtgataaagtaaagtgctttcactgtggaggagggctaactgattggaagcccagtgaagacccttgggaacaacatgctaaatggtatccagggtaagaactactgagaaaacaccatcactaactagaagaattgatgataccatcttccaaaatcctatggtacaagaagctatacgaatggggttcagtttcaaggacattaagaaaataatggaggaaaaaattcagatatctgggagcaactataaatcacttgaggttctggttgcagatctagtgaatgctcagaaagacagtatgcaagatgagtcaagtcagacttcattacagaaagagattagtactgaagagcagctaaggcgcctgcaagaggagaagctttgcaaaatctgtatggatagaaatattgctatcgtttttgttccttgtggacatctagtcacttgtaaacaatgtgctgaagcagttgacaagtgtcccatgtgctacacagtcattactttcaagcaataccctgattgaatgtgtgatgtgaactgactttaagtaatcaggattgaattccattagcatttgctaccaagtaggaaaaaaaatgtacatggcagtgttttagttggcaatataatctttgaatttcttgatttttcagggtattagctgtattatccattttttttactgttatttaattgaaaccatagactaagaataagaagcatcatactataactgaacacaatgtgtattcatagtatactgatttaatttctaagtgtaagtgaattaatcatctggattttttattcttttcagataggcttaacaaatggagctttctgtatataaatgtggagattagagttaatctccccaatcacataatttgttttgtgtgaaaaaggaataaattgttccatgctggtggaaagatagagattgtttttagaggttggttgttgtgttttaggattctgtccattttcttttaaagttataaacacgtacttgtgcgaattatgtttttaaagtgatttgccattgttgaaagcgtatttaatgatagaatactatcgagccaacatgtactgacatggaaagatgtcaaagatatgttaagtgtaaaatgcaagtggcaaaacactatgtatagtctgagccagatcaaagtatgtatgtttttaatatgcatagaacaaaagatttggaaagatatacaccaaactgttaaatgtggtttctcttcggggagggggggattgggggaggggccccagaggggttttagaggggccttttcactttcgacttttttcattttgttctgttcgaattttttataagtatgtattacttttgtaatcagaatttttagaaagtattttgctgatttaaaggcttaggcatgttcaaacgcctgcaaaactacttatcactcagctttagtttttctaatccaagaaggcagggcagttaacctttttggtgccaatgtgaaatgtaaatgattttatgtttttcctgctttgtggatgaaaaatatttctgagtggtagttttttgacaggtagaccatgtcttatcttgtttcaaaataagtatttctgattttgtaaaatgaaatataaaatatgtctcagatcttccaattaattagtaaggattcatccttaatccttgctagtttaagcctgcctaagtcactttactaaaagatctttgttaactcagtattttaaacatctgtcagcttatgtaggtaaaagtagaagcatgtttgtacactgcttgtagttatagtgacagctttccatgttgagattctcatatcatcttgtatcttaaagtttcatgtgagtttttaccgttaggatgattaagatgtatataggacaaaatgttaagtctttcctctacctacatttgttttcttggctagtaatagtagtagatacttctgaaataaatgttctctcaagatccttaaaacctcttggaaattataaaaatattggcaagaaaagaagaatagttgtttaaatattttttaaaaaacacttgaataagaatcagtagggtataaactagaagtttaaaaatgcttcatagaacgtccagggtttacattacaagattctcacaacaaacctattgtagaggtgagtaaggcatgttactacagaggaaagtttgagagtaaaactgtaaaaaattatatttttgttgtactttctaagagaaagagtattgttatgttctcctaacttctgttgattactactttaagtgatattcatttaaaacattgcaaatttattttatttatttaattttctttttgagatggagtcttgcttgtcacccaggctggagtgcagtggagtgatctctgctcactgcaacctccgccttctgggttcaagcgattctcgtgcctcagcttcctgagtagctggaattacaggcaggtgccaccatgcccgactaatttttttttatttttagtagagacggggtttcaccatgttggccaggctggtatcaaactcctgac

SEQ ID NO: 451625 - DNA, 2853 bp, Homo sapiens
cgctcatcgagggacgcccggcccaagtggctggggccaagccgcagagcggagttggcatttccagattggggctcgggccgcgcctcctccgggaccctccccttggaccgagccgatcgccgcggggcagttcgggccggctgtcctggcgcggtgaaggtgataaagtaaagtgctttcactgtggaggagggctaactgattggaagcccagtgaagacccttgggaacaacatgctaaatggtatccagggtgcaaatatctgttagaacagaagggacaagaatatataaacaatattcatttaactcattcacttgaggagtgtctggtaagaactactgagaaaacaccatcactaactagaagaattgatgataccatcttccaaaatcctatggtacaagaagctatacgaatggggttcagtttcaaggacattaagaaaataatggaggaaaaaattcagatatctgggagcaactataaatcacttgaggttctggttgcagatctagtgaatgctcagaaagacagtatgcaagatgagtcaagtcagacttcattacagaaagagattagtactgaagagcagctaaggcgcctgcaagaggagaagctttgcaaaatctgtatggatagaaatattgctatcgtttttgttccttgtggacatctagtcacttgtaaacaatgtgctgaagcagttgacaagtgtcccatgtgctacacagtcattactttcaagcaaaaaatttttatgtcttaatctaactctatagtaggcatgttatgttgttcttattaccctgattgaatgtgtgatgtgaactgactttaagtaatcaggattgaattccattagcatttgctaccaagtaggaaaaaaaatgtacatggcagtgttttagttggcaatataatctttgaatttcttgatttttcagggtattagctgtattatccattttttttactgttatttaattgaaaccatagactaagaataagaagcatcatactataactgaacacaatgtgtattcatagtatactgatttaatttctaagtgtaagtgaattaatcatctggattttttattcttttcagataggcttaacaaatggagctttctgtatataaatgtggagattagagttaatctccccaatcacataatttgttttgtgtgaaaaaggaataaattgttccatgctggtggaaagatagagattgtttttagaggttggttgttgtgttttaggattctgtccattttcttttaaagttataaacacgtacttgtgcgaattatgtttttaaagtgatttgccattgttgaaagcgtatttaatgatagaatactatcgagccaacatgtactgacatggaaagatgtcaaagatatgttaagtgtaaaatgcaagtggcaaaacactatgtatagtctgagccagatcaaagtatgtatgtttttaatatgcatagaacaaaagatttggaaagatatacaccaaactgttaaatgtggtttctcttcggggagggggggattgggggaggggccccagaggggttttagaggggccttttcactttcgacttttttcattttgttctgttcgaattttttataagtatgtattacttttgtaatcagaatttttagaaagtattttgctgatttaaaggcttaggcatgttcaaacgcctgcaaaactacttatcactcagctttagtttttctaatccaagaaggcagggcagttaacctttttggtgccaatgtgaaatgtaaatgattttatgtttttcctgctttgtggatgaaaaatatttctgagtggtagttttttgacaggtagaccatgtcttatcttgtttcaaaataagtatttctgattttgtaaaatgaaatataaaatatgtctcagatcttccaattaattagtaaggattcatccttaatccttgctagtttaagcctgcctaagtcactttactaaaagatctttgttaactcagtattttaaacatctgtcagcttatgtaggtaaaagtagaagcatgtttgtacactgcttgtagttatagtgacagctttccatgttgagattctcatatcatcttgtatcttaaagtttcatgtgagtttttaccgttaggatgattaagatgtatataggacaaaatgttaagtctttcctctacctacatttgttttcttggctagtaatagtagtagatacttctgaaataaatgttctctcaagatccttaaaacctcttggaaattataaaaatattggcaagaaaagaagaatagttgtttaaatattttttaaaaaacacttgaataagaatcagtagggtataaactagaagtttaaaaatgcttcatagaacgtccagggtttacattacaagattctcacaacaaacctattgtagaggtgagtaaggcatgttactacagaggaaagtttgagagtaaaactgtaaaaaattatatttttgttgtactttctaagagaaagagtattgttatgttctcctaacttctgttgattactactttaagtgatattcatttaaaacattgcaaatttattttatttatttaattttctttttgagatggagtcttgcttgtcacccaggctggagtgcagtggagtgatctctgctcactgcaacctccgccttctgggttcaagcgattctcgtgcctcagcttcctgagtagctggaattacaggcaggtgccaccatgcccgactaatttttttttatttttagtagagacggggtttcaccatgttggccaggctggtatcaaactcctgac

SEQ ID NO: 451626 - DNA, 3676 bp, Homo sapiens
tgctaatagctttgatgatcgtttcttggtgactgctggagcagatggcaatatctttgttttcaacattttttctgaatttatgctaaggaaagacatgaaggccaaagttccatctcccaggtttggaattgaaacagagccaattccagaagacattgaagatcccaaagcctacagtatcgagaatgctaggagaaaaagagaacatgacaagttaatgaaagaagtgggagaaataaaggcacggaagagagagcaaatcaaagctttgaggagtgaattttgtaatctattagaaatgaatgaaaaattaccaaagcatatgcagtttaaacgaacagattttgatgtagattcccaaatccgtgctgagatgcacagaaaaacagctttcaaaattcaacaagtggaaaaggaattagcttgggaaaaagagaaacatgaactcggcctaatgaagctaaagaatcgatttcgagatccactggaaagtgatactattgtggttcatgccatactgagtgaccacaagatatcctcttacaggctggtgcagccctctaagtactccaaattcaaacgagctagtcaatcagagagaaaaccaagcaaattggacaggtttgaaaaagagggacctggaagaaaggacagccagagagatgcaggtgggagtgttaccatacaagaagaatcaataatagaaaaagggaagaaatttcggcctaaaaccctaagtgaaatcatcgtggaaaatcaaattgagaaaacgagaaaacttatattaaaagctgaaagggcacaactaaagattcaacagcgaaaaaaagaatgggaggaactatacaagagtaaacctggtgatgactatgaagatcccaaagatcttcaagccatcaaagaagcccaggtgtatatgggagatttcaatctgaagacagccccagactacaagatacctgagcacatgagaataaatgctgccaagaaggaagaggaactaggacacctagattctttggtccatggaaataaaaggcacatgaacaagtgcattctctctcttagagaccttaaagtggctgttgttgaggaaatacagtgcctggtacaagaactgaagaacattcagtcgactcttcacatatccaagcacatacccattcccaaaattcctcagatacacccagaagaagttccagaaaagagatttcagtatgatgaagaaactctcctaaattttaagcaacagcaaatgaaaagtaaagatgaaaagtcccccggagtggaacagacagggtctggaggcccagttggaggattcctcaaactctcttctagaaaggatggggatttgacaacccgtgattcaatatctagatcatcaaaggcatcaacattcagcctagatataccaaagtgtttggaatttgaaaaagcagagccaacggatgtggagctggaaattatgaagagagacgagattaaacacgtgtacatgcaacagtatttggtcaacaggatcaaagaactggttgtcactttcgatgcagaactccgtctccttagacatcagaaactaaaactagatactcagatgaaattatctgacctgcaccatgtcaccttatttcaagaaatacttctcctgaagaattttgaaaaacaggagaacatacttcaagaacgtgttaattccttagacaaagaggaacagtacatgcaatggaaaataaatgaaactcttaaagagatggaagagaaaaagaatgaaatcaccaaactccaggagcaagaaaaggcactctatgctggttttcaagcagccattggagaaaacaataaatttgcaaacttcctcatgaaggtcctaaagaagaggattaaacgggtaaagaaaaaagaagttgaaggagatgctgatgaagatgaggagagtgaggaatcaagtgaagaagaatctagcttggagagtgatgaagatgagtctgaatcagaagatgaggtttttgatgattctatttgcccaacaaattgtgatgtggctctttttgagctggcccttcaccttcgagagaaaaggctggacattgaggaggctttagttgaagaaaagaaaattgttgataacctcaaaaaggaatatgatacattgtcaaaaaaagtgaaaattgtggcaactaatctgaatgcagcagaggaggccctggaggcttatcagcgagagaagcagcagcggctgaatgaactgctagttgtgattccgctcaagctccaccagatagagtatgtggtatttggagaaatacctagcgatctttctggtactttggtcttctctaaccatgccttgagacggctgcaagaacgaatccgtgagctccaggaggaaaattccaagcagcaaaaacttaacaaagaatggagagagagacgtaaacagctcatccgagaaaagagagaaatgacaaaaaccatacacaaaatggaggaaacagtccggcagctcatgatcagcaagtttggccgtgtggtaaatctagaagcccttcaaacgctttctgttaatacaacacttgaagaactgaagatcagaaaacttcgaaaggagctagcaaatgcgaaagagatgaagatgtgggaggaaaagattgctcaaatgcgatgggaactgatgatgaagacaaaagaacacaccagaaagctttatcagatgaatgatttgtgtattgaaaagaagaaacttgattctcggttgaatacactacagaatcagcagggcaatgccttccagggccctcgggaagcagatgttgtggcaagagaggaggtcactgaattgatccaactccaggcggaaaggatttcggccttaaaggaggagattgctcttttgcgtaggaaaggcggtcttatcctcccacccattcagtctccacgagagaaagagatacagcccgcagacctttgagtttgctattttctcaaacccatacaagatttctgacataactcactggaagttctgtctcctcatcacctccaacaatcttattactttaaactgaactcgcctgaaagtgtaaaaccagatccagtcacgttaagtcactttaagaatctctctacaatttggttatcttagaactgactgcagcacccaacctctgttatgaaactgaatcattttagatgtttcgaacctactagattgaatatgaagtctcggaaggctgtgtttcatgattgcagcaaatcacctgtaatatattttgttttaggaaaatttgatttgggggtatcctgaatttttagcccttggcaagaaaaactatcattcagcaattcatgagaaaactttgttttcttgatccttagaaaataaacttagatgttattaagtgttctctgagaggatgcaggagaaaaggacattttgtcagctatatcttagaatagaaatgcaaatttcagttttggcattgttgacttcataaagcagtgttttgagggctcaggattcaggaaatacaaacagacatggcagagcagtttgctttgggttggcagaaagcaggaaaataaccagccttcttggattgcccacagtttttgtagactcctcagttctgagtggagcagaggggcatgcttaataaaacagtcaataaag

SEQ ID NO: 451627 - DNA, 4509 bp, Homo sapiens
tgctaatagctttgatgatcgtttcttggtgactgctggagcagatggcaatatctttgttttcaacattttttctgaatttatgctaaggaaagacatgaaggccaaagttccatctcccaggtttggaattgaaacagagccaattccagaagacattgaagatcccaaagcctacagtatcgagaatgctaggagaaaaagagaacatgacaagttaatgaaagaagtgggagaaataaaggcacggaagagagagcaaatcaaagctttgaggagtgaattttgtaatctattagaaatgaatgaaaaattaccaaagcatatgcagtttaaacgaacagattttgatgtagattcccaaatccgtgctgagatgcacagaaaaacagctttcaaaattcaacaagtggaaaaggaattagcttgggaaaaagagaaacatgaactcggcctaatgaagctaaagaatcgatttcgagatccactggaaagtgatactattgtggttcatgccatactgagtgaccacaagatatcctcttacaggctggtgcagccctctaagtactccaaattcaaacgagctagtcaatcagagagaaaaccaagcaaattggacaggtttgaaaaagagggacctggaagaaaggacagccagagagatgcaggtgggagtgttaccatacaagaagaatcaataatagaaaaagggaagaaatttcggcctaaaaccctaagtgaaatcatcgtggaaaatcaaattgagaaaacgagaaaacttatattaaaagctgaaagggcacaactaaagattcaacagcgaaaaaaagaatgggaggaactatacaagagtaaacctggtgatgactatgaagatcccaaagatcttcaagccatcaaagaagcccaggtgtatatgggagatttcaatctgaagacagccccagactacaagatacctgagcacatgagaataaatgctgccaagaaggaagaggaactaggacacctagattctttggtccatggaaataaaaggcacatgaacaagtgcattctctctcttagagaccttaaagtggctgttgttgaggaaatacagtgcctggtacaagaactgaagaacattcagtcgactcttcacatatccaagcacatacccattcccaaaattcctcagatacacccagaagaagttccagaaaagagatttcagtatgatgaagaaactctcctaaattttaagcaacagcaaatgaaaagtaaagatgaaaagtcccccggagtggaacagacagggtctggaggcccagttggaggattcctcaaactctcttctagaaaggatggggatttgacaacccgtgattcaatatctagatcatcaaaggcatcaacattcagcctagatataccaaagtgtttggaatttgaaaaagcagagccaacggatgtggagctggaaattatgaagagagacgagattaaacacgtgtacatgcaacagtatttggtcaacaggatcaaagaactggttgtcactttcgatgcagaactccgtctccttagacatcagaaactaaaactagatactcagatgaaattatctgacctgcaccatgtcaccttatttcaagaaatacttctcctgaagaattttgaaaaacaggagaacatacttcaagaacgtgttaattccttagacaaagaggaacagtacatgcaatggaaaataaatgaaactcttaaagagatggaagagaaaaagaatgaaatcaccaaactccaggagcaagaaaaggcactctatgctggttttcaagcagccattggagaaaacaataaatttgcaaacttcctcatgaaggtcctaaagaagaggattaaacgggtaaagaaaaaagaagttgaaggagatgctgatgaagatgaggagagtgaggaatcaagtgaagaagaatctagcttggagagtgatgaagatgagtctgaatcagaagatgaggtttttgatgattctatttgcccaacaaattgtgatgtggctctttttgagctggcccttcaccttcgagagaaaaggctggacattgaggaggctttagttgaagaaaagaaaattgttgataacctcaaaaaggaatatgatacattgtcaaaaaaagtgaaaattgtggcaactaatctgaatgcagcagaggaggccctggaggcttatcagcgagagaagcagcagcggctgaatgaactgctagttgtgattccgctcaagctccaccagatagagtatgtggtatttggagaaatacctagcgatctttctggtactttggtcttctctaaccatgccttgagacggctgcaagaacgaatccgtgagctccaggaggaaaattccaagcagcaaaaacttaacaaagaatggagagagagacgtaaacagctcatccgagaaaagagagaaatgacaaaaaccatacacaaaatggaggaaacagtccggcagctcatgatcagcaagtttggccgtgtggtaaatctagaagcccttcaaacgctttctgttaatacaacacttgaagaactgaagatcagaaaacttcgaaaggagctagcaaatgcgaaagagatgaagatgtgggaggaaaagattgctcaaatgcgatgggaactgatgatgaagacaaaagaacacaccagaaagctttatcagatgaatgatttgtgtattgaaaagaagaaacttgattctcggttgaatacactacagaatcagcagaaccctggaaatggtctaagctaagtgttccaacagtttggtcctctgaagaagagcatcagcatcacctgggaacttgtttaaaatggcaatgccttccagggccctcgggaagcagatgttgtggcaagagaggaggtcactgaattgatccaactccaggcggaaaggatttcggccttaaaggaggagattgctcttttgcgtaggaaaggcggtcttatcctcccacccattcagtctccacgagagaaagagatacagcccgcagacctttgagtttgctattttctcaaacccatacaagatttctgacataactcactggaagttctgtctcctcatcacctccaacaatcttattactttaaactgaactcgcctgaaagtgtaaaaccagatccagtcacgttaagtcactttaagaatctctctacaatttggttatcttagaactgactgcagcacccaacctctgttatgaaactgaatcattttagatgtttcgaacctactagattgaatatgaagtctcggaaggctgtgtttcatgattgcagcaaatcacctgtaatatattttgttttaggaaaatttgatttgggggtatcctgaatttttagcccttggcaagaaaaactatcattcagcaattcatgagaaaactttgttttcttgatccttagaaaataaacttagatgttattaagtgttctctgagaggatgcaggagaaaaggacattttgtcagctatatcttagaatagaaatgcaaatttcagttttggcattgttgacttcataaagcagtgttttgagggctcaggattcaggaaatacaaacagacatggcagagcagtttgctttgggttggcagaaagcaggaaaataaccagccttcttggattgcccacagtttttgtagactcctcagttctgagtggagcagaggggcatgcttaataaaacagtcaataaagaggcttttctttaaagatttctgcaactccgtcagaattctaagttttccccatagtttctcatgttccctgccattttctttcaggttttacttgggccatttgctggttttgatatagatgaggagataatgaaatagatttactagagatcatctttaacaatcacctttgattatgcataacattttaaactaattgaagagtatccttttggtttgggggtaagtgctcattgaagttcatggctataaccattgcaggataatctcactgacatttggaatcctgttagtaacagagcatagctctttagattaagagctctgtattaacgagctactcattgaggctgttccaggataagctggtcactgagaagggcgggtgaagaaaggaacattgcataaatgtagaagggaactcagcaatgccaagtcttcctcacctgtgattagcctgctaatgtgccccccaaaattacagacaggtcttgctttctttgtacatcacaatattcttagaggtggccacttggcctattgtcttcctaagattccttcatattcctatttaagaggtcagaataccttattgtttgcacttgtcaccattaatttctgatgtagtcacttctctactggagagcacccacttttttttttaaatcactttctgtgttgtatatcctaagccatgtgtgcctttcaagtatttttaaaaatatgctagtcataaacctgagt

SEQ ID NO: 451628 - DNA, 143 bp, Homo sapiens
tgaagatgaggagagtgaggaatcaagtgaagaagaatctagcttggagagtgatgaagatgagtctgaatcagaagatgaggtttttgatgattctatttgcccaacaagtaagttagataaaaccacgtgttctctgtgaa

SEQ ID NO: 451629 - DNA, 1849 bp, Homo sapiens
ttgcacttgaagagttgtttattagcccaaaggcacacatttctaatggtgggattttagcagaggaattgaaggctcccgagattaaggaacagtggctgtttagggtgactgtcaggccagcactcatcacagatacacagtataagggcatggagtttttcacatgccaaatgatgcttcaacagggagctgttttctttcaacagggcaatgccttccagggccctcgggaagcagatgttgtggcaagagaggaggtcactgaattgatccaactccaggcggaaaggatttcggccttaaaggaggagattgctcttttgcgtaggaaaggcggtcttatcctcccacccattcagtctccacgagagaaagagatacagcccgcagacctttgagtttgctattttctcaaacccatacaagatttctgacataactcactggaagttctgtctcctcatcacctccaacaatcttattactttaaactgaactcgcctgaaagtgtaaaaccagatccagtcacgttaagtcactttaagaatctctctacaatttggttatcttagaactgactgcagcacccaacctctgttatgaaactgaatcattttagatgtttcgaacctactagattgaatatgaagtctcggaaggctgtgtttcatgattgcagcaaatcacctgtaatatattttgttttaggaaaatttgatttgggggtatcctgaatttttagcccttggcaagaaaaactatcattcagcaattcatgagaaaactttgttttcttgatccttagaaaataaacttagatgttattaagtgttctctgagaggatgcaggagaaaaggacattttgtcagctatatcttagaatagaaatgcaaatttcagttttggcattgttgacttcataaagcagtgttttgagggctcaggattcaggaaatacaaacagacatggcagagcagtttgctttgggttggcagaaagcaggaaaataaccagccttcttggattgcccacagtttttgtagactcctcagttctgagtggagcagaggggcatgcttaataaaacagtcaataaagaggcttttctttaaagatttctgcaactccgtcagaattctaagttttccccatagtttctcatgttccctgccattttctttcaggttttacttgggccatttgctggttttgatatagatgaggagataatgaaatagatttactagagatcatctttaacaatcacctttgattatgcataacattttaaactaattgaagagtatccttttggtttgggggtaagtgctcattgaagttcatggctataaccattgcaggataatctcactgacatttggaatcctgttagtaacagagcatagctctttagattaagagctctgtattaacgagctactcattgaggctgttccaggataagctggtcactgagaagggcgggtgaagaaaggaacattgcataaatgtagaagggaactcagcaatgccaagtcttcctcacctgtgattagcctgctaatgtgccccccaaaattacagacaggtcttgctttctttgtacatcacaatattcttagaggtggccacttggcctattgtcttcctaagattccttcatattcctatttaagaggtcagaataccttattgtttgcacttgtcaccattaatttctgatgtagtcacttctctactggagagcacccacttttttttttaaatcactttctgtgttgtatatcctaagccatgtgtgcctttcaagtatttttaaaaatatgctagtcataaacctgagt

SEQ ID NO: 451630 - DNA, 1014 bp, Homo sapiens
aaagtgtcagctttcaggatgttatgtgtatggctcaataaaattacgtacaaagtgacagcgtactctcttttcatgggctgaccttgtcgtcaccatcacctgaaaatggctccaaacaaaaatgacctaagggttgaaacaagataagatcaaattgacgtcatggtaaaaattgacgtcatggtaattacaccaagtacccttcaatcattggatggaatttcctgttgatcccagggcttagatgcaggtggaaacactctgctggtataaaagcaggtgaggacttcattaactgcagttacttactgagaactcataagacgaagctaaaatccctcttcggatccacagtcaaccgccctgaacacatcctgcaaaaagcccagagaaaggagcgccatggattactacagaaaatatgcagctatctttctggtcacattgtcggtgtttctgcatgttctccattccgctcctgatgtgcaggattgcccagaatgcacgctacaggaaaacccattcttctcccagccgggtgccccaatacttcagtgcatgggctgctgcttctctagagcatatcccactccactaaggtccaagaagacgatgttggtccaaaagaacgtcacctcagagtccacttgctgtgtagctaaatcatataacagggtcacagtaatggggggtttcaaagtggagaaccacacggcgtgccactgcagtacttgttattatcacaaatcttaaatgttttaccaagtgctgtcttgatgactgctgattttctggaatggaaaattaagttgtttagtgtttatggctttgtgagataaaactctccttttccttaccataccactttgacacgcttcaaggatatactgcagctttactgccttcctccttatcctacagtacaatcagcagtctagttcttttcatttggaatgaatacagcatttagcttgttccactgcaaataaagccttttaaatcatcattcaa

SEQ ID NO: 451631 - DNA, 1132 bp, Homo sapiens
aaagtgtcagctttcaggatgttatgtgtatggctcaataaaattacgtacaaagtgacagcgtactctcttttcatgggctgaccttgtcgtcaccatcacctgaaaatggctccaaacaaaaatgacctaagggttgaaacaagataagatcaaattgacgtcatggtaaaaattgacgtcatggtaattacaccaagtacccttcaatcattggatggaatttcctgttgatcccagggcttagatgcaggtggaaacactctgctggtataaaagcaggtgaggacttcattaactgcagttacttactgagaactcataagacgaagctaaaatccctcttcggatccacagtcaaccgccctgaacacatcctgcaaaaagcccagagaaaggagcgccatggattactacagaaaatatgcagctatctttctggtcacattgtcggtgtttctgcatgttctccattccgctcctgatgtgcaggattgcccagaatgcacgctacaggaaaacccattcttctcccagccgggtgccccaatacttcagtgcatgggctgctgcttctctagagcatatcccactccactaaggtccaagaagacgatgttggtccaaaagaacgtcacctcagagtccacttgctgtgtagctaaatcatataacagggtcacagtaatggggggtttcaaagtggagaaccacacggcgtgccactgcagtacttgttattatcacaaatcttaaatgttttaccaagtgctgtcttgatgactgctgattttctggaatggaaaattaagttgtttagtgtttatggctttgtgagataaaactctccttttccttaccataccactttgacacgcttcaaggatatactgcagctttactgccttcctccttatcctacagtacaatcagcagtctagttcttttcatttggaatgaatacagcatttagcttgttccactgcaaataaagccttttaaatcatcattcaacaacacaaacaacaaacacacaaaaaaacttggtgggggggcccgggccccgaaaaggtttttaaaccaatcgtgggcgcgcggaggccccagagggcaacgcgacgccggcccctca

SEQ ID NO: 451632 - DNA, 155 bp, Homo sapiens
  misc_feature (27)..(27): n is a, c, g, or t
actcctcctcttcctcaagctccctgnaaggggtctcctccatctcctgctctggtgtcctacagtacaatcagcagtctagttcttttcatttggaatgaatacagcatttagcttgttccactgcaaataaagccttttaaatcatcattcaa

SEQ ID NO: 451633 - DNA, 1160 bp, Homo sapiens
  misc_feature (1085)..(1085): n is a, c, g, or t
  misc_feature (1126)..(1126): n is a, c, g, or t
  misc_feature (1138)..(1138): n is a, c, g, or t
aaagtgtcagctttcaggatgttatgtgtatggctcaataaaattacgtacaaagtgacagcgtactctcttttcatgggctgaccttgtcgtcaccatcacctgaaaatggctccaaacaaaaatgacctaagggttgaaacaagataagatcaaattgacgtcatggtaaaaattgacgtcatggtaattacaccaagtacccttcaatcattggatggaatttcctgttgatcccagggcttagatgcaggtggaaacactctgctggtataaaagcaggtgaggacttcattaactgcagttacttactgagaactcataagacgaagctaaaatccctcttcggatccacagtcaaccgccctgaacacatcctgcaaaaagcccagagaaaggagcgccatggattactacagaaaatatgcagctatctttctggtcacattgtcggtgtttctgcatgttctccattccgctcctgatgtgcaggattgcccagaatgcacgctacaggaaaacccattcttctcccagccgggtgccccaatacttcagtgcatgggctgctgcttctctagagcatatcccactccactaaggtccaagaagacgatgttggtccaaaagaacgtcacctcagagtccacttgctgtgtagctaaatcatataacagggtcacagtaatggggggtttcaaagtggagaaccacacggcgtgccactgcagtacttgttattatcacaaatcttaaatgttttaccaagtgctgtcttgatgactgctgattttctggaatggaaaattaagttgtttagtgtttatggctttgtgagataaaactctccttttccttaccataccactttgacacgcttcaaggatatactgcagctttactgccttcctccttatcctacagtacaatcagcagtctagttcttttcatttggaatgaatacagcatttagcttgttccactgcaaataaagccttttaaatcatcattcaataccaaaaaaaaaaaaaaaaaaaaattgggggggggccgaaaatttaaacacttggggggggccaagagangaaaggcaaggcacagaacgggaagagggggtcccaaaacngggggggggaanaaggggggggggacaggaggat

SEQ ID NO: 451634 - DNA, 1108 bp, Homo sapiens
  misc_feature (1042)..(1042): n is a, c, g, or t
  misc_feature (1058)..(1058): n is a, c, g, or t
  misc_feature (1061)..(1061): n is a, c, g, or t
  misc_feature (1064)..(1064): n is a, c, g, or t
  misc_feature (1068)..(1068): n is a, c, g, or t
aaagtgtcagctttcaggatgttatgtgtatggctcaataaaattacgtacaaagtgacagcgtactctcttttcatgggctgaccttgtcgtcaccatcacctgaaaatggctccaaacaaaaatgacctaagggttgaaacaagataagatcaaattgacgtcatggtaaaaattgacgtcatggtaattacaccaagtacccttcaatcattggatggaatttcctgttgatcccagggcttagatgcaggtggaaacactctgctggtataaaagcaggtgaggacttcattaactgcagttacttactgagaactcataagacgaagctaaaatccctcttcggatccacagtcaaccgccctgaacacatcctgcaaaaagcccagagaaaggagcgccatggattactacagaaaatatgcagctatctttctggtcacattgtcggtgtttctgcatgttctccattccgctcctgatgtgcaggattgcccagaatgcacgctacaggaaaacccattcttctcccagccgggtgccccaatacttcagtgcatgggctgctgcttctctagagcatatcccactccactaaggtccaagaagacgatgttggtccaaaagaacgtcacctcagagtccacttgctgtgtagctaaatcatataacagggtcacagtaatggggggtttcaaagtggagaaccacacggcgtgccactgcagtacttgttattatcacaaatcttaaatgttttaccaagtgctgtcttgatgactgctgattttctggaatggaaaattaagttgtttagtgtttatggctttgtgagataaaactctccttttccttaccataccactttgacacgcttcaaggatatactgcagctttactgccttcctccttatcctacagtacaatcagcagtctagttcttttcatttggaatgaatacagcatttagcttgttccactgcaaataaagccttttaaatcatcattcaataccaaaaaaaaaaaaacaacaaaaaanacatttgtggggcccncgngcncccnaaaaaattcctcaaaaccccgctgggggcgcgcggggcca

SEQ ID NO: 451635 - DNA, 1111 bp, Homo sapiens
  misc_feature (1022)..(1022): n is a, c, g, or t
aaagtgtcagctttcaggatgttatgtgtatggctcaataaaattacgtacaaagtgacagcgtactctcttttcatgggctgaccttgtcgtcaccatcacctgaaaatggctccaaacaaaaatgacctaagggttgaaacaagataagatcaaattgacgtcatggtaaaaattgacgtcatggtaattacaccaagtacccttcaatcattggatggaatttcctgttgatcccagggcttagatgcaggtggaaacactctgctggtataaaagcaggtgaggacttcattaactgcagttacttactgagaactcataagacgaagctaaaatccctcttcggatccacagtcaaccgccctgaacacatcctgcaaaaagcccagagaaaggagcgccatggattactacagaaaatatgcagctatctttctggtcacattgtcggtgtttctgcatgttctccattccgctcctgatgtgcaggattgcccagaatgcacgctacaggaaaacccattcttctcccagccgggtgccccaatacttcagtgcatgggctgctgcttctctagagcatatcccactccactaaggtccaagaagacgatgttggtccaaaagaacgtcacctcagagtccacttgctgtgtagctaaatcatataacagggtcacagtaatggggggtttcaaagtggagaaccacacggcgtgccactgcagtacttgttattatcacaaatcttaaatgttttaccaagtgctgtcttgatgactgctgattttctggaatggaaaattaagttgtttagtgtttatggctttgtgagataaaactctccttttccttaccataccactttgacacgcttcaaggatatactgcagctttactgccttcctccttatcctacagtacaatcagcagtctagttcttttcatttggaatgaatacagcatttagcttgttccactgcaaataaagccttttaaatcatcattcaaccaaaaanaaccaacgctggaaacaaacgtgcgcgggccgcctgtccccagagagagtttggaacacttggtgggcgcgcgggccactgtaatgtaa

SEQ ID NO: 451636 - DNA, 1163 bp, Homo sapiens
aaagtgtcagctttcaggatgttatgtgtatggctcaataaaattacgtacaaagtgacagcgtactctcttttcatgggctgaccttgtcgtcaccatcacctgaaaatggctccaaacaaaaatgacctaagggttgaaacaagataagatcaaattgacgtcatggtaaaaattgacgtcatggtaattacaccaagtacccttcaatcattggatggaatttcctgttgatcccagggcttagatgcaggtggaaacactctgctggtataaaagcaggtgaggacttcattaactgcagttacttactgagaactcataagacgaagctaaaatccctcttcggatccacagtcaaccgccctgaacacatcctgcaaaaagcccagagaaaggagcgccatggattactacagaaaatatgcagctatctttctggtcacattgtcggtgtttctgcatgttctccattccgctcctgatgtgcaggattgcccagaatgcacgctacaggaaaacccattcttctcccagccgggtgccccaatacttcagtgcatgggctgctgcttctctagagcatatcccactccactaaggtccaagaagacgatgttggtccaaaagaacgtcacctcagagtccacttgctgtgtagctaaatcatataacagggtcacagtaatggggggtttcaaagtggagaaccacacggcgtgccactgcagtacttgttattatcacaaatcttaaatgttttaccaagtgctgtcttgatgactgctgattttctggaatggaaaattaagttgtttagtgtttatggctttgtgagataaaactctccttttccttaccataccactttgacacgcttcaaggatatactgcagctttactgccttcctccttatcctacagtacaatcagcagtctagttcttttcatttggaatgaatacagcatttagcttgttccactgcaaataaagccttttaaatcatcattcaaaaaaaaaaaaaacaaaaacaaaaaaaaccaacaacacaaacaacaaacacacaaaaaaacttggtgggggggcccgggccccgaaaaggtttttaaaccaatcgtgggcgcgcggaggccccagagggcaacgcgacgccggcccctca

SEQ ID NO: 451637 - DNA, 1739 bp, Homo sapiens
aaagtgtcagctttcaggatgttatgtgtatggctcaataaaattacgtacaaagtgacagcgtactctcttttcatgggctgaccttgtcgtcaccatcacctgaaaatggctccaaacaaaaatgacctaagggttgaaacaagataagatcaaattgacgtcatggtaaaaattgacgtcatggtaattacaccaagtacccttcaatcattggatggaatttcctgttgatcccagggcttagatgcaggtggaaacactctgctggtataaaagcaggtgaggacttcattaactgcagttacttactgagaactcataagacgaagctaaaatccctcttcggatccacagtcaaccgccctgaacacatcctgcaaaaagcccagagaaaggagcgccatggattactacagaaaatatgcagctatctttctggtcacattgtcggtgtttctgcatgttctccattccgctcctgatgtgcaggattgcccagaatgcacgctacaggaaaacccattcttctcccagccgggtgccccaatacttcagtgcatgggctgctgcttctctagagcatatcccactccactaaggtccaagaagacgatgttggtccaaaagaacgtcacctcagagtccacttgctgtgtagctaaatcatataacagggtcacagtaatggggggtttcaaagtggagaaccacacggcgtgccactgcagtacttgttattatcacaaatcttaaatgttttaccaagtgctgtcttgatgactgctgattttctggaatggaaaattaagttgtttagtgtttatggctttgtgagataaaactctccttttccttaccataccactttgacacgcttcaaggatatactgcagctttactgccttcctccttatcctacagtacaatcagcagtctagttcttttcatttggaatgaatacagcatttagcttgttccactgcaaataaagccttttaaatcatcattcaaaaaaaaaaaaaaaaaaaaaaaaaaaaaaaaaaaaaaaaaaaaaaaaaaaaaaaaaaaaaaaaaaaaaaaaaaaaaatgggggggggggggccggcgcggccagaaagaaattaaacaccgggggggggggggggcccaagaagcaaaccagtgtcacaccatcgtttccccagaaaaacatcggggtgaaagcaaggcgggggggggtcttccccaccaaaaaaaaagcgcgcgcgggggaacacccccagagggtctttcaaacacaccacacgaggaggcccgggcgcacacgggcggggtcccaaaaccagggagcgacccccagagcgggcgccggctaataaaaaatagccacccgcaccgcaggggacaccatcagactcacctgccacagcatcattactatgcaccatcactacacaatcacagtccgggtgcacagcaagagccaccgacaagtacatcatcaacagcagcagacctaagcacaaagcgctacccacacaccacccacacgaacaacaaccaccagcaacccaaccacccaacccagcacgcacaagcaccgacaagccaggaacgcaccaccctagacacgcaaaaaccacaccctagcagacccacaccacgccccaaccccaaccaaccaccacacccccaacttcaccatcaccccacccacgtgccccacggacgaaaagcacaccccagaacctacgaaa

SEQ ID NO: 451638 - DNA, 1079 bp, Homo sapiens
tttaaaaggctttatttgcagtggaacaagctaaatgctgtattcattccaaatgaaaagaactagactgctgattactgagaactcataagacgaagctaaaatccctcttcggatccacagtcaaccgccctgaacacatcctgcaaaaagcccagagaaagtgttatataaatggaatcatatagtattcagcctgcattcagcacaattctcttgagatccattcaagctgctgtgtgtatcaatagtgtgttcatttttttgttgctggacagtattccatggtatggctataccatcatttgtatgaccattcaccttctgatggacatttgaaatgtttccaatttttggctactctaaacaaagtttctatgaatatttatatataagttttgtgtgaacatagtcttcatttctctgagataaatgcccaaaagtgcaactgttggggcatatggagcgccatggattactacagaaaatatgcagctatctttctggtcacattgtcggtgtttctgcatgttctccattccgctcctgatgtgcaggattgcccagaatgcacgctacaggaaaacccattcttctcccagccgggtgccccaatacttcagtgcatgggctgctgcttctctagagcatatcccactccactaaggtccaagaagacgatgttggtccaaaagaacgtcacctcagagtccacttgctgtgtagctaaatcatataacagggtcacagtaatggggggtttcaaagtggagaaccacacggcgtgccactgcagtacttgttattatcacaaatcttaaatgttttaccaagtgctgtcttgatgactgctgattttctggaatggaaaattaagttgtttagtgtttatggctttgtgagataaaactctccttttccttaccataccactttgacacgcttcaaggatatactgcagctttactgccttcctccttatcctacagtacaatcagcagtctagttcttttcatttggaatgaatacagcatttagcttgttccactgcaaataaagccttttaaatcatcattcaa

SEQ ID NO: 451639 - DNA, 696 bp, Homo sapiens
gttcctcttctttgtatctgtcgtttttgtttggtgtgtttcgttctttttctctctggtctgcctcatcaagttacaacgagcgccatggattactacagaaaatatgcagctatctttctggtcacattgtcggtgtttctgcatgttctccattccgctcctgatgtgcaggattgcccagaatgcacgctacaggaaaacccattcttctcccagccgggtgccccaatacttcagtgcatgggctgctgcttctctagagcatatcccactccactaaggtccaagaagacgatgttggtccaaaagaacgtcacctcagagtccacttgctgtgtagctaaatcatataacagggtcacagtaatggggggtttcaaagtggagaaccacacggcgtgccactgcagtacttgttattatcacaaatcttaaatgttttaccaagtgctgtcttgatgactgctgattttctggaatggaaaattaagttgtttagtgtttatggctttgtgagataaaactctccttttccttaccataccactttgacacgcttcaaggatatactgcagctttactgccttcctccttatcctacagtacaatcagcagtctagttcttttcatttggaatgaatacagcatttagcttgttccactgcaaataaagccttttaaatcatcattcaa

SEQ ID NO: 451640 - DNA, 685 bp, Homo sapiens
tttaaaaggctttatttgcagtggaacaagctaaatgctgtattcattccaaatgaaaagaactagactgctgattactgagaactcataagacgaagctaaaatccctcttcggatccacagtcaaccgccctgaacacatcctgcaaaaagcccagagaaagattgcccagaatgcacgctacaggaaaacccattcttctcccagccgggtgccccaatacttcagtgcatgggctgctgcttctctagagcatatcccactccactaaggtccaagaagacgatgttggtccaaaagaacgtcacctcagagtccacttgctgtgtagctaaatcatataacagggtcacagtaatggggggtttcaaagtggagaaccacacggcgtgccactgcagtacttgttattatcacaaatcttaaatgttttaccaagtgctgtcttgatgactgctgattttctggaatggaaaattaagttgtttagtgtttatggctttgtgagataaaactctccttttccttaccataccactttgacacgcttcaaggatatactgcagctttactgccttcctccttatcctacagtacaatcagcagtctagttcttttcatttggaatgaatacagcatttagcttgttccactgcaaataaagccttttaaatcatcattcaa

SEQ ID NO: 451641 - DNA, 873 bp, Homo sapiens
tttaaaaggctttatttgcagtggaacaagctaaatgctgtattcattccaaatgaaaagaactagactgctgattactgagaactcataagacgaagctaaaatccctcttcggatccacagtcaaccgccctgaacacatcctgcaaaaagcccagagaaaggagcgccatggattactacagaaaatatgcagctatctttctggtcacattgtcggtgtttctgcatgttctccattccgctcctgatgtgcaggagacagggtttcaccatgttgcccaggctgctctcaaactcctgagctcaagcaatccacccactaaggcctcccaaagtgctaggattacagattgcccagaatgcacgctacaggaaaacccattcttctcccagccgggtgccccaatacttcagtgcatgggctgctgcttctctagagcatatcccactccactaaggtccaagaagacgatgttggtccaaaagaacgtcacctcagagtccacttgctgtgtagctaaatcatataacagggtcacagtaatggggggtttcaaagtggagaaccacacggcgtgccactgcagtacttgttattatcacaaatcttaaatgttttaccaagtgctgtcttgatgactgctgattttctggaatggaaaattaagttgtttagtgtttatggctttgtgagataaaactctccttttccttaccataccactttgacacgcttcaaggatatactgcagctttactgccttcctccttatcctacagtacaatcagcagtctagttcttttcatttggaatgaatacagcatttagcttgttccactgcaaataaagccttttaaatcatcattcaa

SEQ ID NO: 451642 - DNA, 769 bp, Homo sapiens
ggcagtatagtgtgaactcataccagcgaagttatgttcccttcttctcgtgatccacggttctaacctgttcctgatcacaggtcctgctcaaaagtctcctagaagaaaaggagctgccaattgcgaagttactgacacgaataatatgagtgccagtctgagtcttctatcgtggctcaccatatgctcttgggtgttgtctttgcatgcttgtccagtacctgaatgcatgcacttattgtaggattgcccagaatgcacgctacaggaaaacccattcttctcccagccgggtgccccaatacttcagtgcatgggctgctgcttctctagagcatatcccactccactaaggtccaagaagacgatgttggtccaaaagaacgtcacctcagagtccacttgctgtgtagctaaatcatataacagggtcacagtaatggggggtttcaaagtggagaaccacacggcgtgccactgcagtacttgttattatcacaaatcttaaatgttttaccaagtgctgtcttgatgactgctgattttctggaatggaaaattaagttgtttagtgtttatggctttgtgagataaaactctccttttccttaccataccactttgacacgcttcaaggatatactgcagctttactgccttcctccttatcctacagtacaatcagcagtctagttcttttcatttggaatgaatacagcatttagcttgttccactgcaaataaagccttttaaatcatcattcaa

SEQ ID NO: 451643 - DNA, 628 bp, Homo sapiens
tttaaaaggctttatttgcagtggaacaagctaaatgctgtattcattccaaatgaaaagaactagactgctgattactgagaactcataagacgaagctaaaatccctcttcggatccacagtcaaccgccctgaacacatcctgcaaaaagcccagagaaagattgcccagaatgcacgctacaggaaaacccattatatcccactccactaaggtccaagaagacgatgttggtccaaaagaacgtcacctcagagtccacttgctgtgtagctaaatcatataacagggtcacagtaatggggggtttcaaagtggagaaccacacggcgtgccactgcagtacttgttattatcacaaatcttaaatgttttaccaagtgctgtcttgatgactgctgattttctggaatggaaaattaagttgtttagtgtttatggctttgtgagataaaactctccttttccttaccataccactttgacacgcttcaaggatatactgcagctttactgccttcctccttatcctacagtacaatcagcagtctagttcttttcatttggaatgaatacagcatttagcttgttccactgcaaataaagccttttaaatcatcattcaa

SEQ ID NO: 451644 - DNA, 1198 bp, Homo sapiens
  misc_feature (851)..(851): n is a, c, g, or t
aaagtgtcagctttcaggatgttatgtgtatggctcaataaaattacgtacaaagtgacagcgtactctcttttcatgggctgaccttgtcgtcaccatcacctgaaaatggctccaaacaaaaatgacctaagggttgaaacaagataagatcaaattgacgtcatggtaaaaattgacgtcatggtaattacaccaagtacccttcaatcattggatggaatttcctgttgatcccagggcttagatgcaggtggaaacactctgctggtataaaagcaggtgaggacttcattaactgcagttacttactgagaactcataagacgaagctaaaatccctcttcggatccacagtcaaccgccctgaacacatcctgcaaaaagcccagagaaaggagcgccatggattactacagaaaatatgcagctatctttctggtcacattgtcggtgtttctgcatgttctccattccgctcctgatgtgcaggattgcccagaatgcacgctacaggaaaacccattcttctcccagccgggtgccccaatacttcagtgcatgggctgctgcttctctagagcatatcccactccactaaggtccaagaagacgatgttggtccaaaagaacgtcacctcagagtccacttgctgtgtagctaaatcatataacagggtcacagtaatggggggtttcaaagtggagaaccacacggcgtgccactgcagtacttgttattatcacaaatcttaaatgttttaccaagtgctgtcttgatgactgctgattttctggaatggaaaattaagttgtttaggcaaaaaaaaaaaaaaaacaaaaaaaaaaantttgtgggtgggcctggcgcttgggccccggcgagaaagagcttttagtgacaacattcggtgtggggcgggccggggccccaagaagggtaagagtgaacaagtgggcacaaagagcggtgttcccgagggagaaaccgcgggcacagaaccaatagggcggtgggaatttcaccaccaaataaaaaaacacgcgcgcaggggaggaacacacgagagggcgctcttggaacaaaactctcacagagggagagtactcgaggggcaaaaacaggggaggaccaagaccaaggggggggcccaaggaggaggcccagaaaaaaaatatgagccccggcctggggggc

SEQ ID NO: 451645 - DNA, 2389 bp, Homo sapiens
  misc_feature (673)..(673): n is a, c, g, or t
  misc_feature (941)..(941): n is a, c, g, or t
tttaaaaggctttatttgcagtggaacaagctaaatgctgtattcattccaaatgaaaagaactagactgctgattactgagaactcataagacgaagctaaaatccctcttcggatccacagtcaaccgccctgaacacatcctgcaaaaagcccagagaaaggtaatatgaatgaaataattttgggggactttaattgaggagtaaaatatttgagaatatgaggaagattccaaagtctctgcatataccttaataagaactgagacaggcttttactcattctcttttcagcacttatgattgaattagaaggaagtctgtaaaatttggctgtgatcatagggtaagatgttatctaacagaagccagaaacccaatgtctcctgctgagatgcttgagtgcctgtcaggatctaaaaattttcctcaagaattactgtatgtcattggaaagacgttcttttgagtggcttccaggagccagacagagggcaagtagacattatgatattgttttattatccatttttaagtgatgtatagctatatcttcaagctggcccatgataaagtggttcacttgttcagctgaatgactatagcttctgattatcttttgaatagatgttctcatgcagacttgaatagtagcatggaatttcttgaangtcgttgttttcatttttcttctttaataaaatgctacaaaaatcaaagttggtagtatttctctagctattattcatgaatttgcaatgataagtcacttgcccaagtctaattgattagttccaatgagtttctggaaacttttttgcagctaaccttggttatcttagcattagcattaattggtggctgattgggaaatagacactagaaaataaaagaccttttttgtccctccttattagcgttgaagaataggctatgggnacgtgtgaagaactatgggctgacactatatgggtcccttaggaatgcagaagctccctttcatctctgtagatattttgtttcttaagctcttcaatctttttcccagtcaaaagtcagatattttgctttaggaaaatatcttttaaataattacttgacttaataccaattcaattattcataatattggtcaaccaaattgcatgtaatacattgctatattcttgaattatttaaaaaagacaagagtggtcatcatttataaaaggttcgtggtttttcatgttaatttcaactttggttttcttaagtttattattttttttgcagtaagagtcattgaaattttaagtgagtcatattccttaccatttcctgctgaaaagggtagtgtgtgagaaaaatgttagaaaagcaattaattatgttccagagcagattttcagttgcagtgtacatttctttttaatgtgagacccaaatttacatgaaaactcaaagtaagagctgggtaacagaaatggctaacttagaaggtaatgtacgtcttgcttaaaagcacatcaaagtaatctactttctcaaagagaaaatttacaggagtgaacttacatttcttttgagaacagcatggttcatagcaccaaacttcatttttacaggttgtgaatcctagagtagtttgctatcaacttctgatctttgcacattctggatttggcatataatgttacagcagtgccattgtaatgttgcacaaagtagtctagcaatttcttggttcaccaggcttagagataacattgtagaaatgatccagcatctttaacactctgtggtttaaggtggggcacttaggggtagaatcaataacaatgttagaaatcaaattagacaagataactgaaacagcatgatccatgtgtgactccaagttataaaggaggacatggattaatggtatacttctaggctataggggtagtacaagtggaaggacaccatcttagcatcagatcactttctgagcaactttggcaaatcttttaaattctctaatgtgtagttttttaatatatgacacaggtgtaaagaaaataaagcaagtgaatgtatgtgaaagccaatgctgactgggcacgggggctcacgcctgaaattctagcactttgggaggcagagccggggatatcacttgagcccaggagttgaagatcagcctgggcaacatagagaaaccctgtctctacaaacaaaacaaaacaaaaaaacaaacacaaaaaaccactcccaaattagccgggcttgctggcacactcctgttgtcccagttacccgggaggctaagatgggaggatcacctgagcttgggaagttgagactgtaatgagccgtgatagtggcactacactccagcctgatccacagagtgagaccatgtctca

SEQ ID NO: 451646 - DNA, 462 bp, Homo sapiens
  misc_feature (453)..(453): n is a, c, g, or t
tttaaaaggctttatttgcagtggaacaagctaaatgctgtattcattccaaatgaaaagaactagactgctgattactgagaactcataagacgaagctaaaatccctcttcggatccacagtcaaccgccctgaacacatcctgcaaaaagcccagagaaagagcgccatgtgattaactcaacaagggcaaaacaaacaaaaaatttttttaattttgggccaaaggggcgtttaaaatttcccttttttttcccttggggtcacattgtcggtgtttctgcatgttctccattccgcccctgatgtgcaggattgcccagaatgcacgctacaggaaaacccattcttctcccagccgcggttggccccccccaaaaagttaactttcaaggtgggccaattgggggccttgggctggctttcttcttaggaagccattatttcccacntccactaaa

SEQ ID NO: 451647 - DNA, 780 bp, Homo sapiens
tttaaaaggctttatttgcagtggaacaagctaaatgctgtattcattccaaatgaaaagaactagactgctgattactgagaactcataagacgaagctaaaatccctcttcggatccacagtcaaccgccctgaacacatcctgcaaaaagcccagagaaaggagcgccatggattactacagaaaatatgcagctatctttctggtcacattgtcggtgtttctgcatgttctccattccgctcctgatgtgcaggattgcccagaatgcacgctacaggaaaacccattcttctcccagccgggtgccccaatacttcagtgcatgggctgctgcttctctagagcatatcccactccactaaggtccaagaagacgatgttggtccaaaagaacgtcacctcagagtccacttgctgtgtagctaaatcatataacagggtcacagtaatggggggtttcaaagtggagaaccacacggcgtgccactgcagtacttgttattatcacaaatcttaaatgttttaccaagtgctgtcttgatgactgctgattttctggaatggaaaattaagttgtttagtgtttatggctttgtgagataaaactctccttttccttaccataccactttgacacgcttcaaggatatactgcagctttactgccttcctccttatcctacagtacaatcagcagtctagttcttttcatttggaatgaatacagcatttagcttgttccactgcaaataaagccttttaaatcatcattcaa

SEQ ID NO: 451648 - DNA, 1025 bp, Homo sapiens
aaccgagtgctggttgtctatggcgtgtgtgagctcttgtgttgtgcttgcgtggctacgatagtgttggttgaggtggtggggtgttgtggcgatgtgcatgtagatggggtagttgtgaaagagaaaaataacgtagaatgatgcgtgcgtttttatcagatgctcctctcgtcttgtcgggaatttagcgggagccccttgtagcttcgatgtcttttggacgtttatgtcttcacaaccgttcccccgctagtttccttggtgagtgtgtgtcccgggggagccccacttagtcctcgccgattcgcccgattagctactgagaactcataagacgaagctaaaatccctcttcggatccacagtcaaccgccctgaacacatcctgcaaaaagcccagagaaaggagcgccatggattactacagaaaatatgcagctatctttctggtcacattgtcggtgtttctgcatgttctccattccgctcctgatgtgcaggattgcccagaatgcacgctacaggaaaacccattcttctcccagccgggtgccccaatacttcagtgcatgggctgctgcttctctagagcatatcccactccactaaggtccaagaagacgatgttggtccaaaagaacgtcacctcagagtccacttgctgtgtagctaaatcatataacagggtcacagtaatggggggtttcaaagtggagaaccacacggcgtgccactgcagtacttgttattatcacaaatcttaaatgttttaccaagtgctgtcttgatgactgctgattttctggaatggaaaattaagttgtttagtgtttatggctttgtgagataaaactctccttttccttaccataccactttgacacgcttcaaggatatactgcagctttactgccttcctccttatcctacagtacaatcagcagtctagttcttttcatttggaatgaatacagcatttagcttgttccactgcaaataaagccttttaaatcatcattcaa

SEQ ID NO: 451649 - DNA, 1208 bp, Homo sapiens
  misc_feature (1047)..(1047): n is a, c, g, or t
  misc_feature (1049)..(1049): n is a, c, g, or t
  misc_feature (1051)..(1051): n is a, c, g, or t
  misc_feature (1058)..(1058): n is a, c, g, or t
  misc_feature (1063)..(1063): n is a, c, g, or t
  misc_feature (1067)..(1067): n is a, c, g, or t
  misc_feature (1069)..(1069): n is a, c, g, or t
  misc_feature (1076)..(1076): n is a, c, g, or t
  misc_feature (1086)..(1086): n is a, c, g, or t
  misc_feature (1088)..(1088): n is a, c, g, or t
aaagtgtcagctttcaggatgttatgtgtatggctcaataaaattacgtacaaagtgacagcgtactctcttttcatgggctgaccttgtcgtcaccatcacctgaaaatggctccaaacaaaaatgacctaagggttgaaacaagataagatcaaattgacgtcatggtaaaaattgacgtcatggtaattacaccaagtacccttcaatcattggatggaatttcctgttgatcccagggcttagatgcaggtggaaacactctgctggtataaaagcaggtgaggacttcattaactgcagttacttactgagaactcataagacgaagctaaaatccctcttcggatccacagtcaaccgccctgaacacatcctgcaaaaagcccagagaaaggagcgccatggattactacagaaaatatgcagctatctttctggtcacattgtcggtgtttctgcatgttctccattccgctcctgatgtgcaggattgcccagaatgcacgctacaggaaaacccattcttctcccagccgggtgccccaatacttcagtgcatgggctgctgcttctctagagcatatcccactccactaaggtccaagaagacgatgttggtccaaaagaacgtcacctcagagtccacttgctgtgtagctaaatcatataacagggtcacagtaatggggggtttcaaagtggagaaccacacggcgtgccactgcagtacttgttattatcacaaatcttaaatgttttaccaagtgctgtcttgatgactgctgattttctggaatggaaaattaagttgtttagtgtttatggctttgtgagataaaactctccttttccttaccataccactttgacacgcttcaaggatatactgcagctttactgccttcctccttatcctacagtacaatcagcagtctagttcttttcatttggaatgaatacagcatttagcttgttccactgcaaataaagccttttaaatcatcattcaaaaaaaaaaacagcacaaaaacaaatttggggcngntnggccctnaaaangttntnaaacccnttgttggggngnggccccattgtctacgggcaccgtggctaatacgtgtcccaagagagactggccatacacacgtggtgtggtctctcccgaataaaacgccggggtgaacagcaggctttgtacacttcg

SEQ ID NO: 451650 - DNA, 1058 bp, Homo sapiens
  misc_feature (1026)..(1030): n is a, c, g, or t
  misc_feature (1033)..(1038): n is a, c, g, or t
aaagtgtcagctttcaggatgttatgtgtatggctcaataaaattacgtacaaagtgacagcgtactctcttttcatgggctgaccttgtcgtcaccatcacctgaaaatggctccaaacaaaaatgacctaagggttgaaacaagataagatcaaattgacgtcatggtaaaaattgacgtcatggtaattacaccaagtacccttcaatcattggatggaatttcctgttgatcccagggcttagatgcaggtggaaacactctgctggtataaaagcaggtgaggacttcattaactgcagttacttactgagaactcataagacgaagctaaaatccctcttcggatccacagtcaaccgccctgaacacatcctgcaaaaagcccagagaaaggagcgccatggattactacagaaaatatgcagctatctttctggtcacattgtcggtgtttctgcatgttctccattccgctcctgatgtgcaggattgcccagaatgcacgctacaggaaaacccattcttctcccagccgggtgccccaatacttcagtgcatgggctgctgcttctctagagcatatcccactccactaaggtccaagaagacgatgttggtccaaaagaacgtcacctcagagtccacttgctgtgtagctaaatcatataacagggtcacagtaatggggggtttcaaagtggagaaccacacggcgtgccactgcagtacttgttattatcacaaatcttaaatgttttaccaagtgctgtcttgatgactgctgattttctggaatggaaaattaagttgtttagtgtttatggctttgtgagataaaactctccttttccttaccataccactttgacacgcttcaaggatatactgcagctttactgccttcctccttatcctacagtacaatcagcagtctagttcttttcatttggaatgaatacagcatttagcttgttccactgcaaataaagccttttaaatcatcattcaaaaaaaaaaaaannnnntannnnnntttttttttttttttttttt

SEQ ID NO: 451651 - DNA, 1392 bp, Homo sapiens
  misc_feature (1045)..(1045): n is a, c, g, or t
aaagtgtcagctttcaggatgttatgtgtatggctcaataaaattacgtacaaagtgacagcgtactctcttttcatgggctgaccttgtcgtcaccatcacctgaaaatggctccaaacaaaaatgacctaagggttgaaacaagataagatcaaattgacgtcatggtaaaaattgacgtcatggtaattacaccaagtacccttcaatcattggatggaatttcctgttgatcccagggcttagatgcaggtggaaacactctgctggtataaaagcaggtgaggacttcattaactgcagttacttactgagaactcataagacgaagctaaaatccctcttcggatccacagtcaaccgccctgaacacatcctgcaaaaagcccagagaaaggagcgccatggattactacagaaaatatgcagctatctttctggtcacattgtcggtgtttctgcatgttctccattccgctcctgatgtgcaggattgcccagaatgcacgctacaggaaaacccattcttctcccagccgggtgccccaatacttcagtgcatgggctgctgcttctctagagcatatcccactccactaaggtccaagaagacgatgttggtccaaaagaacgtcacctcagagtccacttgctgtgtagctaaatcatataacagggtcacagtaatggggggtttcaaagtggagaaccacacggcgtgccactgcagtacttgttattatcacaaatcttaaatgttttaccaagtgctgtcttgatgactgctgattttctggaatggaaaattaagttgtttagtgtttatggctttgtgagataaaactctccttttccttaccataccactttgacacgcttcaaggatatactgcagctttactgccttcctccttatcctacagtacaatcagcagtctagttcttttcatttggaatgaatacagcatttagcttgttccactgcaaataaagccttttaaatcatcattcaagcaaaaaaaaaaaaaaaacaaaaaaaaaaantttgtgggtgggcctggcgcttgggccccggcgagaaagagcttttagtgacaacattcggtgtggggcgggccggggccccaagaagggtaagagtgaacaagtgggcacaaagagcggtgttcccgagggagaaaccgcgggcacagaaccaatagggcggtgggaatttcaccaccaaataaaaaaacacgcgcgcaggggaggaacacacgagagggcgctcttggaacaaaactctcacagagggagagtactcgaggggcaaaaacaggggaggaccaagaccaaggggggggcccaaggaggaggcccagaaaaaaaatatgagccccggcctggggggc

SEQ ID NO: 451652 - DNA, 1211 bp, Homo sapiens
aaagtgtcagctttcaggatgttatgtgtatggctcaataaaattacgtacaaagtgacagcgtactctcttttcatgggctgaccttgtcgtcaccatcacctgaaaatggctccaaacaaaaatgacctaagggttgaaacaagataagatcaaattgacgtcatggtaaaaattgacgtcatggtaattacaccaagtacccttcaatcattggatggaatttcctgttgatcccagggcttagatgcaggtggaaacactctgctggtataaaagcaggtgaggacttcattaactgcagttacttactgagaactcataagacgaagctaaaatccctcttcggatccacagtcaaccgccctgaacacatcctgcaaaaagcccagagaaaggagcgccatggattactacagaaaatatgcagctatctttctggtcacattgtcggtgtttctgcatgttctccattccgctcctgatgtgcaggattgcccagaatgcacgctacaggaaaacccattcttctcccagccgggtgccccaatacttcagtgcatgggctgctgcttctctagagcatatcccactccactaaggtccaagaagacgatgttggtccaaaagaacgtcacctcagagtccacttgctgtgtagctaaatcatataacagggtcacagtaatggggggtttcaaagtggagaaccacacggcgtgccactgcagtacttgttattatcacaaatcttaaatgttttaccaagtgctgtcttgatgactgctgattttctggaatggaaaattaagttgtttagtgtttatggctttgtgagataaaactctccttttccttaccataccactttgacacgcttcaaggatatactgcagctttactgccttcctccttatcctacagtacaatcagcagtctagttcttttcatttggaatgaatacagcatttagcttgttccactgcaaataaagccttttaaatcatcattcaaaaaaaaaaaaaaaaaaaaaaaaaaaaaaaaaaaaaaaacaaaaaaacaaaaaaaaaaaaacaaaaacaaaaaaaaccaacaacacaaacaacaaacacacaaaaaaacttggtgggggggcccgggccccgaaaaggtttttaaaccaatcgtgggcgcgcggaggccccagagggcaacgcgacgccggcccctca

SEQ ID NO: 451653 - DNA, 683 bp, Homo sapiens
  misc_feature (21)..(21): n is a, c, g, or t
  misc_feature (41)..(41): n is a, c, g, or t
cgctggaacgaatcaaacagngacacaaccaaacaccctcnagggaaacgcatggcattactcttgagagcgccatggattactacagaaaatatgcagctatctttctggtcacattgtcggtgtttctgcatgttctccattccgctcctgatgtgcaggattgcccagaatgcacgctacaggaaaacccattcttctcccagccgggtgccccaatacttcagtgcatgggctgctgcttctctagagcatatcccactccactaaggtccaagaagacgatgttggtccaaaagaacgtcacctcagagtccacttgctgtgtagctaaatcatataacagggtcacagtaatggggggtttcaaagtggagaaccacacggcgtgccactgcagtacttgttattatcacaaatcttaaatgttttaccaagtgctgtcttgatgactgctgattttctggaatggaaaattaagttgtttagtgtttatggctttgtgagataaaactctccttttccttaccataccactttgacacgcttcaaggatatactgcagctttactgccttcctccttatcctacagtacaatcagcagtctagttcttttcatttggaatgaatacagcatttagcttgttccactgcaaataaagccttttaaatcatcattcaa

SEQ ID NO: 451654 - DNA, 1054 bp, Homo sapiens
aaagtgtcagctttcaggatgttatgtgtatggctcaataaaattacgtacaaagtgacagcgtactctcttttcatgggctgaccttgtcgtcaccatcacctgaaaatggctccaaacaaaaatgacctaagggttgaaacaagataagatcaaattgacgtcatggtaaaaattgacgtcatggtaattacaccaagtacccttcaatcattggatggaatttcctgttgatcccagggcttagatgcaggtggaaacactctgctggtataaaagcaggtgaggacttcattaactgcagttacttactgagaactcataagacgaagctaaaatccctcttcggatccacagtcaaccgccctgaacacatcctgcaaaaagcccagagaaaggagcgccatggattactacagaaaatatgcagctatctttctggtcacattgtcggtgtttctgcatgttctccattccgctcctgatgtgcaggattgcccagaatgcacgctacaggaaaacccattcttctcccagccgggtgccccaatacttcagtgcatgggctgctgcttctctagagcatatcccactccactaaggtccaagaagacgatgttggtccaaaagaacgtcacctcagagtccacttgctgtgtagctaaatcatataacagggtcacagtaatggggggtttcaaagtggagaaccacacggcgtgccactgcagtacttgttattatcacaaatcttaaatgttttaccaagtgctgtcttgatgactgctgattttctggaatggaaaattaagttgtttagtgtttatggctttgtgagataaaactctccttttccttaccataccactttgacacgcttcaaggatatactgcagctttactgccttcctccttatacagcctttaactttcttagtgcctgtgaaagtgctaggtttcacagagttattttgttgaggtatgtcatagtgaaacaatggagaaagcaaatgcaaatacattaaaatttttagccagtacagctaccttccgc

SEQ ID NO: 451655 - DNA, 787 bp, Homo sapiens
tttaaaaggctttatttgcagtggaacaagctaaatgctgtattcattccaaatgaaaagaactagactgctgattactgagaactcataagacgaagctaaaatccctcttcggatccacagtcaaccgccctgaacacatcctgcaaaaagcccagagaaaggagcgccatggattactacagaaaatatgcagctatctttctggtcacattgtcggtgtttctgcatgttctccattccgctcctgatgtgcaggattgcccagaatgcacgctacaggaaaacccattcttctcccagccgggtgccccaatacttcagtgcatgggctgctgcttctctagagcatatcccactccactaaggtccaagaagacgatgttggtccaaaagaacgtcacctcagagtccacttgctgtgtagctaaatcatataacagggtaagaacctcaagatccccagaagctttctaacagcccaatcagagaaatgttcatagagcccacccatggaatttaatgccaaaggtgtctaatgacccagcctctgtcgagcatttgtacaggtggggaatacatttctacccattaattaaaagagtcaattgtcttgtgggtatagactggatttattcagaatgaggagaataggggtagaggtgacaaggggcaggttgggagaaagtacagcttacttgtgctaaaaatatttcctaaaaaggagactgtgcaaatgtagtatgcatctacttatttcagcagaatgcaaacaattttatgtaat

SEQ ID NO: 451656 - DNA, 2964 bp, Homo sapiens
  misc_feature (1366)..(1366): n is a, c, g, or t
cgaataagttaattgttttattgttaaaacaaaggcttttgggggtgagtatctgctctatgaaaaatcttctagagatcttggtattaaaaatgtaaaaattttatcattgccattaggaaaactggtagataggctgaataacaaaacagttgcaacttaggagaaaaacagtgagcccaaagactgaacataaggattttttaagttttatggtagcataaagagatataaagtgtatgagaaaaccagtagagatctagaagttctttctggtatctaagaagaatttcagaatttaattaagacagaatgaagggaggagtatttttaagaggtaactaacataatttttatgatcgtccatacagatttggcaatttctacttcctttaattgcagtacctggtgtgtcataagcaatttttacaagtacagtcattttttgttttcccatttcagtgttgtagcatgaaacgattttcagtgatgagcaacctaatttaagtgaacatccatttttaatgctaccacataaggaaatagagctatgattatgattaacaactatgttctatgcaagggtaaccccagacatatgcagctccgtcataactgactcctttgtctggaactatgtcttttatacaatgaatgtgaagtccttcaattttcataaaagatacagttgacattatttataatatagaagtgatggcatgataatacagaaaattaataataattattcaacagaagttcccagccataatatcacttctgaaaaataatgcatgctagtattttttgagaatctgtaatggcttgacacttagctaagcagttaactgctttcatcatattattttatgtaagtctgttttagtctgtgcagaacgctatagaaaaataccatacactgggtaacttataaacaaatttctttctcacggttttggaggctgagaaatcaaagatcaagtcatcagcagattcagtgtctgctgaggggctttttccttgtagactaatggttgcatctagctgtgtcttcacaacccatgatgcaaggggcagggtagctctctgggacttcttttataagagcaccaattccattcataccatttatgcccccatgacctaatcacttctcaaaggcctcacatcctgatactatatgaccccatacctgataccttgggaatcagaatgtcagcatatacatttgggaggacacaaacattttgatcataacaaggtcctagaaaagaaaattgaaatcacagaagtagatttgattatttaacatttgcatctagattgccaacattttatttctgttaatgagtttgcaaattcaacnctgttagagcgataccagcttcataccatcccacagaatcaggagagattttcttgaaactgcttcacagcccagcttctctctcttcacttccacttccatctctgcccagcaagtgttgatcccaagagcatttcctaataaactccttggaaattaatctgtctctgtctcagagtttgtgtctcaggagatcaaacctataaaagtgttccagaatgaacaaggaggttatcaaaaaaaaatacaggcataaaaacaatctgttaatctttgattggcgtataactctgagacaattctccccatgtaaataatgcctaggtgtgctacatttagtatatgaagaaaaggtaaagactcagttatagggcagaacacaggtggctcacgcaagtcatctcagcactgtaggaggccaagacgggaggattgcttgagcccgggagttccagacccgccttggcaacacagtgagacccagtttcataaacaaacaaacaaacaaaaaaagcaaaaaagcacccagttgtagagcaatatgatttttccaacagagggagacaaaatttaaacataagctttaatgccaaatgtcagagaaccattttaattttcacattggtccaattatatatgttgacacattttattaagtattttactcacacaatttcacttacaaatataaaaatatatagaaaataaaatatagatactattataagcttgaggttaatgatatactaaaacattaaaggatgtttataatatcattctgattgctcacaaatatttggagagaatttaataaacaatacatttgtggctacattaacacaactacattacattaatatgacatagagatgaaaaagaccaagttagcttgtgaaaaatgaattcaagaatgtggatgagtttcttagttcagaattgctcaggaattgggacattatgtaggtaagattctggaaagggcaaaaggatgaaaaacaagagaaggcctaacccatctgctacttgattatcttaatgaagcaaatctagagatttattaaagtaactcttgcttattgagcaccatatttaacacaaactatttagctttaaggcaacagttatcatcataatttgcttaaatttttaggagtttactcataaagctttgctttcagtgagataaggccggatgggcaaagagtaaactaccctgcaaatatatgcggataatttaattggtttcatattacaggaatctagagggccaattactttttcagtaataaaaaaataaaagggccagatgcagtggctcatgcctgtaatcccagcactttgggagtccaaggcagagagatcgcttgagctcagcagtttgaaaccaacttgggcaaaatgagaaaacacccatctctaaagaaatatataaattagacagaaatggtgtcatgtgcatgtagtacttgtattcccagctacctcaggaggctgaggtgtgaagatcatttgagcctggagaggtcaaggctgattgagccatgatggtgccagtgtacttcagcctgggtgacagagactgtctcaaaaaaaaaaaa

SEQ ID NO: 451657 - DNA, 3597 bp, Homo sapiens
gctacaagatgaccactgaggattacaagaagctgtgagtatgcaacgccaggcaccctacaatatcaggcgcagctctacatcaggggacaccgaggaggaggaggaggaggaggtggtgccattctcctcagatgaacagaaacggaggtcagaggctgcaagcggtgttctgaggaggacagctccccgggagcactcctacgtcctgtcagcggccaagaagagcactggcagtcctacccaggagacacaggcaccgtttatcgcgaagagggtggaggtggtggaagaggacgggccttctgagaagagccaggacccacctgctctggcaagatccactcctggctcaaacagctcaagaggtgaggaaattgtccgcctgcagatcctgacacccagggcaggactccgcctggtggccccagacgtggaaggcatgagctccagtgccacttcagtctctgctgtccctgctgataggaagagcaacagcacagcagcccaggaggatgcaaaggcagacccaaagggggccttggctgattatgaggggaaggatgtggccaccagggtcggagaggcctggcaggagaggcctggagctccaagaggtggccaaggagacccagctgtacccgctcagcaacctgcagatcccagcaccccagagcggcagagcagccccagcggatctgagcaacttgtcagacgagagagttgtggcagcagcgtgttgactgattttgaggggaaggatgtggccaccaaggtcggagaggcctggcaggacaggcctggagccccaagaggtggccaaggagacccagctgtacccactcagcaacctgcagatcccagtaccccagaacagcagaacagccccagcggatctgagcaattcgtcagacgagagagctgcaccagcagggtgaggagcccctcgagctgcatggtcactgttactgtcactgccacatctgagcagcctcacatttatattccagcccccgcaagtgaattggactccagctctaccaccaaagggattctcttcgtgaaggagtacgtgaatgctagtgaagtgtcttctgggaagccagtatctgcacgctatagcaacgtcagcagcattgaggactcattcgccatggagaagaagcctccatgtggcagcactccatactctgagaggacaactggagggatctgtacttactgcaaccgtgagatccgagactgtccaaagattaccctagaacatcttggtatctgctgccatgaatattgctttaagtgtgggatttgcagtaaaccgatgggcgatctcctggatcagatcttcattcaccgtgacaccattcactgtgggaaatgctatgagaagctcttctagcgaccccccaccgccaggctgatcagaagctgatgactcgtggacaaatttggctgtccccagttttgccccaagttgctgtctccccttccctcacctcctccctccctgtttgatttcttcatgcttttgcccttctcaagttgaagttgcatacatccaatatcgtatcttaatgatgctatgataattgcttgtgtgtgtagcttcttgtagcttagaaagcgctttatgcccatgatgtcatttcaggctcaaccaaagaggatcaaacaggaattccatcttggcttccctaagacagattggctttctaatgagtttaagtgggcagaagtgtagggttcagtgtgtcctgactcccttgaggcttataatgggccaagttgaagactgttgatgatccctggtgggtaaattgcagacatcaaatgctagggattggcataggctagtgtttagcttgtctatttgccatatctattttttttaaatttccatacacttgtaaaagtagttagttgcttttgattgagttatatagcagtttttcatttggtcttccactcacctttcactatatttgagtgttcccttacaggtatgttggcatgtgttggaaaatttacacaattaggtttaaattcagtaggatgtgattttaggatgctactgatcaaagtgatatctgtgtctgttggaatcttgatagctgattaatttgccctcaattctgctccctgaacttcacacataaatcttcccaagtgggttttagggtgtatagatcccagcaggattaaggaggtggaaaagcagctaacatttcttgaggctctaccacatagcaggcactgtcacagagtaatggcattaatccccataataatcctgtgaaggtgatattctcatcccatcttagacatgaggatattggaactcagagaggtggctattgcattgcgcagaacgctacagagcccatgctcttcccagagcagcacccacaaaagcaagcattgattttgtgctcagtgtgtgccaagcactgtgcagagggtacacagttcctgccaggttaacaccctcccttcaggcctcccaaaggcataggcttgcaaagagcagaaggtgtgaaatcacactcttcctctgggcatcctggatccctgaattatccccccccccatgaagtacttcaagggccaagctgcccctttccctcctctccgcccatgaaaatgcctccaaactgagatgctttcagctgagaacagatttgactcacagacattaccaaagaggagcttgtgaatccaggaaaagctccagggggctagctgatctgagcagagagctttcagtgacccattttcctgtctagactctgccttaagctagtggcaactgctggggccccaggtacttgggacatggaaactcgttggatggctgggcagatgtaagcctgtccatgcagtcagccgatcctctgctcaggttcagctggactctgccatctgtgggcccagcatcactctgtaagttccttgaaaggaagaacaaccttagagtatttctgatacaaaatgagggcctctgctcttgatttaattataaaatgtctacgtctttctccagtttctgagccctatgcacattggcttgtgggcttgttcttcctgccaaatgatcagagaggaacattccatttatttgtagtggatttcctctggagggcatgtacccacactaaataccaactgctcttcctcagctgtagtccccaacatcagacttggcacgtggtggacactaacacacaggcactcaatgaatgagtgaaggaaataaaagtcaccccgttggtgagaggtgctatccctgagtctcagtgcaggaccagtggatgaaaggcaaggtaaagaggcccaagataggctggcttcccccgttcaaggtatagtctgcctttaagggagttttagaaccaacatgcaagacattgaaagaaatcttgcaagagccattattgacttagatccaaaacagcctctctcatgtctaaaaaggcacagaattttgcagatctgaggaagagggatgcattacctttttgcttcttttcaattgcttagtgtttctaatcatacttaatccacactaatgtgcgcaattataataaatggtaagatatc

SEQ ID NO: 451658 - DNA, 3714 bp, Homo sapiens
gctacaagatgaccactgaggattacaagaagctgtgagtatgcaacgccaggcaccctacaatatcaggcgcagctctacatcaggggacaccgaggaggaggaggaggaggaggtggtgccattctcctcagatgaacagaaacggaggtcagaggctgcaagcggtgttctgaggaggacagctccccgggagcactcctacgtcctgtcagcggccaagaagagcactggcagtcctacccaggagacacaggcaccgtttatcgcgaagagggtggaggtggtggaagaggacgggccttctgagaagagccaggacccacctgctctggcaagatccactcctggctcaaacaggtcttccccaggcaacaaagacaaggaggccccctgctccagagagctccagagggacttggctggtgaggaggctttcagggcccccaacacagatgctgcaaggtcaagtgcacagttgagtgatggcaatgtgggatccggagccacgggctcccggcctgaaggcttggctgcagtagacatcggctccgagagaggaagctccagtgccacttcagtctctgctgtccctgctgataggaagagcaacagcacagcagcccaggaggatgcaaaggcagacccaaagggggccttggctgattatgaggggaaggatgtggccaccagggtcggagaggcctggcaggagaggcctggagctccaagaggtggccaaggagacccagctgtacccgctcagcaacctgcagatcccagcaccccagagcggcagagcagccccagcggatctgagcaacttgtcagacgagagagttgtggcagcagcgtgttgactgattttgaggggaaggatgtggccaccaaggtcggagaggcctggcaggacaggcctggagccccaagaggtggccaaggagacccagctgtacccactcagcaacctgcagatcccagtaccccagaacagcagaacagccccagcggatctgagcaattcgtcagacgagagagctgcaccagcagggtgaggagcccctcgagctgcatggtcactgttactgtcactgccacatctgagcagcctcacatttatattccagcccccgcaagtgaattggactccagctctaccaccaaagggattctcttcgtgaaggagtacgtgaatgctagtgaagtgtcttctgggaagccagtatctgcacgctatagcaacgtcagcagcattgaggactcattcgccatggagaagaagcctccatgtggcagcactccatactctgagaggacaactggagggatctgtacttactgcaaccgtgagatccgagactgtccaaagattaccctagaacatcttggtatctgctgccatgaatattgctttaagtgtgggatttgcagtaaaccgatgggcgatctcctggatcagatcttcattcaccgtgacaccattcactgtgggaaatgctatgagaagctcttctagcgaccccccaccgccaggctgatcagaagctgatgactcgtggacaaatttggctgtccccagttttgccccaagttgctgtctccccttccctcacctcctccctccctgtttgatttcttcatgcttttgcccttctcaagttgaagttgcatacatccaatatcgtatcttaatgatgctatgataattgcttgtgtgtgtagcttcttgtagcttagaaagcgctttatgcccatgatgtcatttcaggctcaaccaaagaggatcaaacaggaattccatcttggcttccctaagacagattggctttctaatgagtttaagtgggcagaagtgtagggttcagtgtgtcctgactcccttgaggcttataatgggccaagttgaagactgttgatgatccctggtgggtaaattgcagacatcaaatgctagggattggcataggctagtgtttagcttgtctatttgccatatctattttttttaaatttccatacacttgtaaaagtagttagttgcttttgattgagttatatagcagtttttcatttggtcttccactcacctttcactatatttgagtgttcccttacaggtatgttggcatgtgttggaaaatttacacaattaggtttaaattcagtaggatgtgattttaggatgctactgatcaaagtgatatctgtgtctgttggaatcttgatagctgattaatttgccctcaattctgctccctgaacttcacacataaatcttcccaagtgggttttagggtgtatagatcccagcaggattaaggaggtggaaaagcagctaacatttcttgaggctctaccacatagcaggcactgtcacagagtaatggcattaatccccataataatcctgtgaaggtgatattctcatcccatcttagacatgaggatattggaactcagagaggtggctattgcattgcgcagaacgctacagagcccatgctcttcccagagcagcacccacaaaagcaagcattgattttgtgctcagtgtgtgccaagcactgtgcagagggtacacagttcctgccaggttaacaccctcccttcaggcctcccaaaggcataggcttgcaaagagcagaaggtgtgaaatcacactcttcctctgggcatcctggatccctgaattatccccccccccatgaagtacttcaagggccaagctgcccctttccctcctctccgcccatgaaaatgcctccaaactgagatgctttcagctgagaacagatttgactcacagacattaccaaagaggagcttgtgaatccaggaaaagctccagggggctagctgatctgagcagagagctttcagtgacccattttcctgtctagactctgccttaagctagtggcaactgctggggccccaggtacttgggacatggaaactcgttggatggctgggcagatgtaagcctgtccatgcagtcagccgatcctctgctcaggttcagctggactctgccatctgtgggcccagcatcactctgtaagttccttgaaaggaagaacaaccttagagtatttctgatacaaaatgagggcctctgctcttgatttaattataaaatgtctacgtctttctccagtttctgagccctatgcacattggcttgtgggcttgttcttcctgccaaatgatcagagaggaacattccatttatttgtagtggatttcctctggagggcatgtacccacactaaataccaactgctcttcctcagctgtagtccccaacatcagacttggcacgtggtggacactaacacacaggcactcaatgaatgagtgaaggaaataaaagtcaccccgttggtgagaggtgctatccctgagtctcagtgcaggaccagtggatgaaaggcaaggtaaagaggcccaagataggctggcttcccccgttcaaggtatagtctgcctttaagggagttttagaaccaacatgcaagacattgaaagaaatcttgcaagagccattattgacttagatccaaaacagcctctctcatgtctaaaaaggcacagaattttgcagatctgaggaagagggatgcattacctttttgcttcttttcaattgcttagtgtttctaatcatacttaatccacactaatgtgcgcaattataataaatggtaagatatc

SEQ ID NO: 451659 - DNA, 3891 bp, Homo sapiens
gctacaagatgaccactgaggattacaagaagctgtgagtatgcaacgccaggcaccctacaatatcaggcgcagctctacatcaggggacaccgaggaggaggaggaggaggaggtggtgccattctcctcagatgaacagaaacggaggtcagaggctgcaagcggtgttctgaggaggacagctccccgggagcactcctacgtcctgtcagcggccaagaagagcactggcagtcctacccaggagacacaggcaccgtttatcgcgaagagggtggaggtggtggaagaggacgggccttctgagaagagccaggacccacctgctctggcaagatccactcctggctcaaacagtgcggatggaggcaggaccaaagcgtctcgggcaatttggatcgagtgcctgccaagtatgcctagccccgctgggagccaggagctcagctcaagaggtgaggaaattgtccgcctgcagatcctgacacccagggcaggactccgcctggtggccccagacgtggaaggcatgaggtcttccccaggcaacaaagacaaggaggccccctgctccagagagctccagagggacttggctggtgaggaggctttcagggcccccaacacagatgctgcaaggtcaagtgcacagttgagtgatggcaatgtgggatccggagccacgggctcccggcctgaaggcttggctgcagtagacatcggctccgagagaggaagctccagtgccacttcagtctctgctgtccctgctgataggaagagcaacagcacagcagcccaggaggatgcaaaggcagacccaaagggggccttggctgattatgaggggaaggatgtggccaccagggtcggagaggcctggcaggagaggcctggagctccaagaggtggccaaggagacccagctgtacccgctcagcaacctgcagatcccagcaccccagagcggcagagcagccccagcggatctgagcaacttgtcagacgagagagttgtggcagcagcgtgttgactgattttgaggggaaggatgtggccaccaaggtcggagaggcctggcaggacaggcctggagccccaagaggtggccaaggagacccagctgtacccactcagcaacctgcagatcccagtaccccagaacagcagaacagccccagcggatctgagcaattcgtcagacgagagagctgcaccagcagggtgaggagcccctcgagctgcatggtcactgttactgtcactgccacatctgagcagcctcacatttatattccagcccccgcaagtgaattggactccagctctaccaccaaagggattctcttcgtgaaggagtacgtgaatgctagtgaagtgtcttctgggaagccagtatctgcacgctatagcaacgtcagcagcattgaggactcattcgccatggagaagaagcctccatgtggcagcactccatactctgagaggacaactggagggatctgtacttactgcaaccgtgagatccgagactgtccaaagattaccctagaacatcttggtatctgctgccatgaatattgctttaagtgtgggatttgcagtaaaccgatgggcgatctcctggatcagatcttcattcaccgtgacaccattcactgtgggaaatgctatgagaagctcttctagcgaccccccaccgccaggctgatcagaagctgatgactcgtggacaaatttggctgtccccagttttgccccaagttgctgtctccccttccctcacctcctccctccctgtttgatttcttcatgcttttgcccttctcaagttgaagttgcatacatccaatatcgtatcttaatgatgctatgataattgcttgtgtgtgtagcttcttgtagcttagaaagcgctttatgcccatgatgtcatttcaggctcaaccaaagaggatcaaacaggaattccatcttggcttccctaagacagattggctttctaatgagtttaagtgggcagaagtgtagggttcagtgtgtcctgactcccttgaggcttataatgggccaagttgaagactgttgatgatccctggtgggtaaattgcagacatcaaatgctagggattggcataggctagtgtttagcttgtctatttgccatatctattttttttaaatttccatacacttgtaaaagtagttagttgcttttgattgagttatatagcagtttttcatttggtcttccactcacctttcactatatttgagtgttcccttacaggtatgttggcatgtgttggaaaatttacacaattaggtttaaattcagtaggatgtgattttaggatgctactgatcaaagtgatatctgtgtctgttggaatcttgatagctgattaatttgccctcaattctgctccctgaacttcacacataaatcttcccaagtgggttttagggtgtatagatcccagcaggattaaggaggtggaaaagcagctaacatttcttgaggctctaccacatagcaggcactgtcacagagtaatggcattaatccccataataatcctgtgaaggtgatattctcatcccatcttagacatgaggatattggaactcagagaggtggctattgcattgcgcagaacgctacagagcccatgctcttcccagagcagcacccacaaaagcaagcattgattttgtgctcagtgtgtgccaagcactgtgcagagggtacacagttcctgccaggttaacaccctcccttcaggcctcccaaaggcataggcttgcaaagagcagaaggtgtgaaatcacactcttcctctgggcatcctggatccctgaattatccccccccccatgaagtacttcaagggccaagctgcccctttccctcctctccgcccatgaaaatgcctccaaactgagatgctttcagctgagaacagatttgactcacagacattaccaaagaggagcttgtgaatccaggaaaagctccagggggctagctgatctgagcagagagctttcagtgacccattttcctgtctagactctgccttaagctagtggcaactgctggggccccaggtacttgggacatggaaactcgttggatggctgggcagatgtaagcctgtccatgcagtcagccgatcctctgctcaggttcagctggactctgccatctgtgggcccagcatcactctgtaagttccttgaaaggaagaacaaccttagagtatttctgatacaaaatgagggcctctgctcttgatttaattataaaatgtctacgtctttctccagtttctgagccctatgcacattggcttgtgggcttgttcttcctgccaaatgatcagagaggaacattccatttatttgtagtggatttcctctggagggcatgtacccacactaaataccaactgctcttcctcagctgtagtccccaacatcagacttggcacgtggtggacactaacacacaggcactcaatgaatgagtgaaggaaataaaagtcaccccgttggtgagaggtgctatccctgagtctcagtgcaggaccagtggatgaaaggcaaggtaaagaggcccaagataggctggcttcccccgttcaaggtatagtctgcctttaagggagttttagaaccaacatgcaagacattgaaagaaatcttgcaagagccattattgacttagatccaaaacagcctctctcatgtctaaaaaggcacagaattttgcagatctgaggaagagggatgcattacctttttgcttcttttcaattgcttagtgtttctaatcatacttaatccacactaatgtgcgcaattataataaatggtaagatatc

SEQ ID NO: 451660 - DNA, 3801 bp, Homo sapiens
gctacaagatgaccactgaggattacaagaagctgtgagtatgcaacgccaggcaccctacaatatcaggcgcagctctacatcaggggacaccgaggaggaggaggaggaggaggtggtgccattctcctcagatgaacagaaacggaggtcagaggctgcaagcggtgttctgaggaggacagctccccgggagcactcctacgtcctgtcagcggccaagaagagcactggcagtcctacccaggagacacaggcaccgtttatcgcgaagagggtggaggtggtggaagaggacgggccttctgagaagagccaggacccacctgctctggcaagatccactcctggctcaaacagctcaagaggtgaggaaattgtccgcctgcagatcctgacacccagggcaggactccgcctggtggccccagacgtggaaggcatgaggtcttccccaggcaacaaagacaaggaggccccctgctccagagagctccagagggacttggctggtgaggaggctttcagggcccccaacacagatgctgcaaggtcaagtgcacagttgagtgatggcaatgtgggatccggagccacgggctcccggcctgaaggcttggctgcagtagacatcggctccgagagaggaagctccagtgccacttcagtctctgctgtccctgctgataggaagagcaacagcacagcagcccaggaggatgcaaaggcagacccaaagggggccttggctgattatgaggggaaggatgtggccaccagggtcggagaggcctggcaggagaggcctggagctccaagaggtggccaaggagacccagctgtacccgctcagcaacctgcagatcccagcaccccagagcggcagagcagccccagcggatctgagcaacttgtcagacgagagagttgtggcagcagcgtgttgactgattttgaggggaaggatgtggccaccaaggtcggagaggcctggcaggacaggcctggagccccaagaggtggccaaggagacccagctgtacccactcagcaacctgcagatcccagtaccccagaacagcagaacagccccagcggatctgagcaattcgtcagacgagagagctgcaccagcagggtgaggagcccctcgagctgcatggtcactgttactgtcactgccacatctgagcagcctcacatttatattccagcccccgcaagtgaattggactccagctctaccaccaaagggattctcttcgtgaaggagtacgtgaatgctagtgaagtgtcttctgggaagccagtatctgcacgctatagcaacgtcagcagcattgaggactcattcgccatggagaagaagcctccatgtggcagcactccatactctgagaggacaactggagggatctgtacttactgcaaccgtgagatccgagactgtccaaagattaccctagaacatcttggtatctgctgccatgaatattgctttaagtgtgggatttgcagtaaaccgatgggcgatctcctggatcagatcttcattcaccgtgacaccattcactgtgggaaatgctatgagaagctcttctagcgaccccccaccgccaggctgatcagaagctgatgactcgtggacaaatttggctgtccccagttttgccccaagttgctgtctccccttccctcacctcctccctccctgtttgatttcttcatgcttttgcccttctcaagttgaagttgcatacatccaatatcgtatcttaatgatgctatgataattgcttgtgtgtgtagcttcttgtagcttagaaagcgctttatgcccatgatgtcatttcaggctcaaccaaagaggatcaaacaggaattccatcttggcttccctaagacagattggctttctaatgagtttaagtgggcagaagtgtagggttcagtgtgtcctgactcccttgaggcttataatgggccaagttgaagactgttgatgatccctggtgggtaaattgcagacatcaaatgctagggattggcataggctagtgtttagcttgtctatttgccatatctattttttttaaatttccatacacttgtaaaagtagttagttgcttttgattgagttatatagcagtttttcatttggtcttccactcacctttcactatatttgagtgttcccttacaggtatgttggcatgtgttggaaaatttacacaattaggtttaaattcagtaggatgtgattttaggatgctactgatcaaagtgatatctgtgtctgttggaatcttgatagctgattaatttgccctcaattctgctccctgaacttcacacataaatcttcccaagtgggttttagggtgtatagatcccagcaggattaaggaggtggaaaagcagctaacatttcttgaggctctaccacatagcaggcactgtcacagagtaatggcattaatccccataataatcctgtgaaggtgatattctcatcccatcttagacatgaggatattggaactcagagaggtggctattgcattgcgcagaacgctacagagcccatgctcttcccagagcagcacccacaaaagcaagcattgattttgtgctcagtgtgtgccaagcactgtgcagagggtacacagttcctgccaggttaacaccctcccttcaggcctcccaaaggcataggcttgcaaagagcagaaggtgtgaaatcacactcttcctctgggcatcctggatccctgaattatccccccccccatgaagtacttcaagggccaagctgcccctttccctcctctccgcccatgaaaatgcctccaaactgagatgctttcagctgagaacagatttgactcacagacattaccaaagaggagcttgtgaatccaggaaaagctccagggggctagctgatctgagcagagagctttcagtgacccattttcctgtctagactctgccttaagctagtggcaactgctggggccccaggtacttgggacatggaaactcgttggatggctgggcagatgtaagcctgtccatgcagtcagccgatcctctgctcaggttcagctggactctgccatctgtgggcccagcatcactctgtaagttccttgaaaggaagaacaaccttagagtatttctgatacaaaatgagggcctctgctcttgatttaattataaaatgtctacgtctttctccagtttctgagccctatgcacattggcttgtgggcttgttcttcctgccaaatgatcagagaggaacattccatttatttgtagtggatttcctctggagggcatgtacccacactaaataccaactgctcttcctcagctgtagtccccaacatcagacttggcacgtggtggacactaacacacaggcactcaatgaatgagtgaaggaaataaaagtcaccccgttggtgagaggtgctatccctgagtctcagtgcaggaccagtggatgaaaggcaaggtaaagaggcccaagataggctggcttcccccgttcaaggtatagtctgcctttaagggagttttagaaccaacatgcaagacattgaaagaaatcttgcaagagccattattgacttagatccaaaacagcctctctcatgtctaaaaaggcacagaattttgcagatctgaggaagagggatgcattacctttttgcttcttttcaattgcttagtgtttctaatcatacttaatccacactaatgtgcgcaattataataaatggtaagatatc

SEQ ID NO: 451661 - DNA, 3507 bp, Homo sapiens
gctacaagatgaccactgaggattacaagaagctgtgagtatgcaacgccaggcaccctacaatatcaggcgcagctctacatcaggggacaccgaggaggaggaggaggaggaggtggtgccattctcctcagatgaacagaaacggaggtcagaggctgcaagcggtgttctgaggaggacagctccccgggagcactcctacgtcctgtcagcggccaagaagagcactggcagtcctacccaggagacacaggcaccgtttatcgcgaagagggtggaggtggtggaagaggacgggccttctgagaagagccaggacccacctgctctggcaagatccactcctggctcaaacagtgcggatggaggcaggaccaaagcgtctcgggcaatttggatcgagtgcctgccaagtatgcctagccccgctgggagccaggagctcaggtcttccccaggcaacaaagacaaggaggccccctgctccagagagctccagagggacttggctggtgaggaggctttcagggcccccaacacagatgctgcaagctccagtgccacttcagtctctgctgtccctgctgataggaagagcaacagcacagcagcccaggaggatgcaaaggcagacccaaagggcgtgttgactgattttgaggggaaggatgtggccaccaaggtcggagaggcctggcaggacaggcctggagccccaagaggtggccaaggagacccagctgtacccactcagcaacctgcagatcccagtaccccagaacagcagaacagccccagcggatctgagcaattcgtcagacgagagagctgcaccagcagggtgaggagcccctcgagctgcatggtcactgttactgtcactgccacatctgagcagcctcacatttatattccagcccccgcaagtgaattggactccagctctaccaccaaagggattctcttcgtgaaggagtacgtgaatgctagtgaagtgtcttctgggaagccagtatctgcacgctatagcaacgtcagcagcattgaggactcattcgccatggagaagaagcctccatgtggcagcactccatactctgagaggacaactggagggatctgtacttactgcaaccgtgagatccgagactgtccaaagattaccctagaacatcttggtatctgctgccatgaatattgctttaagtgtgggatttgcagtaaaccgatgggcgatctcctggatcagatcttcattcaccgtgacaccattcactgtgggaaatgctatgagaagctcttctagcgaccccccaccgccaggctgatcagaagctgatgactcgtggacaaatttggctgtccccagttttgccccaagttgctgtctccccttccctcacctcctccctccctgtttgatttcttcatgcttttgcccttctcaagttgaagttgcatacatccaatatcgtatcttaatgatgctatgataattgcttgtgtgtgtagcttcttgtagcttagaaagcgctttatgcccatgatgtcatttcaggctcaaccaaagaggatcaaacaggaattccatcttggcttccctaagacagattggctttctaatgagtttaagtgggcagaagtgtagggttcagtgtgtcctgactcccttgaggcttataatgggccaagttgaagactgttgatgatccctggtgggtaaattgcagacatcaaatgctagggattggcataggctagtgtttagcttgtctatttgccatatctattttttttaaatttccatacacttgtaaaagtagttagttgcttttgattgagttatatagcagtttttcatttggtcttccactcacctttcactatatttgagtgttcccttacaggtatgttggcatgtgttggaaaatttacacaattaggtttaaattcagtaggatgtgattttaggatgctactgatcaaagtgatatctgtgtctgttggaatcttgatagctgattaatttgccctcaattctgctccctgaacttcacacataaatcttcccaagtgggttttagggtgtatagatcccagcaggattaaggaggtggaaaagcagctaacatttcttgaggctctaccacatagcaggcactgtcacagagtaatggcattaatccccataataatcctgtgaaggtgatattctcatcccatcttagacatgaggatattggaactcagagaggtggctattgcattgcgcagaacgctacagagcccatgctcttcccagagcagcacccacaaaagcaagcattgattttgtgctcagtgtgtgccaagcactgtgcagagggtacacagttcctgccaggttaacaccctcccttcaggcctcccaaaggcataggcttgcaaagagcagaaggtgtgaaatcacactcttcctctgggcatcctggatccctgaattatccccccccccatgaagtacttcaagggccaagctgcccctttccctcctctccgcccatgaaaatgcctccaaactgagatgctttcagctgagaacagatttgactcacagacattaccaaagaggagcttgtgaatccaggaaaagctccagggggctagctgatctgagcagagagctttcagtgacccattttcctgtctagactctgccttaagctagtggcaactgctggggccccaggtacttgggacatggaaactcgttggatggctgggcagatgtaagcctgtccatgcagtcagccgatcctctgctcaggttcagctggactctgccatctgtgggcccagcatcactctgtaagttccttgaaaggaagaacaaccttagagtatttctgatacaaaatgagggcctctgctcttgatttaattataaaatgtctacgtctttctccagtttctgagccctatgcacattggcttgtgggcttgttcttcctgccaaatgatcagagaggaacattccatttatttgtagtggatttcctctggagggcatgtacccacactaaataccaactgctcttcctcagctgtagtccccaacatcagacttggcacgtggtggacactaacacacaggcactcaatgaatgagtgaaggaaataaaagtcaccccgttggtgagaggtgctatccctgagtctcagtgcaggaccagtggatgaaaggcaaggtaaagaggcccaagataggctggcttcccccgttcaaggtatagtctgcctttaagggagttttagaaccaacatgcaagacattgaaagaaatcttgcaagagccattattgacttagatccaaaacagcctctctcatgtctaaaaaggcacagaattttgcagatctgaggaagagggatgcattacctttttgcttcttttcaattgcttagtgtttctaatcatacttaatccacactaatgtgcgcaattataataaatggtaagatatc

SEQ ID NO: 451662 - DNA, 3666 bp, Homo sapiens
gctacaagatgaccactgaggattacaagaagctgtgagtatgcaacgccaggcaccctacaatatcaggcgcagctctacatcaggggacaccgaggaggaggaggaggaggaggtggtgccattctcctcagatgaacagaaacggaggtcagaggctgcaagcggtgttctgaggaggacagctccccgggagcactcctacgtcctgtcagcggccaagaagagcactggcagtcctacccaggagacacaggcaccgtttatcgcgaagagggtggaggtggtggaagaggacgggccttctgagaagagccaggacccacctgctctggcaagatccactcctggctcaaacaggtcttccccaggcaacaaagacaaggaggccccctgctccagagagctccagagggacttggctggtgaggaggctttcagggcccccaacacagatgctgcaaggtcaagtgcacagttgagtgatggcaatgtgggatccggagccacgggctcccggcctgaaggcttggctgcagtagacatcggctccgagagaggaagctccagtgccacttcagtctctgctgtccctgctgataggaagagcaacagcacagcagcccaggaggatgcaaaggcagacccaaagggggccttggctgattatgaggggaaggatgtggccaccagggtcggagaggcctggcaggagaggcctggagctccaagaggtggccaaggagacccagctgtacccgctcagcaacctgcagatcccagcaccccagagcggcagagcagccccagcggatctgagcaacttgtcagacgagagagttgtggcagcagcgtgttgactgattttgaggggaaggatgtggccaccaaggtcggagaggcctggcaggacaggcctggagccccaagaggtggccaaggagacccagctgtacccactcagcaacctgcagatcccagtaccccagaacagcagaacagccccagcggatctgagcaattcgtcagacgagagagctgcaccagcagggtgaggagcccctcgagctgcatggtcactgttactgtcactgccacatctgagcagcctcacatttatattccagcccccgcaagtgaattggactccagctctaccaccaaagggattctcttcgtgaaggagtacgtgaatgctagtgaagtgtcttctgggaagccagtatctgcacgctatagcaacgtcagcagcattgaggactcattcgccatggagaagaagcctccatgtggcagcactccatactctgagaggacaactggagggatctgtacttactgcaaccgtgagatccgagactgtccaaagattaccctagaacatcttggtatctgctgccatgaatattgctttaagtgtgggatttgcagtaaaccgatgggcgatctcctggatcagatcttcattcaccgtgacaccattcactgtgggaaatgctatgagaagctcttctagcgaccccccaccgccaggctgatcagaagctgatgactcgtggacaaatttggctgtccccagttttgccccaagttgctgtctccccttccctcacctcctccctccctgtttgatttcttcatgcttttgcccttctcaagttgaagttgcatacatccaatatcgtatcttaatgatgctatgataattgcttgtgtgtgtagcttcttgtagcttagaaagcgctttatgcccatgatgtcatttcaggctcaaccaaagaggatcaaacaggaattccatcttggcttccctaagacagattggctttctaatgagtttaagtgggcagaagtgtagggttcagtgtgtcctgactcccttgaggcttataatgggccaagttgaagactgttgatgatccctggtgggtaaattgcagacatcaaatgctagggattggcataggctagtgtttagcttgtctatttgccatatctattttttttaaatttccatacacttgtaaaagtagttagttgcttttgattgagttatatagcagtttttcatttggtcttccactcacctttcactatatttgagtgttcccttacaggtatgttggcatgtgttggaaaatttacacaattaggtttaaattcagtaggatgtgattttaggatgctactgatcaaagtgatatctgtgtctgttggaatcttgatagctgattaatttgccctcaattctgctccctgaacttcacacataaatcttcccaagtgggttttagggtgtatagatcccagcaggattaaggaggtggaaaagcagctaacatttcttgaggctctaccacatagcaggcactgtcacagagtaatggcattaatccccataataatcctgtgaaggtgatattctcatcccatcttagacatgaggatattggaactcagagaggtggctattgcattgcgcagaacgctacagagcccatgctcttcccagagcagcacccacaaaagcaagcattgattttgtgctcagtgtgtgccaagcactgtgcagagggtacacagttcctgccaggttaacaccctcccttcaggcctcccaaaggcataggcttgcaaagagcagaaggtgtgaaatcacactcttcctctgggcatcctggatccctgaattatccccccccccatgaagtacttcaagggccaagctgcccctttccctcctctccgcccatgaaaatgcctccaaactgagatgctttcagctgagaacagatttgactcacagacattaccaaagaggagcttgtgaatccaggaaaagctccagggggctagctgatctgagcagagagctttcagtgacccattttcctgtctagactctgccttaagctagtggcaactgctggggccccaggtacttgggacatggaaactcgttggatggctgggcagatgtaagcctgtccatgcagtcagccgatcctctgctcaggttcagctggactctgccatctgtgggcccagcatcactctgtaagttccttgaaaggaagaacaaccttagagtatttctgatacaaaatgagggcctctgctcttgatttaattataaaatgtctacgtctttctccaaatgatcagagaggaacattccatttatttgtagtggatttcctctggagggcatgtacccacactaaataccaactgctcttcctcagctgtagtccccaacatcagacttggcacgtggtggacactaacacacaggcactcaatgaatgagtgaaggaaataaaagtcaccccgttggtgagaggtgctatccctgagtctcagtgcaggaccagtggatgaaaggcaaggtaaagaggcccaagataggctggcttcccccgttcaaggtatagtctgcctttaagggagttttagaaccaacatgcaagacattgaaagaaatcttgcaagagccattattgacttagatccaaaacagcctctctcatgtctaaaaaggcacagaattttgcagatctgaggaagagggatgcattacctttttgcttcttttcaattgcttagtgtttctaatcatacttaatccacactaatgtgcgcaattataataaatggtaagatatc

SEQ ID NO: 451663 - DNA, 3875 bp, Homo sapiens
gctacaagatgaccactgaggattacaagaagctgtgagtatgcaacgccaggcaccctacaatatcaggcgcagctctacatcaggggacaccgaggaggaggaggaggaggaggtggtgccattctcctcagatgaacagaaacggaggtcagaggctgcaagcggtgttctgaggaggacagctccccgggagcactcctacgtcctgtcagcggccaagaagagcactggcagtcctacccaggagacacaggcaccgtttatcgcgaagagggtggaggtggtggaagaggacgggccttctgagaagagccaggacccacctgctctggcaagatccactcctggctcaaacaggtcttccccaggcaacaaagacaaggaggccccctgctccagagagctccagagggacttggctggtgaggaggctttcagggcccccaacacagatgctgcaaggtcaagtgcacagttgagtgatggcaatgtgggatccggagccacgggctcccggcctgaaggcttggctgcagtagacatcggctccgagagaggaagctccagtgccacttcagtctctgctgtccctgctgataggaagagcaacagcacagcagcccaggaggatgcaaaggcagacccaaagggggccttggctgattatgaggggaaggatgtggccaccagggtcggagaggcctggcaggagaggcctggagctccaagaggtggccaaggagacccagctgtacccgctcagcaacctgcagatcccagcaccccagagcggcagagcagccccagcggatctgagcaacttgtcagacgagagagttgtggcagcagcgtgttgactgattttgaggggaaggatgtggccaccaaggtcggagaggcctggcaggacaggcctggagccccaagaggtggccaaggagacccagctgtacccactcagcaacctgcagatcccagtaccccagaacagcagaacagccccagcggatctgagcaattcgtcagacgagagagctgcaccagcagggtgaggagcccctcgagctgcatggtcactgttactgtcactgccacatctgagcagcctcacatttatattccagcccccgcaagtgaattggactccagctctaccaccaaagggattctcttcgtgaaggagtacgtgaatgctagtgaagtgtcttctgggaagccagtatctgcacgctatagcaacgtcagcagcattgaggactcattcgccatggagaagaagcctccatgtggcagcactccatactctgagaggacaactggagggatctgtacttactgcaaccgtgagatccgagactgtccaaagattaccctagaacatcttggtatctgctgccatgaatattgctttaagtgtgggatttgcagtaaaccgatgggcgatctcctggatcagatcttcattcaccgtgacaccattcactgtgggaaatgctatgagaagctcttctagcgaccccccaccgccaggctgatcagaagctgatgactcgtggacaaatttggctgtccccagttttgccccaagttgctgtctccccttccctcacctcctccctccctgtttgatttcttcatgcttttgcccttctcaagttgaagttgcatacatccaatatcgtatcttaatgatgctatgataattgcttgtgtgtgtagcttcttgtagcttagaaagcgctttatgcccatgatgtcatttcaggctcaaccaaagaggatcaaacaggaattccatcttggcttccctaagacagattggctttctaatgagtttaagtgggcagaagtgtagggttcagtgtgtcctgactcccttgaggcttataatgggccaagttgaagactgttgatgatccctggtgggtaaattgcagacatcaaatgctagggattggcataggctagtgtttagcttgtctatttgccatatctattttttttaaatttccatacacttgtaaaagtagttagttgcttttgattgagttatatagcagtttttcatttggtcttccactcacctttcactatatttgagtgttcccttacaggtatgttggcatgtgttggaaaatttacacaattaggtttaaattcagtaggatgtgattttaggatgctactgatcaaagtgatatctgtgtctgttggaatcttgatagctgattaatttgccctcaattctgctccctgaacttcacacataaatcttcccaagtgggttttagggtgtatagatcccagcaggattaaggaggtggaaaagcagctaacatttcttgaggctctaccacatagcaggcactgtcacagagtaatggcattaatccccataataatcctgtgaaggtgatattctcatcccatcttagacatgaggatattggaactcagagaggtggctattgcattgcgcagaacgctacagagcccatgctcttcccagagcagcacccacaaaagcaagcattgattttgtgctcagtgtgtgccaagcactgtgcagagggtacacagttcctgccaggttaacaccctcccttcaggcctcccaaaggcataggcttgcaaagagcagaaggtgtgaaatcacactcttcctctgggcatcctggatccctgaattatccccccccccatgaagtacttcaagggccaagctgcccctttccctcctctccgcccatgaaaatgcctccaaactgagatgctttcagctgagaacagatttgactcacagacattaccaaagaggagcttgtgaatccaggaaaagctccagggggctagctgatctgagcagagagctttcagtgacccattttcctgtctagactctgccttaagctagtggcaactgctggggccccaggtacttgggacatggaaactcgttggatggctgggcagatgtaagcctgtccatgcagtcagccgatcctctgctcaggttcagctggactctgccatctgtgggcccagcatcactctgtaagttccttgaaaggaagaacaaccttagagtatttctgatacaaaatgagggcctctgctcttgatttaattataaaatgtctacgtctttctccagtttctgagccctatgcacattggcttgtgggcttgttcttcctgccaaatgatcagagaggaacattccatttatttgtagtggatttcctctggagggcatgtacccacactaaataccaactgctcttcctcagctgtagtccccaacatcagacttggcacgtggtggacactaacacacaggcactcaatgaatgagtgaaggaaataaaagtcaccccgttggtgagaggtgctatccctgagtctcagtgcaggaccagtggatgaaaggcaaggtaaagaggcccaagataggctggcttcccccgttcaaggtatagtctgcctttaagggagttttagaaccaacatgcaagacattgaaagaaatcttgcaagagccattattgacttagatccaaaacagcctctctcatgtctaaaaaggcacagaattttgcagatctgaggaagagggatgcattacctttttgcttcttttcaattgcttagtgtttctaatcatacttaatccacactaatgtgcgcaattataataaatggtaagatatccaaccaaacaccccacaatcacaaaaaagggggggggcggcaaaaatttcccccggagggccccatttccgcccccctttttttgacaaaggggccccaaagggggggtaaaaaaaggagggcgcggttaaaaccgtcggccgggcaaaacgccccgggct

SEQ ID NO: 451664 - DNA, 3615 bp, Homo sapiens
gctacaagatgaccactgaggattacaagaagctgtgagtatgcaacgccaggcaccctacaatatcaggcgcagctctacatcaggggacaccgaggaggaggaggaggaggaggtggtgccattctcctcagatgaacagaaacggaggtcagaggctgcaagcggtgttctgaggaggacagctccccgggagcactcctacgtcctgtcagcggccaagaagagcactggcagtcctacccaggagacacaggcaccgtttatcgcgaagagggtggaggtggtggaagaggacgggccttctgagaagagccaggacccacctgctctggcaagatccactcctggctcaaacaggtcttccccaggcaacaaagacaaggaggccccctgctccagagagctccagagggacttggctggtgaggaggctttcagggcccccaacacagatgctgcaagctccagtgccacttcagtctctgctgtccctgctgataggaagagcaacagcacagcagcccaggaggatgcaaaggcagacccaaagggggccttggctgattatgaggggaaggatgtggccaccagggtcggagaggcctggcaggagaggcctggagctccaagaggtggccaaggagacccagctgtacccgctcagcaacctgcagatcccagcaccccagagcggcagagcagccccagcggatctgagcaacttgtcagacgagagagttgtggcagcagcgtgttgactgattttgaggggaaggatgtggccaccaaggtcggagaggcctggcaggacaggcctggagccccaagaggtggccaaggagacccagctgtacccactcagcaacctgcagatcccagtaccccagaacagcagaacagccccagcggatctgagcaattcgtcagacgagagagctgcaccagcagggtgaggagcccctcgagctgcatggtcactgttactgtcactgccacatctgagcagcctcacatttatattccagcccccgcaagtgaattggactccagctctaccaccaaagggattctcttcgtgaaggagtacgtgaatgctagtgaagtgtcttctgggaagccagtatctgcacgctatagcaacgtcagcagcattgaggactcattcgccatggagaagaagcctccatgtggcagcactccatactctgagaggacaactggagggatctgtacttactgcaaccgtgagatccgagactgtccaaagattaccctagaacatcttggtatctgctgccatgaatattgctttaagtgtgggatttgcagtaaaccgatgggcgatctcctggatcagatcttcattcaccgtgacaccattcactgtgggaaatgctatgagaagctcttctagcgaccccccaccgccaggctgatcagaagctgatgactcgtggacaaatttggctgtccccagttttgccccaagttgctgtctccccttccctcacctcctccctccctgtttgatttcttcatgcttttgcccttctcaagttgaagttgcatacatccaatatcgtatcttaatgatgctatgataattgcttgtgtgtgtagcttcttgtagcttagaaagcgctttatgcccatgatgtcatttcaggctcaaccaaagaggatcaaacaggaattccatcttggcttccctaagacagattggctttctaatgagtttaagtgggcagaagtgtagggttcagtgtgtcctgactcccttgaggcttataatgggccaagttgaagactgttgatgatccctggtgggtaaattgcagacatcaaatgctagggattggcataggctagtgtttagcttgtctatttgccatatctattttttttaaatttccatacacttgtaaaagtagttagttgcttttgattgagttatatagcagtttttcatttggtcttccactcacctttcactatatttgagtgttcccttacaggtatgttggcatgtgttggaaaatttacacaattaggtttaaattcagtaggatgtgattttaggatgctactgatcaaagtgatatctgtgtctgttggaatcttgatagctgattaatttgccctcaattctgctccctgaacttcacacataaatcttcccaagtgggttttagggtgtatagatcccagcaggattaaggaggtggaaaagcagctaacatttcttgaggctctaccacatagcaggcactgtcacagagtaatggcattaatccccataataatcctgtgaaggtgatattctcatcccatcttagacatgaggatattggaactcagagaggtggctattgcattgcgcagaacgctacagagcccatgctcttcccagagcagcacccacaaaagcaagcattgattttgtgctcagtgtgtgccaagcactgtgcagagggtacacagttcctgccaggttaacaccctcccttcaggcctcccaaaggcataggcttgcaaagagcagaaggtgtgaaatcacactcttcctctgggcatcctggatccctgaattatccccccccccatgaagtacttcaagggccaagctgcccctttccctcctctccgcccatgaaaatgcctccaaactgagatgctttcagctgagaacagatttgactcacagacattaccaaagaggagcttgtgaatccaggaaaagctccagggggctagctgatctgagcagagagctttcagtgacccattttcctgtctagactctgccttaagctagtggcaactgctggggccccaggtacttgggacatggaaactcgttggatggctgggcagatgtaagcctgtccatgcagtcagccgatcctctgctcaggttcagctggactctgccatctgtgggcccagcatcactctgtaagttccttgaaaggaagaacaaccttagagtatttctgatacaaaatgagggcctctgctcttgatttaattataaaatgtctacgtctttctccagtttctgagccctatgcacattggcttgtgggcttgttcttcctgccaaatgatcagagaggaacattccatttatttgtagtggatttcctctggagggcatgtacccacactaaataccaactgctcttcctcagctgtagtccccaacatcagacttggcacgtggtggacactaacacacaggcactcaatgaatgagtgaaggaaataaaagtcaccccgttggtgagaggtgctatccctgagtctcagtgcaggaccagtggatgaaaggcaaggtaaagaggcccaagataggctggcttcccccgttcaaggtatagtctgcctttaagggagttttagaaccaacatgcaagacattgaaagaaatcttgcaagagccattattgacttagatccaaaacagcctctctcatgtctaaaaaggcacagaattttgcagatctgaggaagagggatgcattacctttttgcttcttttcaattgcttagtgtttctaatcatacttaatccacactaatgtgcgcaattataataaatggtaagatatc

SEQ ID NO: 451665 - DNA, 3897 bp, Homo sapiens
gctacaagatgaccactgaggattacaagaagctgtgagtatgcaacgccaggcaccctacaatatcaggcgcagctctacatcaggggacaccgaggaggaggaggaggaggaggtggtgccattctcctcagatgaacagaaacggaggtcagaggctgcaagcggtgttctgaggaggacagctccccgggagcactcctacgtcctgtcagcggccaagaagagcactggcagtcctacccaggagacacaggcaccgtttatcgcgaagagggtggaggtggtggaagaggacgggccttctgagaagagccaggacccacctgctctggcaagatccactcctggctcaaacagctcaagaggtgaggaaattgtccgcctgcagatcctgacacccagggcaggactccgcctggtggccccagacgtggaaggcatgaggtcttccccaggcaacaaagacaaggaggccccctgctccagagagctccagagggacttggctggtgaggaggctttcagggcccccaacacagatgctgcaaggtcaagtgcacagttgagtgatggcaatgtgggatccggagccacgggctcccggcctgaaggcttggctgcagtagacatcggctccgagagaggaaggctgtgtgcagctgctagctttgcctctttcctggaagaccaggatgggcacagtgccaactctcagtcctgcaagcctagaccagcagccatcagctccagtgccacttcagtctctgctgtccctgctgataggaagagcaacagcacagcagcccaggaggatgcaaaggcagacccaaagggggccttggctgattatgaggggaaggatgtggccaccagggtcggagaggcctggcaggagaggcctggagctccaagaggtggccaaggagacccagctgtacccgctcagcaacctgcagatcccagcaccccagagcggcagagcagccccagcggatctgagcaacttgtcagacgagagagttgtggcagcagcgtgttgactgattttgaggggaaggatgtggccaccaaggtcggagaggcctggcaggacaggcctggagccccaagaggtggccaaggagacccagctgtacccactcagcaacctgcagatcccagtaccccagaacagcagaacagccccagcggatctgagcaattcgtcagacgagagagctgcaccagcagggtgaggagcccctcgagctgcatggtcactgttactgtcactgccacatctgagcagcctcacatttatattccagcccccgcaagtgaattggactccagctctaccaccaaagggattctcttcgtgaaggagtacgtgaatgctagtgaagtgtcttctgggaagccagtatctgcacgctatagcaacgtcagcagcattgaggactcattcgccatggagaagaagcctccatgtggcagcactccatactctgagaggacaactggagggatctgtacttactgcaaccgtgagatccgagactgtccaaagattaccctagaacatcttggtatctgctgccatgaatattgctttaagtgtgggatttgcagtaaaccgatgggcgatctcctggatcagatcttcattcaccgtgacaccattcactgtgggaaatgctatgagaagctcttctagcgaccccccaccgccaggctgatcagaagctgatgactcgtggacaaatttggctgtccccagttttgccccaagttgctgtctccccttccctcacctcctccctccctgtttgatttcttcatgcttttgcccttctcaagttgaagttgcatacatccaatatcgtatcttaatgatgctatgataattgcttgtgtgtgtagcttcttgtagcttagaaagcgctttatgcccatgatgtcatttcaggctcaaccaaagaggatcaaacaggaattccatcttggcttccctaagacagattggctttctaatgagtttaagtgggcagaagtgtagggttcagtgtgtcctgactcccttgaggcttataatgggccaagttgaagactgttgatgatccctggtgggtaaattgcagacatcaaatgctagggattggcataggctagtgtttagcttgtctatttgccatatctattttttttaaatttccatacacttgtaaaagtagttagttgcttttgattgagttatatagcagtttttcatttggtcttccactcacctttcactatatttgagtgttcccttacaggtatgttggcatgtgttggaaaatttacacaattaggtttaaattcagtaggatgtgattttaggatgctactgatcaaagtgatatctgtgtctgttggaatcttgatagctgattaatttgccctcaattctgctccctgaacttcacacataaatcttcccaagtgggttttagggtgtatagatcccagcaggattaaggaggtggaaaagcagctaacatttcttgaggctctaccacatagcaggcactgtcacagagtaatggcattaatccccataataatcctgtgaaggtgatattctcatcccatcttagacatgaggatattggaactcagagaggtggctattgcattgcgcagaacgctacagagcccatgctcttcccagagcagcacccacaaaagcaagcattgattttgtgctcagtgtgtgccaagcactgtgcagagggtacacagttcctgccaggttaacaccctcccttcaggcctcccaaaggcataggcttgcaaagagcagaaggtgtgaaatcacactcttcctctgggcatcctggatccctgaattatccccccccccatgaagtacttcaagggccaagctgcccctttccctcctctccgcccatgaaaatgcctccaaactgagatgctttcagctgagaacagatttgactcacagacattaccaaagaggagcttgtgaatccaggaaaagctccagggggctagctgatctgagcagagagctttcagtgacccattttcctgtctagactctgccttaagctagtggcaactgctggggccccaggtacttgggacatggaaactcgttggatggctgggcagatgtaagcctgtccatgcagtcagccgatcctctgctcaggttcagctggactctgccatctgtgggcccagcatcactctgtaagttccttgaaaggaagaacaaccttagagtatttctgatacaaaatgagggcctctgctcttgatttaattataaaatgtctacgtctttctccagtttctgagccctatgcacattggcttgtgggcttgttcttcctgccaaatgatcagagaggaacattccatttatttgtagtggatttcctctggagggcatgtacccacactaaataccaactgctcttcctcagctgtagtccccaacatcagacttggcacgtggtggacactaacacacaggcactcaatgaatgagtgaaggaaataaaagtcaccccgttggtgagaggtgctatccctgagtctcagtgcaggaccagtggatgaaaggcaaggtaaagaggcccaagataggctggcttcccccgttcaaggtatagtctgcctttaagggagttttagaaccaacatgcaagacattgaaagaaatcttgcaagagccattattgacttagatccaaaacagcctctctcatgtctaaaaaggcacagaattttgcagatctgaggaagagggatgcattacctttttgcttcttttcaattgcttagtgtttctaatcatacttaatccacactaatgtgcgcaattataataaatggtaagatatc

SEQ ID NO: 451666 - DNA, 3169 bp, Homo sapiens
acgagctcggcctcggcggggattctcttgaggccatgcccgtgccggccgccagaggtcgcccgaggatcacgaatgggcccgaggagctggctgccccttcccccgcggccttggctgattatgaggggaaggatgtggccaccagggtcggagaggcctggcaggagaggcctggagctccaagaggtggccaaggagacccagctgtacccgctcagcaacctgcagatcccagcaccccagagcggcagagcagccccagcggatctgagcaacttgtcagacgagagagttgtggcagcagcgtgttgactgattttgaggggaaggatgtggccaccaaggtcggagaggcctggcaggacaggcctggagccccaagaggtggccaaggagacccagctgtacccactcagcaacctgcagatcccagtaccccagaacagcagaacagccccagcggatctgagcaattcgtcagacgagagagctgcaccagcagggtgaggagcccctcgagctgcatggtcactgttactgtcactgccacatctgagcagcctcacatttatattccagcccccgcaagtgaattggactccagctctaccaccaaagggattctcttcgtgaaggagtacgtgaatgctagtgaagtgtcttctgggaagccagtatctgcacgctatagcaacgtcagcagcattgaggactcattcgccatggagaagaagcctccatgtggcagcactccatactctgagaggacaactggagggatctgtacttactgcaaccgtgagatccgagactgtccaaagattaccctagaacatcttggtatctgctgccatgaatattgctttaagtgtgggatttgcagtaaaccgatgggcgatctcctggatcagatcttcattcaccgtgacaccattcactgtgggaaatgctatgagaagctcttctagcgaccccccaccgccaggctgatcagaagctgatgactcgtggacaaatttggctgtccccagttttgccccaagttgctgtctccccttccctcacctcctccctccctgtttgatttcttcatgcttttgcccttctcaagttgaagttgcatacatccaatatcgtatcttaatgatgctatgataattgcttgtgtgtgtagcttcttgtagcttagaaagcgctttatgcccatgatgtcatttcaggctcaaccaaagaggatcaaacaggaattccatcttggcttccctaagacagattggctttctaatgagtttaagtgggcagaagtgtagggttcagtgtgtcctgactcccttgaggcttataatgggccaagttgaagactgttgatgatccctggtgggtaaattgcagacatcaaatgctagggattggcataggctagtgtttagcttgtctatttgccatatctattttttttaaatttccatacacttgtaaaagtagttagttgcttttgattgagttatatagcagtttttcatttggtcttccactcacctttcactatatttgagtgttcccttacaggtatgttggcatgtgttggaaaatttacacaattaggtttaaattcagtaggatgtgattttaggatgctactgatcaaagtgatatctgtgtctgttggaatcttgatagctgattaatttgccctcaattctgctccctgaacttcacacataaatcttcccaagtgggttttagggtgtatagatcccagcaggattaaggaggtggaaaagcagctaacatttcttgaggctctaccacatagcaggcactgtcacagagtaatggcattaatccccataataatcctgtgaaggtgatattctcatcccatcttagacatgaggatattggaactcagagaggtggctattgcattgcgcagaacgctacagagcccatgctcttcccagagcagcacccacaaaagcaagcattgattttgtgctcagtgtgtgccaagcactgtgcagagggtacacagttcctgccaggttaacaccctcccttcaggcctcccaaaggcataggcttgcaaagagcagaaggtgtgaaatcacactcttcctctgggcatcctggatccctgaattatccccccccccatgaagtacttcaagggccaagctgcccctttccctcctctccgcccatgaaaatgcctccaaactgagatgctttcagctgagaacagatttgactcacagacattaccaaagaggagcttgtgaatccaggaaaagctccagggggctagctgatctgagcagagagctttcagtgacccattttcctgtctagactctgccttaagctagtggcaactgctggggccccaggtacttgggacatggaaactcgttggatggctgggcagatgtaagcctgtccatgcagtcagccgatcctctgctcaggttcagctggactctgccatctgtgggcccagcatcactctgtaagttccttgaaaggaagaacaaccttagagtatttctgatacaaaatgagggcctctgctcttgatttaattataaaatgtctacgtctttctccagtttctgagccctatgcacattggcttgtgggcttgttcttcctgccaaatgatcagagaggaacattccatttatttgtagtggatttcctctggagggcatgtacccacactaaataccaactgctcttcctcagctgtagtccccaacatcagacttggcacgtggtggacactaacacacaggcactcaatgaatgagtgaaggaaataaaagtcaccccgttggtgagaggtgctatccctgagtctcagtgcaggaccagtggatgaaaggcaaggtaaagaggcccaagataggctggcttcccccgttcaaggtatagtctgcctttaagggagttttagaaccaacatgcaagacattgaaagaaatcttgcaagagccattattgacttagatccaaaacagcctctctcatgtctaaaaaggcacagaattttgcagatctgaggaagagggatgcattacctttttgcttcttttcaattgcttagtgtttctaatcatacttaatccacactaatgtgcgcaattataataaatggtaagatatc

SEQ ID NO: 451667 - DNA, 3660 bp, Homo sapiens
gctacaagatgaccactgaggattacaagaagctgtgagtatgcaacgccaggcaccctacaatatcaggcgcagctctacatcaggggacaccgaggaggaggaggaggaggaggtggtgccattctcctcagatgaacagaaacggaggtcagaggctgcaagcggtgttctgaggaggacagctccccgggagcactcctacgtcctgtcagcggccaagaagagcactggcagtcctacccaggagacacaggcaccgtttatcgcgaagagggtggaggtggtggaagaggacgggccttctgagaagagccaggacccacctgctctggcaagatccactcctggctcaaacaggtcttccccaggcaacaaagacaaggaggccccctgctccagagagctccagagggacttggctggtgaggaggctttcagggcccccaacacagatgctgcaaggtcaagtgcacagttgagtgatggcaatgtgggatccggagccacgggctcccggcctgaaggcttggctgcagtagacatcggctccgagagaggaagctccagtgccacttcagtctctgctgtccctgctgataggaagagcaacagcacagcagcccaggaggatgcaaaggcagacccaaagggggccttggctgattatgaggggaaggatgtggccaccagggtcggagaggcctggcaggagaggcctggagctccaagaggtggccaaggagacccagctgtacccgctcagcaacctgcagatcccagcaccccagagcggcagagcagccccagcggatctgagcaacttgtcagacgagagagttgtggcagcagcgtgttgactgattttgaggggaaggatgtggccaccaaggtcggagaggcctggcaggacaggcctggagccccaagaggtggccaaggagacccagctgtacccactcagcaacctgcagatcccagtaccccagaacagcagaacagccccagcggatctgagcaattcgtcagacgagagagctgcaccagcagggtgaggagcccctcgagctgcatggtcactgttactgtcactgccacatctgagcagcctcacatttatattccagcccccgcaagtgaattggactccagctctaccaccaaagggattctcttcgtgaaggagtacgtgaatgctagtgaagtgtcttctgggaagccagtatctgcacgctatagcaacgtcagcagcattgaggactcattcgccatggagaagaagcctccatgtggcagcactccatactctgagaggacaactggagggatctgtacttactgcaaccgtgagatccgagactgtccaaagattaccctagaacatcttggtatctgctgccatgaatattgctttaagtgtgggatttgcagtaaaccgatgggcgatctcctggatcagatcttcattcaccgtgacaccattcactgtgggaaatgctatgagaagctcttctagcgaccccccaccgccaggctgatcagaagctgatgactcgtggacaaatttggctgtccccagttttgccccaagttgctgtctccccttccctcacctcctccctccctgtttgatttcttcatgcttttgcccttctcaagttgaagttgcatacatccaatatcgtatcttaatgatgctatgataattgcttgtgtgtgtagcttcttgtagcttagaaagcgctttatgcccatgatgtcatttcaggctcaaccaaagaggatcaaacaggaattccatcttggcttccctaagacagattggctttctaatgagtttaagtgggcagaagtgtagggttcagtgtgtcctgactcccttgaggcttataatgggccaagttgaagactgttgatgatccctggtgggtaaattgcagacatcaaatgctagggattggcataggctagtgtttagcttgtctatttgccatatctattttttttaaatttccatacacttgtaaaagtagttagttgcttttgattgagttatatagcagtttttcatttggtcttccactcacctttcactatatttgagtgttcccttacaggtatgttggcatgtgttggaaaatttacacaattaggtttaaattcagtaggatgtgattttaggatgctactgatcaaagtgatatctgtgtctgttggaatcttgatagctgattaatttgccctcaattctgctccctgaacttcacacataaatcttcccaagtgggttttagggtgtatagatcccagcaggattaaggaggtggaaaagcagctaacatttcttgaggctctaccacatagcaggcactgtcacagagtaatggcattaatccccataataatcctgtgaaggtgatattctcatcccatcttagacatgaggatattggaactcagagaggtggctattgcattgcgcagaacgctacagagcccatgctcttcccagagcagcacccacaaaagcaagcattgattttgtgctcagtgtgtgccaagcactgtgcagagggtacacagttcctgccaggttaacaccctcccttcaggcctcccaaaggcataggcttgcaaagagcagaaggtgtgaaatcacactcttcctctgggcatcctggatccctgaattatccccccccccatgaagtacttcaagggccaagctgcccctttccctcctctccgcccatgaaaatgcctccaaactgagatgctttcagctgagaacagatttgactcacagacattaccaaagaggagcttgtgaatccaggcctgtctagactctgccttaagctagtggcaactgctggggccccaggtacttgggacatggaaactcgttggatggctgggcagatgtaagcctgtccatgcagtcagccgatcctctgctcaggttcagctggactctgccatctgtgggcccagcatcactctgtaagttccttgaaaggaagaacaaccttagagtatttctgatacaaaatgagggcctctgctcttgatttaattataaaatgtctacgtctttctccagtttctgagccctatgcacattggcttgtgggcttgttcttcctgccaaatgatcagagaggaacattccatttatttgtagtggatttcctctggagggcatgtacccacactaaataccaactgctcttcctcagctgtagtccccaacatcagacttggcacgtggtggacactaacacacaggcactcaatgaatgagtgaaggaaataaaagtcaccccgttggtgagaggtgctatccctgagtctcagtgcaggaccagtggatgaaaggcaaggtaaagaggcccaagataggctggcttcccccgttcaaggtatagtctgcctttaagggagttttagaaccaacatgcaagacattgaaagaaatcttgcaagagccattattgacttagatccaaaacagcctctctcatgtctaaaaaggcacagaattttgcagatctgaggaagagggatgcattacctttttgcttcttttcaattgcttagtgtttctaatcatacttaatccacactaatgtgcgcaattataataaatggtaagatatc

SEQ ID NO: 451668 - DNA, 300 bp, Homo sapiens
cagtggcaatttttgaattataggaacttaccttttcctatacatccttgaaaccacaagggtaatgataataaacactcagataatgaggggctctcaaatattacagagtgtctttaaggctcagctggaaaacaagaaagtgctctttgaagtgggaaagccatctagaataccctggggaatgatgggactgacctaacctgaaggtcagcatcaggccagcaacgaggaacacaggaggcagaaatcacaactggattggactacagcacaaaataaacaatgaccaaatggcct

SEQ ID NO: 451669 - DNA, 305 bp, Homo sapiens
agtttgattcacatggactgtcaagtgtgtgaggctcagtatacatgtgcagcaacctcttcgggatgtttgaatgtgcaggattatctgaagaaacgtttgattgacttgaaagcccatttaatgataggacatggtgccgagtgtcagagtcctgtgttaattttggatgcgcagggtcttgctgtgctccaggggagctcctttctgtccagaggacagcaagtaaaacttgaaccagagatgcccctgtgcccactcagggcacccaagatctcagcctcttcaagaacttatcagaaaat

SEQ ID NO: 451670 - DNA, 5307 bp, Homo sapiens
cgccactgcagctgcagcccccgaggtcgccgcagtaatccggacccggcagcacccgcaccctcggcggccgcagcctcagcaccgcagagcggagagcggagcccggagcccgccgccccaggatggctgcagctcctccaagttactgttttgttgccttccctccacgtgctaaggatggtctggtggtatttgggaaaaattcagcccggcccagagatgaagtgcaagaggttgtgtatttctcggctgctgatcacgaaccggagagcaaggttgagatttaagttctcaaaggtggctgcaccaaatcccatcccaagtgcccttcttccagtgtgaagggcactccttccacgaagagggaaagtgcacttacatttcaatcgaccaagttccaaggacctatgccataatgataagcagacccgcctggctctggggagcagaaatgggagccaatgaacatggagtgtgcatagccaatgaagccatcaacaccagagagccagctgccgagatagaagccttgctggggatggatctggtcaggcttggtttagaaagaggggaaacagctaaagaagccttagatgtcattgtctccttgttggaagaacatggacaaggtgggaattactttgaagatgcaaactcctgccacagcttccaaagtgcatatctgattgtggatcgtgatgaagcctgggtgctcgagaccatagggaagtactgggctgccgagaaagtcacagagggagtgaggtgcatttgcagtcagctttcgctcaccactaagatggatgcagagcatccggaactcaggagttacgctcagagccaaggttggtggacgggagagggcgagttcaatttttccgaagtcttttctccagttgaggatcatctagactgcggtgctggcaaagacagcttagaaaaacaagaagaaagcatcacagtgcagactatgatgaacaccttacgggacaaagccagcggagtgtgcatagactctgagtttttcctcaccacagccagtggagtgtctgtcctgccgcagaatagaagctctccgtgcattcactacttcactggaacccctgatccttccaggtccatattcaagcctttcatctttgttgatgacgtaaaacttgtccccaaaacacagtctccctgttttggggatgacgaccctgccaaaaaggagcctcggttccaggagaaaccagaccgccggcatgagctgtacaaagcccacgagtgggcacgtgccatcatcgaaagtgaccaggagcaaggtcgcaagctgaggagcaccatgctggagctggagaagcaaggcctggaagccatggaagaaatcctgaccagctccgagccactggaccctgcggaagtgggggaccttttctatgactgtgttgacacggagattaagttctttaagtgaagtaagcgttccctttccccttcttatttaagacttcccaccttactaaattaccagcaaaacaaaccactctcctgtttgagtaaaatgagaaagttaatatgtggcctccttttctgaagccagatcaaactgttaccttgtgttccaccttgaatctcacagcgtccccttctgcaatgtaggtctccttcctgtgcagtgtaacatgtatcccgttgcctgttgttcggttgtgtgactaattgtggattttaagctgctattattgtatttcagtggcaatggacacattagccttttacaagaggactagagttcatcaagccttgaaaggcaggcttcacagtgccgagttggcgggaaaagcaaattcttttgaagtcttagtctttccctcagtagcggtttctttcaggttaacaagaggcatttgtgcacacacacagggctcttgtgtgtgttgtcaaggggaccctccgtggcctcccgtgagtgcatgcctgtagtgcacagtgtctctacaggtgtcttctggggggcagaaccaattggaaggaagaaagggacccctctccagtcctggctccttcctacatcctgggctcctgaagaagctgtcttcccattttccatgcgctgtgcttatgtgtggtggactgcagagctgcttccacttacaggagagctgataatttgttagctggaacctattcacttccgagattcagacatagccatgctggtggccttctgaatcactgcatggatgtcccaggaggcagctctccccacacagcagcacagccatcacaggattccttgtgtagaaatgattcccagtctagttaccaacagctagtctaggagtaattgaatggccctatggcacagttccacccacagagtagtgaatctctcagccaaggagggaaagaaaaggaagaactcttgactatttagattctagttaaatatctggaatcctagcagtcactacattatctcagcagagagactttaattaaactgatttgtttccaatgtcgggttcacttaaaggatttgacttaccaccagagcatagaaaagcatgcaaggaagaccagatgggcttagcattgggaagacagagggcaaggaggtgatagatggatatagaagcatttctctgcaggataccagttcaggccccaccattcctgccaaggccattacatcccacaaacccaaatacaaagcagctgacttccctggatcttccccccactcctcacacctcacatgtcccaggagctgccttcattcaggcgggtagctgcactgggcatggggtggtggtgggagcttaccgccacctattcaagctctcagctactcctgaaacgggcagagatgatgaacagaagtgtatgtaaatacagcagctagtgggagagcaccagttgggcctaatcctgcctcatcattcttggcaggaatctgcaaatggaaacattgtgagtatcagcaatctgggaagtgacagggttaataactccttcccagaagctgtatcatgagattttgaggggaccgagccctgttacatggatgtgaacagtgaggatcagaggttttatcagaacacattctttttttctaccaactctccagagcgtgagtataggagtgccatgagctttttagtcagcagttttgtaaactctgtatataaaatcattaaccacacattgtgggtgatgggaagacgatttcagctgacagagttaatggcaaccaataatggtggcctgtagctgctaagagcttcacgcaggtttggcctgggctttcactgttggtgaatttagagtgtccttttaggtggggcggctattctaaaagtgtctttctatcactgttaagggggggggaaagtgaggttcgaggatgacgtaggtaactctcccctcccaagtccatgttccaagtggctatgtaaagcaagatgatacagaaagctgctctaaaatctcactgagtgatttcaccttcgcctactatgaaatgtctcatcagacctgacatgtctgagataaccaaggtgattcaggatttgatcaaaagaagtctagtaagaattaattacacagaagcctcctttcatttctatgggccaaacaaaggccatggataaccctacccgctttatgtcattacccattgggaaacacaatggctacttctgttagggtacattgaccttggtcaagcatcttaaagaaggcaaccctaattgagagctgtcttggctaatactctgcaccacaattgtgatgtcctagtcctaccactagagggcatggtacagcctggcaaaagttaaaaggggtgtggcagctcccatcaggtctggaggtggtctataagcacagttgacagttgtgcattgggatgggtggagaaagacgacaagagagcagagaatctgctgatgtggctgcgcttacttttagtgactttatgtacttatattaacagctggaaataggttgttgggttttgagcaggctgttatagtgaggaatgttcatttttaaatgttcctaacagattttgcttttgaaaaatgcttgttacatgaataatttgtggaccagggattgcttttctgaaggcagtatagggaacatgaatattcaagatgaaatacaaaaattatgtttaagggtcatagtgtataagtagcttcctaggaaaccctttgtgtatcttttcagactggggtgggggctgagcatgcttgtgcagaaagaagccatagccagaaaggacagaatctctcccccactcccttgccccataaccaaacataagctagctagtcttgtctaatagatgggatttactataggtgaagatagccctcatattcaaggacagaagctctggcaggagtaaattagcaaagcagaaatagtaccctttcattcttggaggtgctttgaaattttaggtagaatataatcgaaattatggaggttccttagtgctcaataatataagacctggtgttattagaacgagtctttcttataaactaacagagcaggtatatgcctgttagaccttagctgtggggttcctttactattgggtgaatcattaggtataaaaaataatcatcaaccaggcaaattactttgcttcctagctgatgtcatcccacattggtacaggtgttattcagtactgggtggttcagcagggaagccgggtgggaccagtgtgtctgtcatgaaaccactaactgcattcctgactgaagagccatctgtcatttattggggaaggtcttcagttgagctctcagccttaggaaggaagcacgtggaggagggacggaggaggttcccttgctgggcatgcttcgtagagggccaggagcagcaggtcatgtgcacatgccgttgcagcacaagcttatgcttcccgtagccgtggcttttcattctgcacagtcccaggtcccagctcccctcttatggtttctgtcataatgtgctttatctgattgactccaaacatcccgaaatgtcacctgcagatttctcgtgggaaccaatatgtacatgtttgcaattatgctgtgagaatttaaatgtgttagatggaaaatgctattggcagggaataataataaaaaaaaaagaaaatcattctgtttcctgcagtgggaactggccatgtagtcttaacagtcttttgtacaaatatctacaaagcagataatatccctatccagtgcttgcccttggaattgtctctaaatgcatcaagcatacaataaaaaaaactgaaattaa

SEQ ID NO: 451671 - DNA, 5327 bp, Homo sapiens
cgccactgcagctgcagcccccgaggtcgccgcagtaatccggacccggcagcacccgcaccctcggcggccgcagcctcagcaccgcagagcggagagcggagcccggagcccgccgccccaggatggctgcagctcctccaagttactgttttgttgccttccctccacgtgctaaggatggtctggtggtatttgggaaaaattcagcccggcccagagatgaagtgcaagaggttgtgtatttctcggctgctgatcacgaaccggagagcaaggttgagatttaagttctcaaaggtggctgcaccaaatcccatcccaagtgcccttcttccagtgtgaagggcactccttccacgaagagggaaagtgcacttacatttcaatcgaccaagttccaaggacctatgccataatgataagcagacccgcctggctctggggagcagaaatgggagccaatgaacatggagtgtgcatagccaatgaagccatcaacaccagagagccagctgccgagatagaagccttgctggggatggatctggtcaggcttggtttagaaagaggggaaacagctaaagaagccttagatgtcattgtctccttgttggaagaacatggacaaggtgggaattactttgaagatgcaaactcctgccacagcttccaaagtgcatatctgattgtggatcgtgatgaagcctgggtgctcgagaccatagggaagtactgggctgccgagaaagtcacagagggagtgaggtgcatttgcagtcagctttcgctcaccactaagatggatgcagagcatccggaactcaggagttacgctcagagccaaggttggtggacgggagagggcgagttcaatttttccgaagtcttttctccagttgaggatcatctagactgcggtgctggcaaagacagcttagaaaaacaagaagaaagcatcacagtgcagactatgatgaacaccttacgggacaaagccagcggagtgtgcatagactctgagtttttcctcaccacagccagtggagtgtctgtcctgccgcagaatagaagctctccgtgcattcactacttcactggaacccctgatccttccaggtccatattcaagcctttcatctttgttgatgacgtaaaacttgtccccaaaacacagtctccctgttttggggatgacgaccctgccaaaaaggagcctcggttccaggagaaaccagaccgccggcatgagctgtacaaagcccacgagtgggcacgtgccatcatcgaaagtgaccaggagcaaggtcgcaagctgaggagcaccatgctggagctggagaagcaaggcctggaagccatggaagaaatcctgaccagctccgagccactggaccctgcggaagtgggggaccttttctatgactgtgttgacacggagattaagttctttaagtgaagtaagcgttccctttccccttcttatttaagacttcccaccttactaaattaccagcaaaacaaaccactctcctgtttgagtaaaatgagaaagttaatatgtggcctccttttctgaagccagatcaaactgttaccttgtgttccaccttgaatctcacagcgtccccttctgcaatgtaggtctccttcctgtgcagtgtaacatgtatcccgttgcctgttgttcggttgtgtgactaattgtggattttaagctgctattattgtatttcagtggcaatggacacattagccttttacaagaggactagagttcatcaagccttgaaaggcaggcttcacagtgccgagttggcgggaaaagcaaattcttttgaagtcttagtctttccctcagtagcggtttctttcaggttaacaagaggcatttgtgcacacacacagggctcttgtgtgtgttgtcaaggggaccctccgtggcctcccgtgagtgcatgcctgtagtgcacagtgtctctacaggtgtcttctggggggcagaaccaattggaaggaagaaagggacccctctccagtcctggctccttcctacatcctgggctcctgaagaagctgtcttcccattttccatgcgctgtgcttatgtgtggtggactgcagagctgcttccacttacaggagagctgataatttgttagctggaacctattcacttccgagattcagacatagccatgctggtggccttctgaatcactgcatggatgtcccaggaggcagctctccccacacagcagcacagccatcacaggattccttgtgtagaaatgattcccagtctagttaccaacagctagtctaggagtaattgaatggccctatggcacagttccacccacagagtagtgaatctctcagccaaggagggaaagaaaaggaagaactcttgactatttagattctagttaaatatctggaatcctagcagtcactacattatctcagcagagagactttaattaaactgatttgtttccaatgtcgggttcacttaaaggatttgacttaccaccagagcatagaaaagcatgcaaggaagaccagatgggcttagcattgggaagacagagggcaaggaggtgatagatggatatagaagcatttctctgcaggataccagttcaggccccaccattcctgccaaggccattacatcccacaaacccaaatacaaagcagctgacttccctggatcttccccccactcctcacacctcacatgtcccaggagctgccttcattcaggcgggtagctgcactgggcatggggtggtggtgggagcttaccgccacctattcaagctctcagctactcctgaaacgggcagagatgatgaacagaagtgtatgtaaatacagcagctagtgggagagcaccagttgggcctaatcctgcctcatcattcttggcaggaatctgcaaatggaaacattgtgagtatcagcaatctgggaagtgacagggttaataactccttcccagaagctgtatcatgagattttgaggggaccgagccctgttacatggatgtgaacagtgaggatcagaggttttatcagaacacattctttttttctaccaactctccagagcgtgagtataggagtgccatgagctttttagtcagcagttttgtaaactctgtatataaaatcattaaccacacattgtgggtgatgggaagacgatttcagctgacagagttaatggcaaccaataatggtggcctgtagctgctaagagcttcacgcaggtttggcctgggctttcactgttggtgaatttagagtgtccttttaggtggggcggctattctaaaagtgtctttctatcactgttaagggggggggaaagtgaggttcgaggatgacgtaggtaactctcccctcccaagtccatgttccaagtggctatgtaaagcaagatgatacagaaagctgctctaaaatctcactgagtgatttcaccttcgcctactatgaaatgtctcatcagacctgacatgtctgagataaccaaggtgattcaggatttgatcaaaagaagtctagtaagaattaattacacagaagcctcctttcatttctatgggccaaacaaaggccatggataaccctacccgctttatgtcattacccattgggaaacacaatggctacttctgttagggtacattgaccttggtcaagcatcttaaagaaggcaaccctaattgagagctgtcttggctaatactctgcaccacaattgtgatgtcctagtcctaccactagagggcatggtacagcctggcaaaagttaaaaggggtgtggcagctcccatcaggtctggaggtggtctataagcacagttgacagttgtgcattgggatgggtggagaaagacgacaagagagcagagaatctgctgatgtggctgcgcttacttttagtgactttatgtacttatattaacagctggaaataggttgttgggttttgagcaggctgttatagtgaggaatgttcatttttaaatgttcctaacagattttgcttttgaaaaatgcttgttacatgaataatttgtggaccagggattgcttttctgaaggcagtatagggaacatgaatattcaagatgaaatacaaaaattatgtttaagggtcatagtgtataagtagcttcctaggaaaccctttgtgtatcttttcagactggggtgggggctgagcatgcttgtgcagaaagaagccatagccagaaaggacagaatctctcccccactcccttgccccataaccaaacataagctagctagtcttgtctaatagatgggatttactataggtgaagatagccctcatattcaaggacagaagctctggcaggagtaaattagcaaagcagaaatagtaccctttcattcttggaggtgctttgaaattttaggtagaatataatcgaaattatggaggttccttagtgctcaataatataagacctggtgttattagaacgagtctttcttataaactaacagagcaggtatatgcctgttagaccttagctgtggggttcctttactattgggtgaatcattaggtataaaaaataatcatcaaccaggcaaattactttgcttcctagctgatgtcatcccacattggtacaggtgttattcagtactgggtggttcagcagggaagccgggtgggaccagtgtgtctgtcatgaaaccactaactgcattcctgactgaagagccatctgtcatttattggggaaggtcttcagttgagctctcagccttaggaaggaagcacgtggaggagggacggaggaggttcccttgctgggcatgcttcgtagagggccaggagcagcaggtcatgtgcacatgccgttgcagcacaagcttatgcttcccgtagccgtggcttttcattctgcacagtcccaggtcccagctcccctcttatggtttctgtcataatgtgctttatctgattgactccaaacatcccgaaatgtcacctgcagatttctcgtgggaaccaatatgtacatgtttgcaattatgctgtgagaatttaaatgtgttagatggaaaatgctattggcagggaataataataaaaaaaaaagaaaatcattctgtttcctgcagtgggaactggccatgtagtcttaacagtcttttgtacaaatatctacaaagcagataatatccctatccagtgcttgcccttggaattgtctctaaatgcatcaagcatacaataaaaaaaactgaaattaaaaattaacatccaaaaaaat

SEQ ID NO: 451672 - DNA, 5362 bp, Homo sapiens
cgccactgcagctgcagcccccgaggtcgccgcagtaatccggacccggcagcacccgcaccctcggcggccgcagcctcagcaccgcagagcggagagcggagcccggagcccgccgccccaggatggctgcagctcctccaagttactgttttgttgccttccctccacgtgctaaggatggtctggtggtatttgggaaaaattcagcccggcccagagatgaagtgcaagaggttgtgtatttctcggctgctgatcacgaaccggagagcaaggttgagatttaagttctcaaaggtggctgcaccaaatcccatcccaagtgcccttcttccagtgtgaagggcactccttccacgaagagggaaagtgcacttacatttcaatcgaccaagttccaaggacctatgccataatgataagcagacccgcctggctctggggagcagaaatgggagccaatgaacatggagtgtgcatagccaatgaagccatcaacaccagagagccagctgccgagatagaagccttgctggggatggatctggtcaggcttggtttagaaagaggggaaacagctaaagaagccttagatgtcattgtctccttgttggaagaacatggacaaggtgggaattactttgaagatgcaaactcctgccacagcttccaaagtgcatatctgattgtggatcgtgatgaagcctgggtgctcgagaccatagggaagtactgggctgccgagaaagtcacagagggagtgaggtgcatttgcagtcagctttcgctcaccactaagatggatgcagagcatccggaactcaggagttacgctcagagccaaggttggtggacgggagagggcgagttcaatttttccgaagtcttttctccagttgaggatcatctagactgcggtgctggcaaagacagcttagaaaaacaagaagaaagcatcacagtgcagactatgatgaacaccttacgggacaaagccagcggagtgtgcatagactctgagtttttcctcaccacagccagtggagtgtctgtcctgccgcagaatagaagctctccgtgcattcactacttcactggaacccctgatccttccaggtccatattcaagcctttcatctttgttgatgacgtaaaacttgtccccaaaacacagtctccctgttttggggatgacgaccctgccaaaaaggagcctcggttccaggagaaaccagaccgccggcatgagctgtacaaagcccacgagtgggcacgtgccatcatcgaaagtgaccaggagcaaggtcgcaagctgaggagcaccatgctggagctggagaagcaaggcctggaagccatggaagaaatcctgaccagctccgagccactggaccctgcggaagtgggggaccttttctatgactgtgttgacacggagattaagttctttaagtgaagtaagcgttccctttccccttcttatttaagacttcccaccttactaaattaccagcaaaacaaaccactctcctgtttgagtaaaatgagaaagttaatatgtggcctccttttctgaagccagatcaaactgttaccttgtgttccaccttgaatctcacagcgtccccttctgcaatgtaggtctccttcctgtgcagtgtaacatgtatcccgttgcctgttgttcggttgtgtgactaattgtggattttaagctgctattattgtatttcagtggcaatggacacattagccttttacaagaggactagagttcatcaagccttgaaaggcaggcttcacagtgccgagttggcgggaaaagcaaattcttttgaagtcttagtctttccctcagtagcggtttctttcaggttaacaagaggcatttgtgcacacacacagggctcttgtgtgtgttgtcaaggggaccctccgtggcctcccgtgagtgcatgcctgtagtgcacagtgtctctacaggtgtcttctggggggcagaaccaattggaaggaagaaagggacccctctccagtcctggctccttcctacatcctgggctcctgaagaagctgtcttcccattttccatgcgctgtgcttatgtgtggtggactgcagagctgcttccacttacaggagagctgataatttgttagctggaacctattcacttccgagattcagacatagccatgctggtggccttctgaatcactgcatggatgtcccaggaggcagctctccccacacagcagcacagccatcacaggattccttgtgtagaaatgattcccagtctagttaccaacagctagtctaggagtaattgaatggccctatggcacagttccacccacagagtagtgaatctctcagccaaggagggaaagaaaaggaagaactcttgactatttagattctagttaaatatctggaatcctagcagtcactacattatctcagcagagagactttaattaaactgatttgtttccaatgtcgggttcacttaaaggatttgacttaccaccagagcatagaaaagcatgcaaggaagaccagatgggcttagcattgggaagacagagggcaaggaggtgatagatggatatagaagcatttctctgcaggataccagttcaggccccaccattcctgccaaggccattacatcccacaaacccaaatacaaagcagctgacttccctggatcttccccccactcctcacacctcacatgtcccaggagctgccttcattcaggcgggtagctgcactgggcatggggtggtggtgggagcttaccgccacctattcaagctctcagctactcctgaaacgggcagagatgatgaacagaagtgtatgtaaatacagcagctagtgggagagcaccagttgggcctaatcctgcctcatcattcttggcaggaatctgcaaatggaaacattgtgagtatcagcaatctgggaagtgacagggttaataactccttcccagaagctgtatcatgagattttgaggggaccgagccctgttacatggatgtgaacagtgaggatcagaggttttatcagaacacattctttttttctaccaactctccagagcgtgagtataggagtgccatgagctttttagtcagcagttttgtaaactctgtatataaaatcattaaccacacattgtgggtgatgggaagacgatttcagctgacagagttaatggcaaccaataatggtggcctgtagctgctaagagcttcacgcaggtttggcctgggctttcactgttggtgaatttagagtgtccttttaggtggggcggctattctaaaagtgtctttctatcactgttaagggggggggaaagtgaggttcgaggatgacgtaggtaactctcccctcccaagtccatgttccaagtggctatgtaaagcaagatgatacagaaagctgctctaaaatctcactgagtgatttcaccttcgcctactatgaaatgtctcatcagacctgacatgtctgagataaccaaggtgattcaggatttgatcaaaagaagtctagtaagaattaattacacagaagcctcctttcatttctatgggccaaacaaaggccatggataaccctacccgctttatgtcattacccattgggaaacacaatggctacttctgttagggtacattgaccttggtcaagcatcttaaagaaggcaaccctaattgagagctgtcttggctaatactctgcaccacaattgtgatgtcctagtcctaccactagagggcatggtacagcctggcaaaagttaaaaggggtgtggcagctcccatcaggtctggaggtggtctataagcacagttgacagttgtgcattgggatgggtggagaaagacgacaagagagcagagaatctgctgatgtggctgcgcttacttttagtgactttatgtacttatattaacagctggaaataggttgttgggttttgagcaggctgttatagtgaggaatgttcatttttaaatgttcctaacagattttgcttttgaaaaatgcttgttacatgaataatttgtggaccagggattgcttttctgaaggcagtatagggaacatgaatattcaagatgaaatacaaaaattatgtttaagggtcatagtgtataagtagcttcctaggaaaccctttgtgtatcttttcagactggggtgggggctgagcatgcttgtgcagaaagaagccatagccagaaaggacagaatctctcccccactcccttgccccataaccaaacataagctagctagtcttgtctaatagatgggatttactataggtgaagatagccctcatattcaaggacagaagctctggcaggagtaaattagcaaagcagaaatagtaccctttcattcttggaggtgctttgaaattttaggtagaatataatcgaaattatggaggttccttagtgctcaataatataagacctggtgttattagaacgagtctttcttataaactaacagagcaggtatatgcctgttagaccttagctgtggggttcctttactattgggtgaatcattaggtataaaaaataatcatcaaccaggcaaattactttgcttcctagctgatgtcatcccacattggtacaggtgttattcagtactgggtggttcagcagggaagccgggtgggaccagtgtgtctgtcatgaaaccactaactgcattcctgactgaagagccatctgtcatttattggggaaggtcttcagttgagctctcagccttaggaaggaagcacgtggaggagggacggaggaggttcccttgctgggcatgcttcgtagagggccaggagcagcaggtcatgtgcacatgccgttgcagcacaagcttatgcttcccgtagccgtggcttttcattctgcacagtcccaggtcccagctcccctcttatggtttctgtcataatgtgctttatctgattgactccaaacatcccgaaatgtcacctgcagatttctcgtgggaaccaatatgtacatgtttgcaattatgctgtgagaatttaaatgtgttagatggaaaatgctattggcagggaataataataaaaaaaaaagaaaatcattctgtttcctgcagtgggaactggccatgtagtcttaacagtcttttgtacaaatatctacaaagcagataatatccctatccagtgcttgcccttggaattgtctctaaatgcatcaagcatacaataaaaaaaactgaaattaacacacaacaaggggtccagagcaaaaataaggaaaacagggccaaaaaggaaccg

SEQ ID NO: 451673 - DNA, 5137 bp, Homo sapiens
ctcggccgctcctccagctcccaggccccctccctactcgacggatggctgcagctcctccaagttactgttttgttgccttccctccacgtgctaaggatggtctggtggtatttgggaaaaattcagcccggcccagagatgaagtgcaagaggttgtgtatttctcggctgctgatcacgaaccggagagcaaggttgagtgcacttacatttcaatcgaccaagttccaaggacctatgccataatgataagcagacccgcctggctctggggagcagaaatgggagccaatgaacatggagtgtgcatagccaatgaagccatcaacaccagagagccagctgccgagatagaagccttgctggggatggatctggtcaggcttggtttagaaagaggggaaacagctaaagaagccttagatgtcattgtctccttgttggaagaacatggacaaggtgggaattactttgaagatgcaaactcctgccacagcttccaaagtgcatatctgattgtggatcgtgatgaagcctgggtgctcgagaccatagggaagtactgggctgccgagaaagtcacagagggagtgaggtgcatttgcagtcagctttcgctcaccactaagatggatgcagagcatccggaactcaggagttacgctcagagccaaggttggtggacgggagagggcgagttcaatttttccgaagtcttttctccagttgaggatcatctagactgcggtgctggcaaagacagcttagaaaaacaagaagaaagcatcacagtgcagactatgatgaacaccttacgggacaaagccagcggagtgtgcatagactctgagtttttcctcaccacagccagtggagtgtctgtcctgccgcagaatagaagctctccgtgcattcactacttcactggaacccctgatccttccaggtccatattcaagcctttcatctttgttgatgacgtaaaacttgtccccaaaacacagtctccctgttttggggatgacgaccctgccaaaaaggagcctcggttccaggagaaaccagaccgccggcatgagctgtacaaagcccacgagtgggcacgtgccatcatcgaaagtgaccaggagcaaggtcgcaagctgaggagcaccatgctggagctggagaagcaaggcctggaagccatggaagaaatcctgaccagctccgagccactggaccctgcggaagtgggggaccttttctatgactgtgttgacacggagattaagttctttaagtgaagtaagcgttccctttccccttcttatttaagacttcccaccttactaaattaccagcaaaacaaaccactctcctgtttgagtaaaatgagaaagttaatatgtggcctccttttctgaagccagatcaaactgttaccttgtgttccaccttgaatctcacagcgtccccttctgcaatgtaggtctccttcctgtgcagtgtaacatgtatcccgttgcctgttgttcggttgtgtgactaattgtggattttaagctgctattattgtatttcagtggcaatggacacattagccttttacaagaggactagagttcatcaagccttgaaaggcaggcttcacagtgccgagttggcgggaaaagcaaattcttttgaagtcttagtctttccctcagtagcggtttctttcaggttaacaagaggcatttgtgcacacacacagggctcttgtgtgtgttgtcaaggggaccctccgtggcctcccgtgagtgcatgcctgtagtgcacagtgtctctacaggtgtcttctggggggcagaaccaattggaaggaagaaagggacccctctccagtcctggctccttcctacatcctgggctcctgaagaagctgtcttcccattttccatgcgctgtgcttatgtgtggtggactgcagagctgcttccacttacaggagagctgataatttgttagctggaacctattcacttccgagattcagacatagccatgctggtggccttctgaatcactgcatggatgtcccaggaggcagctctccccacacagcagcacagccatcacaggattccttgtgtagaaatgattcccagtctagttaccaacagctagtctaggagtaattgaatggccctatggcacagttccacccacagagtagtgaatctctcagccaaggagggaaagaaaaggaagaactcttgactatttagattctagttaaatatctggaatcctagcagtcactacattatctcagcagagagactttaattaaactgatttgtttccaatgtcgggttcacttaaaggatttgacttaccaccagagcatagaaaagcatgcaaggaagaccagatgggcttagcattgggaagacagagggcaaggaggtgatagatggatatagaagcatttctctgcaggataccagttcaggccccaccattcctgccaaggccattacatcccacaaacccaaatacaaagcagctgacttccctggatcttccccccactcctcacacctcacatgtcccaggagctgccttcattcaggcgggtagctgcactgggcatggggtggtggtgggagcttaccgccacctattcaagctctcagctactcctgaaacgggcagagatgatgaacagaagtgtatgtaaatacagcagctagtgggagagcaccagttgggcctaatcctgcctcatcattcttggcaggaatctgcaaatggaaacattgtgagtatcagcaatctgggaagtgacagggttaataactccttcccagaagctgtatcatgagattttgaggggaccgagccctgttacatggatgtgaacagtgaggatcagaggttttatcagaacacattctttttttctaccaactctccagagcgtgagtataggagtgccatgagctttttagtcagcagttttgtaaactctgtatataaaatcattaaccacacattgtgggtgatgggaagacgatttcagctgacagagttaatggcaaccaataatggtggcctgtagctgctaagagcttcacgcaggtttggcctgggctttcactgttggtgaatttagagtgtccttttaggtggggcggctattctaaaagtgtctttctatcactgttaagggggggggaaagtgaggttcgaggatgacgtaggtaactctcccctcccaagtccatgttccaagtggctatgtaaagcaagatgatacagaaagctgctctaaaatctcactgagtgatttcaccttcgcctactatgaaatgtctcatcagacctgacatgtctgagataaccaaggtgattcaggatttgatcaaaagaagtctagtaagaattaattacacagaagcctcctttcatttctatgggccaaacaaaggccatggataaccctacccgctttatgtcattacccattgggaaacacaatggctacttctgttagggtacattgaccttggtcaagcatcttaaagaaggcaaccctaattgagagctgtcttggctaatactctgcaccacaattgtgatgtcctagtcctaccactagagggcatggtacagcctggcaaaagttaaaaggggtgtggcagctcccatcaggtctggaggtggtctataagcacagttgacagttgtgcattgggatgggtggagaaagacgacaagagagcagagaatctgctgatgtggctgcgcttacttttagtgactttatgtacttatattaacagctggaaataggttgttgggttttgagcaggctgttatagtgaggaatgttcatttttaaatgttcctaacagattttgcttttgaaaaatgcttgttacatgaataatttgtggaccagggattgcttttctgaaggcagtatagggaacatgaatattcaagatgaaatacaaaaattatgtttaagggtcatagtgtataagtagcttcctaggaaaccctttgtgtatcttttcagactggggtgggggctgagcatgcttgtgcagaaagaagccatagccagaaaggacagaatctctcccccactcccttgccccataaccaaacataagctagctagtcttgtctaatagatgggatttactataggtgaagatagccctcatattcaaggacagaagctctggcaggagtaaattagcaaagcagaaatagtaccctttcattcttggaggtgctttgaaattttaggtagaatataatcgaaattatggaggttccttagtgctcaataatataagacctggtgttattagaacgagtctttcttataaactaacagagcaggtatatgcctgttagaccttagctgtggggttcctttactattgggtgaatcattaggtataaaaaataatcatcaaccaggcaaattactttgcttcctagctgatgtcatcccacattggtacaggtgttattcagtactgggtggttcagcagggaagccgggtgggaccagtgtgtctgtcatgaaaccactaactgcattcctgactgaagagccatctgtcatttattggggaaggtcttcagttgagctctcagccttaggaaggaagcacgtggaggagggacggaggaggttcccttgctgggcatgcttcgtagagggccaggagcagcaggtcatgtgcacatgccgttgcagcacaagcttatgcttcccgtagccgtggcttttcattctgcacagtcccaggtcccagctcccctcttatggtttctgtcataatgtgctttatctgattgactccaaacatcccgaaatgtcacctgcagatttctcgtgggaaccaatatgtacatgtttgcaattatgctgtgagaatttaaatgtgttagatggaaaatgctattggcagggaataataataaaaaaaaaagaaaatcattctgtttcctgcagtgggaactggccatgtagtcttaacagtcttttgtacaaatatctacaaagcagataatatccctatccagtgcttgcccttggaattgtctctaaatgcatcaagcatacaataaaaaaaactgaaattaa

SEQ ID NO: 451674 - DNA, 4086 bp, Homo sapiens
ccccctagagggtttcagtgtccgctgcaatgtcccctgctattttgctgacacctaaagcagtcgtgtccttcctcaggagcaaggtcgcaagctgaggagcaccatgctggagctggagaagcaaggcctggaagccatggaagaaatcctgaccagctccgagccactggaccctgcggaagtgggggaccttttctatgactgtgttgacacggagattaagttctttaagtgaagtaagcgttccctttccccttcttatttaagacttcccaccttactaaattaccagcaaaacaaaccactctcctgtttgagtaaaatgagaaagttaatatgtggcctccttttctgaagccagatcaaactgttaccttgtgttccaccttgaatctcacagcgtccccttctgcaatgtaggtctccttcctgtgcagtgtaacatgtatcccgttgcctgttgttcggttgtgtgactaattgtggattttaagctgctattattgtatttcagtggcaatggacacattagccttttacaagaggactagagttcatcaagccttgaaaggcaggcttcacagtgccgagttggcgggaaaagcaaattcttttgaagtcttagtctttccctcagtagcggtttctttcaggttaacaagaggcatttgtgcacacacacagggctcttgtgtgtgttgtcaaggggaccctccgtggcctcccgtgagtgcatgcctgtagtgcacagtgtctctacaggtgtcttctggggggcagaaccaattggaaggaagaaagggacccctctccagtcctggctccttcctacatcctgggctcctgaagaagctgtcttcccattttccatgcgctgtgcttatgtgtggtggactgcagagctgcttccacttacaggagagctgataatttgttagctggaacctattcacttccgagattcagacatagccatgctggtggccttctgaatcactgcatggatgtcccaggaggcagctctccccacacagcagcacagccatcacaggattccttgtgtagaaatgattcccagtctagttaccaacagctagtctaggagtaattgaatggccctatggcacagttccacccacagagtagtgaatctctcagccaaggagggaaagaaaaggaagaactcttgactatttagattctagttaaatatctggaatcctagcagtcactacattatctcagcagagagactttaattaaactgatttgtttccaatgtcgggttcacttaaaggatttgacttaccaccagagcatagaaaagcatgcaaggaagaccagatgggcttagcattgggaagacagagggcaaggaggtgatagatggatatagaagcatttctctgcaggataccagttcaggccccaccattcctgccaaggccattacatcccacaaacccaaatacaaagcagctgacttccctggatcttccccccactcctcacacctcacatgtcccaggagctgccttcattcaggcgggtagctgcactgggcatggggtggtggtgggagcttaccgccacctattcaagctctcagctactcctgaaacgggcagagatgatgaacagaagtgtatgtaaatacagcagctagtgggagagcaccagttgggcctaatcctgcctcatcattcttggcaggaatctgcaaatggaaacattgtgagtatcagcaatctgggaagtgacagggttaataactccttcccagaagctgtatcatgagattttgaggggaccgagccctgttacatggatgtgaacagtgaggatcagaggttttatcagaacacattctttttttctaccaactctccagagcgtgagtataggagtgccatgagctttttagtcagcagttttgtaaactctgtatataaaatcattaaccacacattgtgggtgatgggaagacgatttcagctgacagagttaatggcaaccaataatggtggcctgtagctgctaagagcttcacgcaggtttggcctgggctttcactgttggtgaatttagagtgtccttttaggtggggcggctattctaaaagtgtctttctatcactgttaagggggggggaaagtgaggttcgaggatgacgtaggtaactctcccctcccaagtccatgttccaagtggctatgtaaagcaagatgatacagaaagctgctctaaaatctcactgagtgatttcaccttcgcctactatgaaatgtctcatcagacctgacatgtctgagataaccaaggtgattcaggatttgatcaaaagaagtctagtaagaattaattacacagaagcctcctttcatttctatgggccaaacaaaggccatggataaccctacccgctttatgtcattacccattgggaaacacaatggctacttctgttagggtacattgaccttggtcaagcatcttaaagaaggcaaccctaattgagagctgtcttggctaatactctgcaccacaattgtgatgtcctagtcctaccactagagggcatggtacagcctggcaaaagttaaaaggggtgtggcagctcccatcaggtctggaggtggtctataagcacagttgacagttgtgcattgggatgggtggagaaagacgacaagagagcagagaatctgctgatgtggctgcgcttacttttagtgactttatgtacttatattaacagctggaaataggttgttgggttttgagcaggctgttatagtgaggaatgttcatttttaaatgttcctaacagattttgcttttgaaaaatgcttgttacatgaataatttgtggaccagggattgcttttctgaaggcagtatagggaacatgaatattcaagatgaaatacaaaaattatgtttaagggtcatagtgtataagtagcttcctaggaaaccctttgtgtatcttttcagactggggtgggggctgagcatgcttgtgcagaaagaagccatagccagaaaggacagaatctctcccccactcccttgccccataaccaaacataagctagctagtcttgtctaatagatgggatttactataggtgaagatagccctcatattcaaggacagaagctctggcaggagtaaattagcaaagcagaaatagtaccctttcattcttggaggtgctttgaaattttaggtagaatataatcgaaattatggaggttccttagtgctcaataatataagacctggtgttattagaacgagtctttcttataaactaacagagcaggtatatgcctgttagaccttagctgtggggttcctttactattgggtgaatcattaggtataaaaaataatcatcaaccaggcaaattactttgcttcctagctgatgtcatcccacattggtacaggtgttattcagtactgggtggttcagcagggaagccgggtgggaccagtgtgtctgtcatgaaaccactaactgcattcctgactgaagagccatctgtcatttattggggaaggtcttcagttgagctctcagccttaggaaggaagcacgtggaggagggacggaggaggttcccttgctgggcatgcttcgtagagggccaggagcagcaggtcatgtgcacatgccgttgcagcacaagcttatgcttcccgtagccgtggcttttcattctgcacagtcccaggtcccagctcccctcttatggtttctgtcataatgtgctttatctgattgactccaaacatcccgaaatgtcacctgcagatttctcgtgggaaccaatatgtacatgtttgcaattatgctgtgagaatttaaatgtgttagatggaaaatgctattggcagggaataataataaaaaaaaaagaaaatcattctgtttcctgcagtgggaactggccatgtagtcttaacagtcttttgtacaaatatctacaaagcagataatatccctatccagtgcttgcccttggaattgtctctaaatgcatcaagcatacaataaaaaaaactgaaattaa

SEQ ID NO: 451675 - DNA, 3950 bp, Homo sapiens
cgccactgcagctgcagcccccgaggtcgccgcagtaatccggacccggcagcacccgcaccctcggcggccgcagcctcagcaccgcagagcggagagcggagcccggagcccgccgccccaggatggctgcagctcctccaagttactgttttgttgccttccctccacgtgctaaggatggtctggtggtatttgggaaaaattcagcccggcccagagatgaagtgcaagaggttgtgtatttctcggctgctgatcacgaaccggagagcaaggttgagtgcacttacatttcaatcgaccaagttccaaggacctatgccataatgataagcagacccgcctggctctggggagcagaaatgggagccaatgaacatggagtgtgcatagccaatgaagccatcaacaccagagagccagctgccgagatagaagccttgctggggatggatctggtcaggcttggtttagaaagaggggaaacagctaaagaagccttagatgtcattgtctccttgttggaagaacatggacaaggtgggaattactttgaagatgcaaactcctgccacagcttccaaagtgcatatctgattgtggatcgtgatgaagcctgggtgctcgagaccatagggaagtactgggctgccgagaaagtcacagagggagtgaggtgcatttgcagtcagctttcgctcaccactaagatggatgcagagcatccggaactcaggagttacgctcagagccaaggttggtggacgggagagggcgagttcaatttttccgaagtcttttctccagttgaggatcatctagactgcggtgctggcaaagacagcttagaaaaacaagaagaaagcatcacagtgcagactatgatgaacaccttacgggacaaagccagcggagtgtgcatagactctgagtttttcctcaccacagccagtggagtgtctgtcctgccgcagaatagaagctctccgtgcattcactacttcactggaacccctgatccttccaggtccatattcaagcctttcatctttgttgatgacgtaaaacttgtccccaaaacacagtctccctgttttggggatgacgaccctgccaaaaaggagcctcggttccaggagaaaccagaccgccggcatgagctgtacaaagcccacgagtgggcacgtgccatcatcgaaagtgaccaggagcaaggtcgcaagctgaggagcaccatgctggagctggagaagcaaggcctggaagccatggaagaaatcctgaccagctccgagccactggaccctgcggaagtgggggaccttttctatgactgtgttgacacggagattaagttctttaagtgaagtaagcgttccctttccccttcttatttaagacttcccaccttactaaattaccagcaaaacaaaccactctcctgtttgagtaaaatgagaaagttaatatgtggcctccttttctgaagccagatcaaactgttaccttgtgttccaccttgaatctcacagcgtccccttctgcaatgtaggtctccttcctgtgcttcttggcaggaatctgcaaatggaaacattgtgagtatcagcaatctgggaagtgacagggttaataactccttcccagaagctgtatcatgagattttgaggggaccgagccctgttacatggatgtgaacagtgaggatcagaggttttatcagaacacattctttttttctaccaactctccagagcgtgagtataggagtgccatgagctttttagtcagcagttttgtaaactctgtatataaaatcattaaccacacattgtgggtgatgggaagacgatttcagctgacagagttaatggcaaccaataatggtggcctgtagctgctaagagcttcacgcaggtttggcctgggctttcactgttggtgaatttagagtgtccttttaggtggggcggctattctaaaagtgtctttctatcactgttaagggggggggaaagtgaggttcgaggatgacgtaggtaactctcccctcccaagtccatgttccaagtggctatgtaaagcaagatgatacagaaagctgctctaaaatctcactgagtgatttcaccttcgcctactatgaaatgtctcatcagacctgacatgtctgagataaccaaggtgattcaggatttgatcaaaagaagtctagtaagaattaattacacagaagcctcctttcatttctatgggccaaacaaaggccatggataaccctacccgctttatgtcattacccattgggaaacacaatggctacttctgttagggtacattgaccttggtcaagcatcttaaagaaggcaaccctaattgagagctgtcttggctaatactctgcaccacaattgtgatgtcctagtcctaccactagagggcatggtacagcctggcaaaagttaaaaggggtgtggcagctcccatcaggtctggaggtggtctataagcacagttgacagttgtgcattgggatgggtggagaaagacgacaagagagcagagaatctgctgatgtggctgcgcttacttttagtgactttatgtacttatattaacagctggaaataggttgttgggttttgagcaggctgttatagtgaggaatgttcatttttaaatgttcctaacagattttgcttttgaaaaatgcttgttacatgaataatttgtggaccagggattgcttttctgaaggcagtatagggaacatgaatattcaagatgaaatacaaaaattatgtttaagggtcatagtgtataagtagcttcctaggaaaccctttgtgtatcttttcagactggggtgggggctgagcatgcttgtgcagaaagaagccatagccagaaaggacagaatctctcccccactcccttgccccataaccaaacataagctagctagtcttgtctaatagatgggatttactataggtgaagatagccctcatattcaaggacagaagctctggcaggagtaaattagcaaagcagaaatagtaccctttcattcttggaggtgctttgaaattttaggtagaatataatcgaaattatggaggttccttagtgctcaataatataagacctggtgttattagaacgagtctttcttataaactaacagagcaggtatatgcctgttagaccttagctgtggggttcctttactattgggtgaatcattaggtataaaaaataatcatcaaccaggcaaattactttgcttcctagctgatgtcatcccacattggtacaggtgttattcagtactgggtggttcagcagggaagccgggtgggaccagtgtgtctgtcatgaaaccactaactgcattcctgactgaagagccatctgtcatttattggggaaggtcttcagttgagctctcagccttaggaaggaagcacgtggaggagggacggaggaggttcccttgctgggcatgcttcgtagagggccaggagcagcaggtcatgtgcacatgccgttgcagcacaagcttatgcttcccgtagccgtggcttttcattctgcacagtcccaggtcccagctcccctcttatggtttctgtcataatgtgctttatctgattgactccaaacatcccgaaatgtcacctgcagatttctcgtgggaaccaatatgtacatgtttgcaattatgctgtgagaatttaaatgtgttagatggaaaatgctattggcagggaataataataaaaaaaaaagaaaatcattctgtttcctgcagtgggaactggccatgtagtcttaacagtcttttgtacaaatatctacaaagcagataatatccctatccagtgcttgcccttggaattgtctctaaatgcatcaagcatacaataaaaaaaactgaaattaa

SEQ ID NO: 451676 - DNA, 1160 bp, Homo sapiens
gagagagagagagagagagagagagagagagagagagagagagagagagagagagagagagagagagagagaagactggggtgggggctgagcatgcttgtgcagaaagaagccatagccagaaaggacagaatctctcccccactcccttgccccataaccaaacataagctagctagtcttgtctaatagatgggatttactataggtgaagatagccctcatattcaaggacagaagctctggcaggagtaaattagcaaagcagaaatagtaccctttcattcttggaggtgctttgaaattttaggtagaatataatcgaaattatggaggttccttagtgctcaataatataagacctggtgttattagaacgagtctttcttataaactaacagagcaggtatatgcctgttagaccttagctgtggggttcctttactattgggtgaatcattaggtataaaaaataatcatcaaccaggcaaattactttgcttcctagctgatgtcatcccacattggtacaggtgttattcagtactgggtggttcagcagggaagccgggtgggaccagtgtgtctgtcatgaaaccactaactgcattcctgactgaagagccatctgtcatttattggggaaggtcttcagttgagctctcagccttaggaaggaagcacgtggaggagggacggaggaggttcccttgctgggcatgcttcgtagagggccaggagcagcaggtcatgtgcacatgccgttgcagcacaagcttatgcttcccgtagccgtggcttttcattctgcacagtcccaggtcccagctcccctcttatggtttctgtcataatgtgctttatctgattgactccaaacatcccgaaatgtcacctgcagatttctcgtgggaaccaatatgtacatgtttgcaattatgctgtgagaatttaaatgtgttagatggaaaatgctattggcagggaataataataaaaaaaaaagaaaatcattctgtttcctgcagtgggaactggccatgtagtcttaacagtcttttgtacaaatatctacaaagcagataatatccctatccagtgcttgcccttggaattgtctctaaatgcatcaagcatacaataaaaaaaactgaaattaa

SEQ ID NO: 451677 - DNA, 4233 bp, Homo sapiens
cgccactgcagctgcagcccccgaggtcgccgcagtaatccggacccggcagcacccgcaccctcggcggccgcagcctcagcaccgcagagcggagagcggagcccggagcccgccgccccaggatggctgcagctcctccaagttactgttttgttgccttccctccacgtgctaaggatggtctggtggtatttgggaaaaattcagcccggcccagagatgaagtgcaagaggttgtgtatttctcggctgctgatcacgaaccggagagcaaggttgagtgcacttacatttcaatcgaccaagttccaaggacctatgccataatgataagcagacccgcctggctctggggagcagaaatgggagccaatgaacatggagtgtgcatagccaatgaagccatcaacaccagagagccagctgccgagatagaagccttgctggggatggatctggtcaggcttggtttagaaagaggggaaacagctaaagaagccttagatgtcattgtctccttgttggaagaacatggacaaggtgggaattactttgaagatgcaaactcctgccacagcttccaaagtgcatatctgattgtggatcgtgatgaagcctgggtgctcgagaccatagggaagtactgggctgccgagaaagtcacagagggagtgaggtgcatttgcagtcagctttcgctcaccactaagatggatgcagagcatccggaactcaggagttacgctcagagccaaggttggtggacgggagagggcgagttcaatttttccgaagtcttttctccagttgaggatcatctagactgcggtgctggcaaagacagcttagaaaaacaagaagaaagcatcacagtgcagactatgatgaacaccttacgggacaaagccagcggagtgtgcatagactctgagtttttcctcaccacagccagtggagtgtctgtcctgccgcagaatagaagctctccgtgcattcactacttcactggaacccctgatccttccaggtccatattcaagcctttcatctttgttgatgacgtaaaacttgtccccaaaacacagtctccctgttttggggatgacgaccctgccaaaaaggagcctcggttccaggagaaaccagaccgccggcatgagctgtacaaagcccacgagtgggcacgtgccatcatcgaaagtgaccaggagcaaggtcgcaagctgaggagcaccatgctggagctggagaagcaaggcctggaagccatggaagaaatcctgaccagctccgagccactggaccctgcggaagtgggggaccttttctatgactgtgttgacacggagattaagttctttaagtgaagtaagcgttccctttccccttcttatttaagacttcccaccttactaaattaccagcaaaacaaaccactctcctgtttgagtaaaatgagaaagttaatatgtggcctccttttctgaagccagatcaaactgttaccttgtgttccaccttgaatctcacagcgtccccttctgcaatgtaggtctccttcctgtgcagtgtaacatgtatcccgttgcctgttgttcggttgtgtgactaattgtggattttaagctgctattattgtatttcagtggcaatggacacattagccttttacaagaggactagagttcatcaagccttgaaaggcaggcttcacagtgccgagttggcgggaaaagcaaattcttttgaagtcttagtctttccctcagtagcggtttctttcaggttaacaagaggcatttgtgcacacacacagggctcttgtgtgtgttgtcaaggggaccctccgtggcctcccgtgagtgcatgcctgtagtgcacagtgtctctacaggtgtcttctggggggcagaaccaattggaaggaagaaagggacccctctccagtcctggctccttcctacatcctgggctcctgaagaagctgtcttcccattttccatgcgctgtgcttatgtgtggtggactgcagagctgcttccacttacaggagagctgataatttgttagctggaacctattcacttccgagattcagacatagccatgctggtggccttctgaatcactgcatggatgtcccaggaggcagctctccccacacagcagcacagccatcacaggattccttgtgtagaaatgattcccagtctagttaccaacagctagtctaggagtaattgaatggccctatggcacagttccacccacagagtagtgaatctctcagccaaggagggaaagaaaaggaagaactcttgactatttagattctagttaaatatctggaatcctagcagtcactacattatctcagcagagagactttaattaaactgatttgtttccaatgtcgggttcacttaaaggatttgacttaccaccagagcatagaaaagcatgcaaggaagaccagatgggcttagcattgggaagacagagggcaaggaggtgatagatggatatagaagcatttctctgcaggataccagttcaggccccaccattcctgccaaggccattacatcccacaaacccaaatacaaagcagctgacttccctggatcttccccccactcctcacacctcacatgtcccaggagctgccttcattcaggcgggtagctgcactgggcatggggtggtggtgggagcttaccgccacctattcaagctctcagctactcctgaaacgggcagagatgatgaacagaagtgtatgtaaatacagcagctagtgggagagcaccagttgggcctaatcctgcctcatcattcttggcaggaatctgcaaatggaaacattgtgagtatcagcaatctgggaagtgacagggttaataactccttcccagaagctgtatcatgagattttgaggggaccgagccctgttacatggatgtgaacagtgaggatcagaggttttatcagaacacattctttttttctaccaactctccagagcgtgagtataggagtgccatgagctttttagtcagcagttttgtaaactctgtatataaaatcattaaccacacattgtgggtgatgggaagacgatttcagctgacagagttaatggcaaccaataatggtggcctgtagctgctaagagcttcacgcaggtttggcctgggctttcactgttggtgaatttagagtgtccttttaggtggggcggctattctaaaagtgtctttctatcactgttaagggggggggaaagtgaggttcgaggatgacgtaggtaactctcccctcccaagtccatgttccaagtggctatgtaaagcaagatgatacagaaagctgctctaaaatctcactgagtgatttcaccttcgcctactatgaaatgtctcatcagacctgacatgtctgagataaccaaggtgattcaggatttgatcaaaagaagtctagtaagaattaattacacagaagcctcctttcatttctatgggccaaacaaaggccatggataaccctacccgctttatgtcattacccattgggaaacacaatggctacttctgttagggtacattgaccttggtcaagcatcttaaagaaggcaaccctaattgagagctgtcttggctaatactctgcaccacaattgtgatgtcctagtcctaccactagagggcatggtacagcctggcaaaagttaaaaggggtgtggcagctcccatcaggtctggaggtggtctataagcacagttgacagttgtgcattgggatgggtggagaaagacgacaagagagcagagaatctgctgatgtggctgcgcttacttttagtgactttatgtacttatattaacagctggaaataggttgttgggttttgagcaggctgttatagtgaggaatgttcatttttaaatgttcctaacagattttgcttttgaaaaatgcttgttacatgaataatttgtggaccagggattgcttttctgaaggcagtatagggaacatgaatattcaagatgaaatacaaaaattatgtttaagggtcatagtgtataagtagcttcctaggaaaccctttgtgtatcttttccgcatcttgctcccatcagtcttgactgtgttaatgtatagaaatccctgttctttctatgccaccctagcgtcgattatctgatgggacgaagggtaccgag

SEQ ID NO: 451678 - DNA, 3966 bp, Homo sapiens
cgccactgcagctgcagcccccgaggtcgccgcagtaatccggacccggcagcacccgcaccctcggcggccgcagcctcagcaccgcagagcggagagcggagcccggagcccgccgccccaggatggctgcagctcctccaagttactgttttgttgccttccctccacgtgctaaggatggtctggtggtatttgggaaaaattcagcccggcccagagatgaagtgcaagaggttgtgtatttctcggctgctgatcacgaaccggagagcaaggttgagtgcacttacatttcaatcgaccaagttccaaggacctatgccataatgataagcagacccgcctggctctggggagcagaaatgggagccaatgaacatggagtgtgcatagccaatgaagccatcaacaccagagagccagctgccgagatagaagccttgctggggatggatctggtcaggcttggtttagaaagaggggaaacagctaaagaagccttagatgtcattgtctccttgttggaagaacatggacaaggtgggaattactttgaagatgcaaactcctgccacagcttccaaagtgcatatctgattgtggatcgtgatgaagcctgggtgctcgagaccatagggaagtactgggctgccgagaaagtcacagagggagtgaggtgcatttgcagtcagctttcgctcaccactaagatggatgcagagcatccggaactcaggagttacgctcagagccaaggttggtggacgggagagggcgagttcaatttttccgaagtcttttctccagttgaggatcatctagactgcggtgctggcaaagacagcttagaaaaacaagaagaaagcatcacagtgcagactatgatgaacaccttacgggacaaagccagcggagtgtgcatagactctgagtttttcctcaccacagccagtggagtgtctgtcctgccgcagaatagaagctctccgtgcattcactacttcactggaacccctgatccttccaggtccatattcaagcctttcatctttgttgatgacgtaaaacttgtccccaaaacacagtctccctgttttggggatgacgaccctgccaaaaaggagcctcggttccaggagaaaccagaccgccggcatgagctgtacaaagcccacgagtgggcacgtgccatcatcgaaagtgaccaggagcaaggtcgcaagctgaggagcaccatgctggagctggagaagcaaggcctggaagccatggaagaaatcctgaccagctccgagccactggaccctgcggaagtgggggaccttttctatgactgtgttgacacggagattaagttctttaagtgaagtaagcgttccctttccccttcttatttaagacttcccaccttactaaattaccagcaaaacaaaccactctcctgtttgagtaaaatgagaaagttaatatgtggcctccttttctgaagccagatcaaactgttaccttgtgttccaccttgaatctcacagcgtccccttctgcaatgtaggtctccttcctgtgcagtgtaacatgtatcccgttgcctgttgttcggttgtgtgactaattgtggattttaagctgctattattgtatttcagtggcaatggacacattagccttttacaagaggactagagttcatcaagccttgaaaggcaggcttcacagtgccgagttggcgggaaaagcaaattcttttgaagtcttagtctttccctcagtagcggtttctttcaggttaacaagaggcatttgtgcacacacacagggctcttgtgtgtgttgtcaaggggaccctccgtggcctcccgtgagtgcatgcctgtagtgcacagtgtctctacaggtgtcttctggggggcagaaccaattggaaggaagaaagggacccctctccagtcctggctccttcctacatcctgggctcctgaagaagctgtcttcccattttccatgcgctgtgcttatgtgtggtggactgcagagctgcttccacttacaggagagctgataatttgttagctggaacctattcacttccgagattcagacatagccatgctggtggccttctgaatcactgcatggatgtcccaggaggcagctctccccacacagcagcacagccatcacaggattccttgtgtagaaatgattcccagtctagttaccaacagctagtctaggagtaattgaatggccctatggcacagttccacccacagagtagtgaatctctcagccaaggagggaaagaaaaggaagaactcttgactatttagattctagttaaatatctggaatcctagcagtcactacattatctcagcagagagactttaattaaactgatttgtttccaatgtcgggttcacttaaaggatttgacttaccaccagagcatagaaaagcatgcaaggaagaccagatgggcttagcattgggaagacagagggcaaggaggtgatagatggatatagaagcatttctctgcaggataccagttcaggccccaccattcctgccaaggccattacatcccacaaacccaaatacaaagcagctgacttccctggatcttccccccactcctcacacctcacatgtcccaggagctgccttcattcaggcgggtagctgcactgggcatggggtggtggtgggagcttaccgccacctattcaagctctcagctactcctgaaacgggcagagatgatgaacagaagtgtatgtaaatacagcagctagtgggagagcaccagttgggcctaatcctgcctcatcattcttggcaggaatctgcaaatggaaacattgtgagtatcagcaatctgggaagtgacagggttaataactccttcccagaagctgtatcatgagattttgaggggaccgagccctgttacatggatgtgaacagtgaggatcagaggttttatcagaacacattctttttttctaccaactctccagagcgtgagtataggagtgccatgagctttttagtcagcagttttgtaaactctgtatataaaatcattaaccacacattgtgggtgatgggaagacgatttcagctgacagagttaatggcaaccaataatggtggcctgtagctgctaagagcttcacgcaggtttggcctgggctttcactgttggtgaatttagagtgtccttttaggtggggcggctattctaaaagtgtctttctatcactgttaagggggggggaaagtgaggttcgaggatgacgtaggtaactctcccctcccaagtccatgttccaagtggctatgtaaagcaagatgatacagaaagctgctctaaaatctcactgagtgatttcaccttcgcctactatgaaatgtctcatcagacctgacatgtctgagataaccaaggtgattcaggatttgatcaaaagaagtctagtaagaattaattacacagaagcctcctttcatttctatgggccaaacaaaggccatggataaccctacccgctttatgtcattacccattgggaaacacaatggctacttctgttagggtacattgaccttggtcaagcatcttaaagaaggcaaccctaattgagagctgtcttggctaatactctgcaccacaattgtgatgtcctagtcctaccactagagggcatggtacagcctggcaaaagttaaaaggggtgtggcagctcccatcaggtctggaggtggtctataagcacagttgacagttgtgcattgggatgggtggagaaagacgacaagagagcagagaatctgctgatgggagcaagactggccagtttgcgtcacatcagttggggattttatttctgttagcagaaaaatagaattttgtgtgtgtcatagttgagttctcacgagatctgatgggagaagatg

SEQ ID NO: 451679 - DNA, 1223 bp, Homo sapiens
cgccactgcagctgcagcccccgaggtcgccgcagtaatccggacccggcagcacccgcaccctcggcggccgcagcctcagcaccgcagagcggagagcggagcccggagcccgccgccccaggatggctgcagctcctccaagttactgttttgttgccttccctccacgtgctaaggatggtctggtggtatttgggaaaaattcagcccggcccagagatgaagtgcaagaggttgtgtatttctcggctgctgatcacgaaccggagagcaaggttgagtgcacttacatttcaatcgaccaagttccaaggacctatgccataatgataagcagacccgcctggctctggggagcagaaatgggagccaatgaacatggagtgtgcatagccaatgaagccatcaacaccagagagccagctgccgagatagaagccttgctggggatggatctggtcaggcttggtttagaaagaggggaaacagctaaagaagccttagatgtcattgtctccttgttggaagaacatggacaaggtgggaattactttgaagatgcaaactcctgccacagcttccaaagtgcatatctgattgtggatcgtgatgaagcctgggtgctcgagaccatagggaagtactgggctgccgagaaagtcacagagggagtgaggtgcatttgcagtcagctttcgctcaccactaagatggatgcagagcatccggaactcaggagttacgctcagagccaaggttggtggacgggagagggcgagttcaatttttccgaagtcttttctccagttgaggatcatctagactgcggtgctggcaaagacagcttagaaaaacaagaaggtgagttagtctctccctcacgattctccttctcataccctttctcttgcagctgtttctgagaacttgtctgaacttagaagggtgaacaaaaaggaatacagaatagtccttgtatgtaaagaccaacttctgctaaaagtccctgatgtgcaggcaagaaaacaacttgtatttatttttacatggtgcttcctcatccctggaggtttcctgctcctacccatgttattctcctttaatctctgatgtcattgtgttgccttttgtaatacttactgcagccatcctcatacatcagtaattatatatttgactcatctttccctgccccgctagcctgctgggacttgagggca

SEQ ID NO: 451680 - DNA, 487 bp, Homo sapiens
gcgagctcggtaccggagacacttacgcgagacatagggaagtactgggctgccgagaaagtcacagagggagtgaggtgcatttgcagtcagctttcgctcaccactaagatggatgcagagcatccggaactcaggagttacgctcagagccaaggttggtggacgggagagggcgagttcaatttttccgaagtcttttctccagttgaggatcatctagactgcggtgctggcaaagacagcttagaaaaacaagaagaaagcatcacagtgcagactatgatgaacaccttacgggacaaagccagcggagtgtgcatagactctgagtttttcctcaccacagccagtggagtgtctgtcctgccgcagaatagaagctctccgtgcattcactacttcactggaacccctgatccttccaggtccatattcaagcctctcatctttgttgatgacgtaagtgtctccgggccgagctgga

SEQ ID NO: 451681 - DNA, 5674 bp, Homo sapiens
cgccactgcagctgcagcccccgaggtcgccgcagtaatccggacccggcagcacccgcaccctcggcggccgcagcctcagcaccgcagagcggagagcggagcccggagcccgccgccccaggatggctgcagctcctccaagttactgttttgttgccttccctccacgtgctaaggatggtctggtggtatttgggaaaaattcagcccggcccagagatgaagtgcaagaggttgtgtatttctcggctgctgatcacgaaccggagagcaaggttgagatttaagttctcaaaggtggctgcaccaaatcccatcccaagtgcccttcttccagtgtgaagggcactccttccacgaagagggaaagtgcacttacatttcaatcgaccaagttccaaggacctatgccataatgataagcagacccgcctggctctggggagcagaaatgggagccaatgaacatggagtgtgcatagccaatgaagccatcaacaccagagagccagctgccgagatagaagccttgctggggatggatctggtcaggcttggtttagaaagaggggaaacagctaaagaagccttagatgtcattgtctccttgttggaagaacatggacaaggtgggaattactttgaagatgcaaactcctgccacagcttccaaagtgcatatctgattgtggatcgtgatgaagcctgggtgctcgagaccatagggaagtactgggctgccgagaaagtcacagagggagtgaggtgcatttgcagtcagctttcgctcaccactaagatggatgcagagcatccggaactcaggagttacgctcagagccaaggttggtggacgggagagggcgagttcaatttttccgaagtcttttctccagttgaggatcatctagactgcggtgctggcaaagacagcttagaaaaacaagaagaaagcatcacagtgcagactatgatgaacaccttacgggacaaagccagcggagtgtgcatagactctgagtttttcctcaccacagccagtggagtgtctgtcctgccgcagaatagaagctctccgtgcattcactacttcactggaacccctgatccttccaggtccatattcaagcctttcatctttgttgatgacgtaaaacttgtccccaaaacacagtctccctgttttggggatgacgaccctgccaaaaaggagcctcggttccaggagaaaccagaccgccggcatgagctgtacaaagcccacgagtgggcacgtgccatcatcgaaagtgaccaggagcaaggtcgcaagctgaggagcaccatgctggagctggagaagcaaggcctggaagccatggaagaaatcctgaccagctccgagccactggaccctgcggaagtgggggaccttttctatgactgtgttgacacggagattaagttctttaagtgaagtaagcgttccctttccccttcttatttaagacttcccaccttactaaattaccagcaaaacaaaccactctcctgtttgagtaaaatgagaaagttaatatgtggcctccttttctgaagccagatcaaactgttaccttgtgttccaccttgaatctcacagcgtccccttctgcaatgtaggtctccttcctgtgcagtgtaacatgtatcccgttgcctgttgttcggttgtgtgactaattgtggattttaagctgctattattgtatttcagtggcaatggacacattagccttttacaagaggactagagttcatcaagccttgaaaggcaggcttcacagtgccgagttggcgggaaaagcaaattcttttgaagtcttagtctttccctcagtagcggtttctttcaggttaacaagaggcatttgtgcacacacacagggctcttgtgtgtgttgtcaaggggaccctccgtggcctcccgtgagtgcatgcctgtagtgcacagtgtctctacaggtgtcttctggggggcagaaccaattggaaggaagaaagggacccctctccagtcctggctccttcctacatcctgggctcctgaagaagctgtcttcccattttccatgcgctgtgcttatgtgtggtggactgcagagctgcttccacttacaggagagctgataatttgttagctggaacctattcacttccgagattcagacatagccatgctggtggccttctgaatcactgcatggatgtcccaggaggcagctctccccacacagcagcacagccatcacaggattccttgtgtagaaatgattcccagtctagttaccaacagctagtctaggagtaattgaatggccctatggcacagttccacccacagagtagtgaatctctcagccaaggagggaaagaaaaggaagaactcttgactatttagattctagttaaatatctggaatcctagcagtcactacattatctcagcagagagactttaattaaactgatttgtttccaatgtcgggttcacttaaaggatttgacttaccaccagagcatagaaaagcatgcaaggaagaccagatgggcttagcattgggaagacagagggcaaggaggtgatagatggatatagaagcatttctctgcaggataccagttcaggccccaccattcctgccaaggccattacatcccacaaacccaaatacaaagcagctgacttccctggatcttccccccactcctcacacctcacatgtcccaggagctgccttcattcaggcgggtagctgcactgggcatggggtggtggtgggagcttaccgccacctattcaagctctcagctactcctgaaacgggcagagatgatgaacagaagtgtatgtaaatacagcagctagtgggagagcaccagttgggcctaatcctgcctcatcattcttggcaggaatctgcaaatggaaacattgtgagtatcagcaatctgggaagtgacagggttaataactccttcccagaagctgtatcatgagattttgaggggaccgagccctgttacatggatgtgaacagtgaggatcagaggttttatcagaacacattctttttttctaccaactctccagagcgtgagtataggagtgccatgagctttttagtcagcagttttgtaaactctgtatataaaatcattaaccacacattgtgggtgatgggaagacgatttcagctgacagagttaatggcaaccaataatggtggcctgtagctgctaagagcttcacgcaggtttggcctgggctttcactgttggtgaatttagagtgtccttttaggtggggcggctattctaaaagtgtctttctatcactgttaagggggggggaaagtgaggttcgaggatgacgtaggtaactctcccctcccaagtccatgttccaagtggctatgtaaagcaagatgatacagaaagctgctctaaaatctcactgagtgatttcaccttcgcctactatgaaatgtctcatcagacctgacatgtctgagataaccaaggtgattcaggatttgatcaaaagaagtctagtaagaattaattacacagaagcctcctttcatttctatgggccaaacaaaggccatggataaccctacccgctttatgtcattacccattgggaaacacaatggctacttctgttagggtacattgaccttggtcaagcatcttaaagaaggcaaccctaattgagagctgtcttggctaatactctgcaccacaattgtgatgtcctagtcctaccactagagggcatggtacagcctggcaaaagttaaaaggggtgtggcagctcccatcaggtctggaggtggtctataagcacagttgacagttgtgcattgggatgggtggagaaagacgacaagagagcagagaatctgctgatgtggctgcgcttacttttagtgactttatgtacttatattaacagctggaaataggttgttgggttttgagcaggctgttatagtgaggaatgttcatttttaaatgttcctaacagattttgcttttgaaaaatgcttgttacatgaataatttgtggaccagggattgcttttctgaaggcagtatagggaacatgaatattcaagatgaaatacaaaaattatgtttaagggtcatagtgtataagtagcttcctaggaaaccctttgtgtatcttttcagactggggtgggggctgagcatgcttgtgcagaaagaagccatagccagaaaggacagaatctctcccccactcccttgccccataaccaaacataagctagctagtcttgtctaatagatgggatttactataggtgaagatagccctcatattcaaggacagaagctctggcaggagtaaattagcaaagcagaaatagtaccctttcattcttggaggtgctttgaaattttaggtagaatataatcgaaattatggaggttccttagtgctcaataatataagacctggtgttattagaacgagtctttcttataaactaacagagcaggtatatgcctgttagaccttagctgtggggttcctttactattgggtgaatcattaggtataaaaaataatcatcaaccaggcaaattactttgcttcctagctgatgtcatcccacattggtacaggtgttattcagtactgggtggttcagcagggaagccgggtgggaccagtgtgtctgtcatgaaaccactaactgcattcctgactgaagagccatctgtcatttattggggaaggtcttcagttgagctctcagccttaggaaggaagcacgtggaggagggacggaggaggttcccttgctgggcatgcttcgtagagggccaggagcagcaggtcatgtgcacatgccgttgcagcacaagcttatgcttcccgtagccgtggcttttcattctgcacagtcccaggtcccagctcccctcttatggtttctgtcataatgtgctttatctgattgactccaaacatcccgaaatgtcacctgcagatttctcgtgggaaccaatatgtacatgtttgcaattatgctgtgagaatttaaatgtgttagatggaaaatgctattggcagggaataataataaaaaaaaaagaaaatcattctgtttcctgcagtgggaactggccatgtagtcttaacagtcttttgtacaaatatctacaaagcagataatatccctatccagtgcttgcccttggaattgtctctaaatgcatcaagcatacaataaaaaaaactgaaattaaaaaaaaaaaaaaaaaaaaaaaaaaaaaaaaaaaaaaaaagaaaaaaaaaaaaaaaaaaaaaaaaaaaaaaaaaaaaaccccttgtggcccgcttggcccaatccatttttagattggagaaggtttttccttgcggccgaatttggggctaatttgcccattcccccttatggggggtgaattaacattcaatggcccgcggtttaaaacggtggggccttggaaaaaccttggggtacccaatttaaatcgctttgaaaaacatccccttttgcaagttggggatatagcaaaggcccccccagatcgccttcccaacatttgcacaccttgatgtggaatgaaaattgaacctttaattttttgt

SEQ ID NO: 451682 - DNA, 5218 bp, Homo sapiens
cgccactgcagctgcagcccccgaggtcgccgcagtaatccggacccggcagcacccgcaccctcggcggccgcagcctcagcaccgcagagcggagagcggagcccggagcccgccgccccaggatggctgcagctcctccaagttactgttttgttgccttccctccacgtgctaaggatggtctggtggtatttgggaaaaattcagcccggcccagagatgaagtgcaagaggttgtgtatttctcggctgctgatcacgaaccggagagcaaggttgagtgcacttacatttcaatcgaccaagttccaaggacctatgccataatgataagcagacccgcctggctctggggagcagaaatgggagccaatgaacatggagtgtgcatagccaatgaagccatcaacaccagagagccagctgccgagatagaagccttgctggggatggatctggtcaggcttggtttagaaagaggggaaacagctaaagaagccttagatgtcattgtctccttgttggaagaacatggacaaggtgggaattactttgaagatgcaaactcctgccacagcttccaaagtgcatatctgattgtggatcgtgatgaagcctgggtgctcgagaccatagggaagtactgggctgccgagaaagtcacagagggagtgaggtgcatttgcagtcagctttcgctcaccactaagatggatgcagagcatccggaactcaggagttacgctcagagccaaggttggtggacgggagagggcgagttcaatttttccgaagtcttttctccagttgaggatcatctagactgcggtgctggcaaagacagcttagaaaaacaagaagaaagcatcacagtgcagactatgatgaacaccttacgggacaaagccagcggagtgtgcatagactctgagtttttcctcaccacagccagtggagtgtctgtcctgccgcagaatagaagctctccgtgcattcactacttcactggaacccctgatccttccaggtccatattcaagcctttcatctttgttgatgacgtaaaacttgtccccaaaacacagtctccctgttttggggatgacgaccctgccaaaaaggagcctcggttccaggagaaaccagaccgccggcatgagctgtacaaagcccacgagtgggcacgtgccatcatcgaaagtgaccaggagcaaggtcgcaagctgaggagcaccatgctggagctggagaagcaaggcctggaagccatggaagaaatcctgaccagctccgagccactggaccctgcggaagtgggggaccttttctatgactgtgttgacacggagattaagttctttaagtgaagtaagcgttccctttccccttcttatttaagacttcccaccttactaaattaccagcaaaacaaaccactctcctgtttgagtaaaatgagaaagttaatatgtggcctccttttctgaagccagatcaaactgttaccttgtgttccaccttgaatctcacagcgtccccttctgcaatgtaggtctccttcctgtgcagtgtaacatgtatcccgttgcctgttgttcggttgtgtgactaattgtggattttaagctgctattattgtatttcagtggcaatggacacattagccttttacaagaggactagagttcatcaagccttgaaaggcaggcttcacagtgccgagttggcgggaaaagcaaattcttttgaagtcttagtctttccctcagtagcggtttctttcaggttaacaagaggcatttgtgcacacacacagggctcttgtgtgtgttgtcaaggggaccctccgtggcctcccgtgagtgcatgcctgtagtgcacagtgtctctacaggtgtcttctggggggcagaaccaattggaaggaagaaagggacccctctccagtcctggctccttcctacatcctgggctcctgaagaagctgtcttcccattttccatgcgctgtgcttatgtgtggtggactgcagagctgcttccacttacaggagagctgataatttgttagctggaacctattcacttccgagattcagacatagccatgctggtggccttctgaatcactgcatggatgtcccaggaggcagctctccccacacagcagcacagccatcacaggattccttgtgtagaaatgattcccagtctagttaccaacagctagtctaggagtaattgaatggccctatggcacagttccacccacagagtagtgaatctctcagccaaggagggaaagaaaaggaagaactcttgactatttagattctagttaaatatctggaatcctagcagtcactacattatctcagcagagagactttaattaaactgatttgtttccaatgtcgggttcacttaaaggatttgacttaccaccagagcatagaaaagcatgcaaggaagaccagatgggcttagcattgggaagacagagggcaaggaggtgatagatggatatagaagcatttctctgcaggataccagttcaggccccaccattcctgccaaggccattacatcccacaaacccaaatacaaagcagctgacttccctggatcttccccccactcctcacacctcacatgtcccaggagctgccttcattcaggcgggtagctgcactgggcatggggtggtggtgggagcttaccgccacctattcaagctctcagctactcctgaaacgggcagagatgatgaacagaagtgtatgtaaatacagcagctagtgggagagcaccagttgggcctaatcctgcctcatcattcttggcaggaatctgcaaatggaaacattgtgagtatcagcaatctgggaagtgacagggttaataactccttcccagaagctgtatcatgagattttgaggggaccgagccctgttacatggatgtgaacagtgaggatcagaggttttatcagaacacattctttttttctaccaactctccagagcgtgagtataggagtgccatgagctttttagtcagcagttttgtaaactctgtatataaaatcattaaccacacattgtgggtgatgggaagacgatttcagctgacagagttaatggcaaccaataatggtggcctgtagctgctaagagcttcacgcaggtttggcctgggctttcactgttggtgaatttagagtgtccttttaggtggggcggctattctaaaagtgtctttctatcactgttaagggggggggaaagtgaggttcgaggatgacgtaggtaactctcccctcccaagtccatgttccaagtggctatgtaaagcaagatgatacagaaagctgctctaaaatctcactgagtgatttcaccttcgcctactatgaaatgtctcatcagacctgacatgtctgagataaccaaggtgattcaggatttgatcaaaagaagtctagtaagaattaattacacagaagcctcctttcatttctatgggccaaacaaaggccatggataaccctacccgctttatgtcattacccattgggaaacacaatggctacttctgttagggtacattgaccttggtcaagcatcttaaagaaggcaaccctaattgagagctgtcttggctaatactctgcaccacaattgtgatgtcctagtcctaccactagagggcatggtacagcctggcaaaagttaaaaggggtgtggcagctcccatcaggtctggaggtggtctataagcacagttgacagttgtgcattgggatgggtggagaaagacgacaagagagcagagaatctgctgatgtggctgcgcttacttttagtgactttatgtacttatattaacagctggaaataggttgttgggttttgagcaggctgttatagtgaggaatgttcatttttaaatgttcctaacagattttgcttttgaaaaatgcttgttacatgaataatttgtggaccagggattgcttttctgaaggcagtatagggaacatgaatattcaagatgaaatacaaaaattatgtttaagggtcatagtgtataagtagcttcctaggaaaccctttgtgtatcttttcagactggggtgggggctgagcatgcttgtgcagaaagaagccatagccagaaaggacagaatctctcccccactcccttgccccataaccaaacataagctagctagtcttgtctaatagatgggatttactataggtgaagatagccctcatattcaaggacagaagctctggcaggagtaaattagcaaagcagaaatagtaccctttcattcttggaggtgctttgaaattttaggtagaatataatcgaaattatggaggttccttagtgctcaataatataagacctggtgttattagaacgagtctttcttataaactaacagagcaggtatatgcctgttagaccttagctgtggggttcctttactattgggtgaatcattaggtataaaaaataatcatcaaccaggcaaattactttgcttcctagctgatgtcatcccacattggtacaggtgttattcagtactgggtggttcagcagggaagccgggtgggaccagtgtgtctgtcatgaaaccactaactgcattcctgactgaagagccatctgtcatttattggggaaggtcttcagttgagctctcagccttaggaaggaagcacgtggaggagggacggaggaggttcccttgctgggcatgcttcgtagagggccaggagcagcaggtcatgtgcacatgccgttgcagcacaagcttatgcttcccgtagccgtggcttttcattctgcacagtcccaggtcccagctcccctcttatggtttctgtcataatgtgctttatctgattgactccaaacatcccgaaatgtcacctgcagatttctcgtgggaaccaatatgtacatgtttgcaattatgctgtgagaatttaaatgtgttagatggaaaatgctattggcagggaataataataaaaaaaaaagaaaatcattctgtttcctgcagtgggaactggccatgtagtcttaacagtcttttgtacaaatatctacaaagcagataatatccctatccagtgcttgcccttggaattgtctctaaatgcatcaagcatacaataaaaaaaactgaaattaa

SEQ ID NO: 451683 - DNA, 4616 bp, Homo sapiens
gcgagctcggtaccggagacacttacgcgagacatagggaagtactgggctgccgagaaagtcacagagggagtgaggtgcatttgcagtcagctttcgctcaccactaagatggatgcagagcatccggaactcaggagttacgctcagagccaaggttggtggacgggagagggcgagttcaatttttccgaagtcttttctccagttgaggatcatctagactgcggtgctggcaaagacagcttagaaaaacaagaagaaagcatcacagtgcagactatgatgaacaccttacgggacaaagccagcggagtgtgcatagactctgagtttttcctcaccacagccagtggagtgtctgtcctgccgcagaatagaagctctccgtgcattcactacttcactggaacccctgatccttccaggtccatattcaagcctttcatctttgttgatgacgtaaaacttgtccccaaaacacagtctccctgttttggggatgacgaccctgccaaaaaggagcctcggttccaggagaaaccagaccgccggcatgagctgtacaaagcccacgagtgggcacgtgccatcatcgaaagtgaccaggagcaaggtcgcaagctgaggagcaccatgctggagctggagaagcaaggcctggaagccatggaagaaatcctgaccagctccgagccactggaccctgcggaagtgggggaccttttctatgactgtgttgacacggagattaagttctttaagtgaagtaagcgttccctttccccttcttatttaagacttcccaccttactaaattaccagcaaaacaaaccactctcctgtttgagtaaaatgagaaagttaatatgtggcctccttttctgaagccagatcaaactgttaccttgtgttccaccttgaatctcacagcgtccccttctgcaatgtaggtctccttcctgtgcagtgtaacatgtatcccgttgcctgttgttcggttgtgtgactaattgtggattttaagctgctattattgtatttcagtggcaatggacacattagccttttacaagaggactagagttcatcaagccttgaaaggcaggcttcacagtgccgagttggcgggaaaagcaaattcttttgaagtcttagtctttccctcagtagcggtttctttcaggttaacaagaggcatttgtgcacacacacagggctcttgtgtgtgttgtcaaggggaccctccgtggcctcccgtgagtgcatgcctgtagtgcacagtgtctctacaggtgtcttctggggggcagaaccaattggaaggaagaaagggacccctctccagtcctggctccttcctacatcctgggctcctgaagaagctgtcttcccattttccatgcgctgtgcttatgtgtggtggactgcagagctgcttccacttacaggagagctgataatttgttagctggaacctattcacttccgagattcagacatagccatgctggtggccttctgaatcactgcatggatgtcccaggaggcagctctccccacacagcagcacagccatcacaggattccttgtgtagaaatgattcccagtctagttaccaacagctagtctaggagtaattgaatggccctatggcacagttccacccacagagtagtgaatctctcagccaaggagggaaagaaaaggaagaactcttgactatttagattctagttaaatatctggaatcctagcagtcactacattatctcagcagagagactttaattaaactgatttgtttccaatgtcgggttcacttaaaggatttgacttaccaccagagcatagaaaagcatgcaaggaagaccagatgggcttagcattgggaagacagagggcaaggaggtgatagatggatatagaagcatttctctgcaggataccagttcaggccccaccattcctgccaaggccattacatcccacaaacccaaatacaaagcagctgacttccctggatcttccccccactcctcacacctcacatgtcccaggagctgccttcattcaggcgggtagctgcactgggcatggggtggtggtgggagcttaccgccacctattcaagctctcagctactcctgaaacgggcagagatgatgaacagaagtgtatgtaaatacagcagctagtgggagagcaccagttgggcctaatcctgcctcatcattcttggcaggaatctgcaaatggaaacattgtgagtatcagcaatctgggaagtgacagggttaataactccttcccagaagctgtatcatgagattttgaggggaccgagccctgttacatggatgtgaacagtgaggatcagaggttttatcagaacacattctttttttctaccaactctccagagcgtgagtataggagtgccatgagctttttagtcagcagttttgtaaactctgtatataaaatcattaaccacacattgtgggtgatgggaagacgatttcagctgacagagttaatggcaaccaataatggtggcctgtagctgctaagagcttcacgcaggtttggcctgggctttcactgttggtgaatttagagtgtccttttaggtggggcggctattctaaaagtgtctttctatcactgttaagggggggggaaagtgaggttcgaggatgacgtaggtaactctcccctcccaagtccatgttccaagtggctatgtaaagcaagatgatacagaaagctgctctaaaatctcactgagtgatttcaccttcgcctactatgaaatgtctcatcagacctgacatgtctgagataaccaaggtgattcaggatttgatcaaaagaagtctagtaagaattaattacacagaagcctcctttcatttctatgggccaaacaaaggccatggataaccctacccgctttatgtcattacccattgggaaacacaatggctacttctgttagggtacattgaccttggtcaagcatcttaaagaaggcaaccctaattgagagctgtcttggctaatactctgcaccacaattgtgatgtcctagtcctaccactagagggcatggtacagcctggcaaaagttaaaaggggtgtggcagctcccatcaggtctggaggtggtctataagcacagttgacagttgtgcattgggatgggtggagaaagacgacaagagagcagagaatctgctgatgtggctgcgcttacttttagtgactttatgtacttatattaacagctggaaataggttgttgggttttgagcaggctgttatagtgaggaatgttcatttttaaatgttcctaacagattttgcttttgaaaaatgcttgttacatgaataatttgtggaccagggattgcttttctgaaggcagtatagggaacatgaatattcaagatgaaatacaaaaattatgtttaagggtcatagtgtataagtagcttcctaggaaaccctttgtgtatcttttcagactggggtgggggctgagcatgcttgtgcagaaagaagccatagccagaaaggacagaatctctcccccactcccttgccccataaccaaacataagctagctagtcttgtctaatagatgggatttactataggtgaagatagccctcatattcaaggacagaagctctggcaggagtaaattagcaaagcagaaatagtaccctttcattcttggaggtgctttgaaattttaggtagaatataatcgaaattatggaggttccttagtgctcaataatataagacctggtgttattagaacgagtctttcttataaactaacagagcaggtatatgcctgttagaccttagctgtggggttcctttactattgggtgaatcattaggtataaaaaataatcatcaaccaggcaaattactttgcttcctagctgatgtcatcccacattggtacaggtgttattcagtactgggtggttcagcagggaagccgggtgggaccagtgtgtctgtcatgaaaccactaactgcattcctgactgaagagccatctgtcatttattggggaaggtcttcagttgagctctcagccttaggaaggaagcacgtggaggagggacggaggaggttcccttgctgggcatgcttcgtagagggccaggagcagcaggtcatgtgcacatgccgttgcagcacaagcttatgcttcccgtagccgtggcttttcattctgcacagtcccaggtcccagctcccctcttatggtttctgtcataatgtgctttatctgattgactccaaacatcccgaaatgtcacctgcagatttctcgtgggaaccaatatgtacatgtttgcaattatgctgtgagaatttaaatgtgttagatggaaaatgctattggcagggaataataataaaaaaaaaagaaaatcattctgtttcctgcagtgggaactggccatgtagtcttaacagtcttttgtacaaatatctacaaagcagataatatccctatccagtgcttgcccttggaattgtctctaaatgcatcaagcatacaataaaaaaaactgaaattaa

SEQ ID NO: 451684 - DNA, 4930 bp, Homo sapiens
cgccactgcagctgcagcccccgaggtcgccgcagtaatccggacccggcagcacccgcaccctcggcggccgcagcctcagcaccgcagagcggagagcggagcccggagcccgccgccccaggatggctgcagctcctccaagttactgttttgttgccttccctccacgtgctaaggatggtctggtggtatttgggaaaaattcagcccggcccagagatgaagtgcaagaggttgtgtatttctcggctgctgatcacgaaccggagagcaaggttgagtgcacttacatttcaatcgaccaagttccaaggacctatgccataatgataagcagacccgcctggctctggggagcagaaatgggagccaatgaacatggagtgtgcatagccaatgaagccatcaacaccagagagccagctgccgagatagaagccttgctggggatggatctggtcaggcttggtttagaaagaggggaaacagctaaagaagccttagatgtcattgtctccttgttggaagaacatggacaaggtgggaattactttgaagatgcaaactcctgccacagcttccaaagtgcatatctgattgtggatcgtgatgaagcctgggtgctcgagaccatagggaagtactgggctgccgagaaagtcacagagggagtgaggtgcatttgcagtcagctttcgctcaccactaagatggatgcagagcatccggaactcaggagttacgctcagagccaaggttggtggacgggagagggcgagttcaatttttccgaagtcttttctccagttgaggatcatctagactgcggtgctggcaaagacagcttagaaaaacaagaagaaagcatcacagtgcagactatgatgaacaccttacgggacaaagccagcggagtgtgcatagactctgagtttttcctcaccacagccagtggagtgtctgtcctgccgcagaatagaagctctccgtgcattcactacttcactggaacccctgatccttccaggtccatattcaagcctttcatctttgttgatgacgtaaaacttgtccccaaaacacagtctccctgttttggggatgacgaccctgccaaaaaggagcctcggttccaggagaaaccagaccgccggcatgagctgtacaaagcccacgagtgggcacgtgccatcatcgaaagtgaccaggagcaaggtcgcaagctgaggagcaccatgctggagctggagaagcaaggcctggaagccatggaagaaatcctgaccagctccgagccactggaccctgcggaagtgggggaccttttctatgactgtgttgacacggagattaagttctttaagtgaagtaagcgttccctttccccttcttatttaagacttcccaccttactaaattaccagcaaaacaaaccactctcctgtttgagtaaaatgagaaagttaatatgtggcctccttttctgaagccagatcaaactgttaccttgtgttccaccttgaatctcacagcgtccccttctgcaatgtaggtctccttcctgtgcagtgtaacatgtatcccgttgcctgttgttcggttgtgtgactaattgtggattttaagctgctattattgtatttcagtggcaatggacacattagccttttacaagaggactagagttcatcaagccttgaaaggcaggcttcacagtgccgagttggcgggaaaagcaaattcttttgaagtcttagtctttccctcagtagcggtttctttcaggttaacaagaggcatttgtgcacacacacagggctcttgtgtgtgttgtcaaggggaccctccgtggcctcccgtgagtgcatgcctgtagtgcacagtgtctctacaggtgtcttctggggggcagaaccaattggaaggaagaaagggacccctctccagtcctggctccttcctacatcctgggctcctgaagaagctgtcttcccattttccatgcgctgtgcttatgtgtggtggactgcagagctgcttccacttacaggagagctgataatttgttagctggaacctattcacttccgagattcagacatagccatgctggtggccttctgaatcactgcatggatgtcccaggaggcagctctccccacacagcagcacagccatcacaggattccttgtgtagaaatgattcccagtctagttaccaacagctagtctaggagtaattgaatggccctatggcacagttccacccacagagtagtgaatctctcagccaaggagggaaagaaaaggaagaactcttgactatttagattctagttaaatatctggaatcctagcagtcactacattatctcagcagagagactttaattaaactgatttgtttccaatgtcgggttcacttaaaggatttgacttaccaccagagcatagaaaagcatgcaaggaagaccagatgggcttagcattgggaagacagagggcaaggaggtgatagatggatatagaagcatttctctgcaggataccagttcaggccccaccattcctgccaaggccattacatcccacaaacccaaatacaaagcagctgacttccctggatcttccccccactcctcacacctcacatgtcccaggagctgccttcattcaggcgggtagctgcactgggcatggggtggtggtgggagcttaccgccacctattcaagctctcagctactcctgaaacgggcagagatgatgaacagaagtgtatgtaaatacagcagctagtgggagagcaccagttgggcctaatcctgcctcatcattcttggcaggaatctgcaaatggaaacattgtgagtatcagcaatctgggaagtgacagggttaataactccttcccagaagctgtatcatgagattttgaggggaccgagccctgttacatggatgtgaacagtgaggatcagaggttttatcagaacacattctttttttctaccaactctccagagcgtgagtataggagtgccatgagctttttagtcagcagttttgtaaactctgtatataaaatcattaaccacacattgtgggtgatgggaagacgatttcagctgacagagttaatggcaaccaataatggtggcctgtagctgctaagagcttcacgcaggtttggcctgggctttcactgttggtgaatttagagtgtccttttaggtggggcggctattctaaaagtgtctttctatcactgttaagggggggggaaagtgaggttcgaggatgacgtaggtaactctcccctcccaagtccatgttccaagtggctatgtaaagcaagatgatacagaaagctgctctaaaatctcactgagtgatttcaccttcgcctactatgaaatgtctcatcagacctgacatgtctgagataaccaaggtgattcaggatttgatcaaaagaagtctagtaagaattaattacacagaagcctcctttcatttctatgggccaaacaaaggccatggataaccctacccgctttatgtcattacccattgggaaacacaatggctacttctgttagggtacattgaccttggtcaagcatcttaaagaaggcaaccctaattgagagctgtcttggctaatactctgcaccacaattgtgatgtcctagtcctaccactagagggcatggtacagcctggcaaaagttaaaaggggtgtggcagctcccatcaggtctggaggtggtctataagcacagttgacagttgtgcattgggatgggtggagaaagacgacaagagagcagagaatctgctgatgtggctgcgcttacttttagtgactttatgtacttatattaacagctggaaataggttgttgggttttgagcaggctgttatagtgaggaatgttcatttttaaatgttcctaacagattttgcttttgaaaaatgcttgttacatgaataatttgtggaccagggattgcttttctgaaggcagtatagggaacatgaatattcaagatgaaatacaaaaattatgtttaagggtcatagtgtataagtagcttcctaggaaaccctttgtgtatcttttcagactggggtgggggctgagcatgcttgtgcagaaagaagccatagccagaaaggacagaatctctcccccactcccttgccccataaccaaacataagctagctagtcttgtctaatagatgggatttactataggtgaagatagccctcatattcaaggacagaagctctggcaggagtaaattagcaaagcagaaatagtaccctttcattcttggaggtgctttgaaattttaggtagaatataatcgaaattatggaggttccttagtgctcaataatataagacctggtgttattagaacgagtctttcttataaactaacagagcaggtatatgcctgttagaccttagctgtggggttcctttactattgggtgaatcattaggtataaaaaataatcatcaaccaggcaaattactttgcttcctagctgatgtcatcccacattggtacaggtgttattcagtactgggtggttcagcagggaagccgggtgggaccagtgtgtctgtcatgaaaccactaactgcattcctgactgaagagccatctgtcatttattggggaaggtcttcagttgagctctcagccttaggaaggaagcacgtggaggagggacggaggaggttcccttgctgggcatgcttcgtagagggccaggagcagcaggtcatgtgcacatgccgttgcagcacaagcttatgcttcccgtagccgtggcttttcattctgcacagtcccagtgtgagctcgcctatttctgcctaatcatgtacattatccaccaaaaatag

SEQ ID NO: 451685 - DNA, 2221 bp, Homo sapiens
cgccactgcagctgcagcccccgaggtcgccgcagtaatccggacccggcagcacccgcaccctcggcggccgcagcctcagcaccgcagagcggagagcggagcccggagcccgccgccccaggatggctgcagctcctccaagttactgttttgttgccttccctccacgtgctaaggatggtctggtggtatttgggaaaaattcagcccggcccagagatgaagtgcaagaggttgtgtatttctcggctgctgatcacgaaccggagagcaaggttgagtgcacttacatttcaatcgaccaagttccaaggacctatgccataatgataagcagacccgcctggctctggggagcagaaatgggagccaatgaacatggagtgtgcatagccaatgaagccatcaacaccagagagccagctgccgagatagaagccttgctggggatggatctggtcaggcttggtttagaaagaggggaaacagctaaagaagccttagatgtcattgtctccttgttggaagaacatggacaaggtgggaattactttgaagatgcaaactcctgccacagcttccaaagtgcatatctgattgtggatcgtgatgaagcctgggtgctcgagaccatagggaagtactgggctgccgagaaagtcacagagggagtgaggtgcatttgcagtcagctttcgctcaccactaagatggatgcagagcatccggaactcaggagttacgctcagagccaaggttggtggacgggagagggcgagttcaatttttccgaagtcttttctccagttgaggatcatctagactgcggtgctggcaaagacagcttagaaaaacaagaagaaagcatcacagtgcagactatgatgaacaccttacgggacaaagccagcggagtgtgcatagactctgagtttttcctcaccacagccagtggagtgtctgtcctgccgcagaatagaagctctccgtgcattcactacttcactggaacccctgatccttccaggtccatattcaagcctttcatctttgttgatgacgtaaaacttgtccccaaaacacagtctccctgttttggggatgacgaccctgccaaaaaggagcctcggttccaggagaaaccagaccgccggcatgagctgtacaaagcccacgagtgggcacgtgccatcatcgaaagtgaccaggagcaaggtcgcaagctgaggagcaccatgctggagctggagaagcaaggcctggaagccatggaagaaatcctgaccagctccgagccactggaccctgcggaagtgggggaccttttctatgactgtgttgacacggagattaagttctttaagtgaagtaagcgttccctttccccttcttatttaagacttcccaccttactaaattaccagcaaaacaaaccactctcctgtttgagtaaaatgagaaagttaatatgtggcctccttttctgaagccagatcaaactgttaccttgtgttccaccttgaatctcacagcgtccccttctgcaatgtaggtctccttcctgtgcagtgtaacatgtatcccgttgcctgttgttcggttgtgtgactaattgtggattttaagctgctattattgtatttcagtggcaatggacacattagccttttacaagaggactagagttcatcaagccttgaaaggcaggcttcacagtgccgagttggcgggaaaagcaaattcttttgaagtcttagtctttccctcagtagcggtttctttcaggtcatgtgcacatgccgttgcagcacaagcttatgcttcccgtagccgtggcttttcattctgcacagtcccaggtcccagctcccctcttatggtttctgtcataatgtgctttatctgattgactccaaacatcccgaaatgtcacctgcagatttctcgtgggaaccaatatgtacatgtttgcaattatgctgtgagaatttaaatgtgttagatggaaaatgctattggcagggaataataataaaaaaaaaagaaaatcattctgtttcctgcagtgggaactggccatgtagtcttaacagtcttttgtacaaatatctacaaagcagataatatccctatccagtgcttgcccttggaattgtctctaaatgcatcaagcatacaataaaaaaaactgaaattaaaaattaacatccaaaaaaat

SEQ ID NO: 451686 - DNA, 150 bp, Homo sapiens
tatacttttgcgagaagacgacagccacattacaagctgccatcccctccccgtttcagtggaccctgtggccaggtgcttttccctatccacaggggtgtttgtgtgtgtgcgcgtgtgcgtttcaataaagtttgtacactttcttaa

SEQ ID NO: 451687 - DNA, 940 bp, Homo sapiens
tgagactgcgcatcgtcactcgctgtaccagtatcgagcctgcttgatctagagtggcttatcaagcggtctggctattgtgactcgtatcccatatgatcagtcctgtcctgctgcctgcttgcttcagcacggaggaccactacagtgctgccgtccccttctggacaaatggcccacaacactgagcaggcatctgggtggcccctgccaggttgatgcccactgctctgccggccactcctgcatctttaccgtctcagggacttccagttgctgccccttcccagaggccgtggcatgcggggatggccatcactgctgcccacggggcttccactgcagtgcagacgggcgatcctgcttccaaagatcaggtaacaactccgtgggtgccatccagtgccctgatagtcagttcgaatgcccggacttctccacgtgctgtgttatggtcgatggctcctgggggtgctgccccatgccccaggcttcctgctgtgaagacagggtgcactgctgtccgcacggtgccttctgcgacctggttcacacccgctgcatcacacccacgggcacccaccccctggcaaagaagctccctgcccagaggactaacagggcagtggccttgtccagctcggtcatgtgtccggacgcacggtcccggtgccctgatggttctacctgctgtgagctgcccagtgggaagtatggctgctgcccaatgcccaacaagcacgtgttgttccgatccctgcactgtggcccagacctgtgtgttgcctgatccgagtaggtctctcaagggaccgaccacggctctccctaagtgctggcccctgggtgtcactgcctcggcgcgcccgcgcacctgccgccaggggcgggggccacagtagtgtggggccatcgtcgggtttcacagctacccccgctg

SEQ ID NO: 451688 - DNA, 687 bp, Homo sapiens
catgatccctagaaatggggtgtggggcgagaggaagcagggaggagagtgatttgagtagaaaagaaacacagcattccaggctggccccacctctatattgataagtagccaatgggagcgggtagccctgatccctggccaatggaaactgaggtaggcgggtcatcgcgctggggtctgtagtctgagcgctacccggttgctgctgcccaaggaccgcggagtcggacgcaggcttcctgctgtgaagacagggtgcactgctgtccgcacggtgccttctgcgacctggttcacacccgctgcatcacacccacgggcacccaccccctggcatggccagcagccaagggggaccagccctcctccagcctgttcctgctgatgtggtcagcagccagggggtaccatccatcctccagccagctcctgctgaggtgatcagcagtcaagcgacaccacccctgctccagcctgctccgcaactgtctgttgacctgacagaagtggaggtcttgggagaagacaatgtggagaacatcaatccaaggacttcagaacaacataggcagggatctgatggtaatcacaccatcccagcatcttcgttgcattcaatgaccaacttcatcagcggactgcagagacttcatggcatgctggattcctgagaccttcatcttc

SEQ ID NO: 451689 - DNA, 153 bp, Homo sapiens
cggacgcgtgggtcgacccacgcgtccccacattacaagctgccatcccctccccgtttcagtggaccctgtggccaggtgcttttccctatccacaggggtgtttgtgtgtgtgcgcgtgtgcgtttcaataaagtttgtacactttcttaa

SEQ ID NO: 451690 - DNA, 2334 bp, Homo sapiens
catgatccctagaaatggggtgtggggcgagaggaagcagggaggagagtgatttgagtagaaaagaaacacagcattccaggctggccccacctctatattgataagtagccaatgggagcgggtagccctgatccctggccaatggaaactgaggtaggcgggtcatcgcgctggggtctgtagtctgagcgctacccggttgctgctgcccaaggaccgcggagtcggacgcaggcagaccatgtggaccctggtgagctgggtggccttaacagcagggctggtggctggaacgcggtgcccagatggtcagttctgccctgtggcctgctgcctggaccccggaggagccagctacagctgctgccgtccccttctggacaaatggcccacaacactgagcaggcatctgggtggcccctgccaggttgatgcccactgctctgccggccactcctgcatctttaccgtctcagggacttccagttgctgccccttcccagaggccgtggcatgcggggatggccatcactgctgcccacggggcttccactgcagtgcagacgggcgatcctgcttccaaagatcaggtaacaactccgtgggtgccatccagtgccctgatagtcagttcgaatgcccggacttctccacgtgctgtgttatggtcgatggctcctgggggtgctgccccatgccccaggcttcctgctgtgaagacagggtgcactgctgtccgcacggtgccttctgcgacctggttcacacccgctgcatcacacccacgggcacccaccccctggcaaagaagctccctgcccagaggactaacagggcagtggccttgtccagctcggtcatgtgtccggacgcacggtcccggtgccctgatggttctacctgctgtgagctgcccagtgggaagtatggctgctgcccaatgcccaacgccacctgctgctccgatcacctgcactgctgcccccaagacactgtgtgtgacctgatccagagtaagtgcctctccaaggagaacgctaccacggacctcctcactaagctgcctgcgcacacagtgggggatgtgaaatgtgacatggaggtgagctgcccagatggctatacctgctgccgtctacagtcgggggcctggggctgctgcccttttacccaggctgtgtgctgtgaggaccacatacactgctgtcccgcggggtttacgtgtgacacgcagaagggtacctgtgaacaggggccccaccaggtgccctggatggagaaggccccagctcacctcagcctgccagacccacaagccttgaagagagatgtcccctgtgataatgtcagcagctgtccctcctccgatacctgctgccaactcacgtctggggagtggggctgctgtccaatcccagaggctgtctgctgctcggaccaccagcactgctgcccccagggctacacgtgtgtagctgaggggcagtgtcagcgaggaagcgagatcgtggctggactggagaagatgcctgcccgccgggcttccttatcccaccccagagacatcggctgtgaccagcacaccagctgcccggtggggcagacctgctgcccgagcctgggtgggagctgggcctgctgccagttgccccatgctgtgtgctgcgaggatcgccagcactgctgcccggctggctacacctgcaacgtgaaggctcgatcctgcgagaaggaagtggtctctgcccagcctgccaccttcctggcccgtagccctcacgtgggtgtgaaggacgtggagtgtggggaaggacacttctgccatgataaccagacctgctgccgagacaaccgacagggctgggcctgctgtccctaccgccagggcgtctgttgtgctgatcggcgccactgctgtcctgctggcttccgctgcgcagccaggggtaccaagtgtttgcgcagggaggccccgcgctgggacgcccctttgagggacccagccttgagacagctgctgtgagggacagtactgaagactctgcagccctcgggaccccactcggagggtgccctctgctcaggcctccctagcacctccccctaaccaaattctccctggaccccattctgagctccccatcaccatgggaggtggggcctcaatctaaggccttccctgtcagaagggggttgtggcaaaagccacattacaagctgccatcccctccccgtttcagtggaccctgtggccaggtgcttttccctatccacaggggtgtttgtgtgtgtgcgcgtgtgcgtttcaataaagtttgtacactttcttaa

SEQ ID NO: 451691 - DNA, 849 bp, Homo sapiens
acaatcccacacaacactagagggcaacatggtggagagcgcgcttatcggacagcgggcttccttatcccaccccagagacatcggctgtgaccagcacaccagctgcccggtggggcagacctgctgcccgagcctgggtgggagctgggcctgctgccagttgccccatgctgtgtgctgcgaggatcgccagcactgctgcccggctggctacacctgcaacgtgaaggctcgatcctgcgagaaggaagtggtctctgcccagcctgccaccttcctggcccgtagccctcacgtgggtgtgaaggacgtggagtgtggggaaggacacttctgccatgataaccagacctgctgccgagacaaccgacagggctgggcctgctgtccctaccgccagggcgtctgttgtgctgatcggcgccactgctgtcctgctggcttccgctgcgcagccaggggtaccaagtgtttgcgcagggaggccccgcgctgggacgcccctttgagggacccagccttgagacagctgctgtgagggacagtactgaagactctgcagccctcgggaccccactcggagggtgccctctgctcaggcctccctagcacctccccctaaccaaattctccctggaccccattctgagctccccatcaccatgggaggtggggcctcaatctaaggccttccctgtcagaagggggttgtggcaaaagccacattacaagctgccatcccctccccgtttcagtggaccctgtggccaggtgcttttccctatccacaggggtgtttgtgtgtgtgcgcgtgtgcgtttcaataaagtttgtacactttcttaa

SEQ ID NO: 451692 - DNA, 2144 bp, Homo sapiens
aaggctgggtttagaatcggccgaggggaccgcggagtcggacgcaggcagaccatgtggaccctggtgagctgggtggccttaacagcagggctggtggctggaacgcggtgcccagatggtcagttctgccctgtggcctgctgcctggaccccggaggagccagctacagctgctgccgtccccttctggacaaatggcccacaacactgagcaggcatctgggtggcccctgccaggttgatgcccactgctctgccggccactcctgcatctttaccgtctcagggacttccagttgctgccccttcccagaggccgtggcatgcggggatggccatcactgctgcccacggggcttccactgcagtgcagacgggcgatcctgcttccaaagatcaggtaacaactccgtgggtgccatccagtgccctgatagtcagttcgaatgcccggacttctccacgtgctgtgttatggtcgatggctcctgggggtgctgccccatgccccaggcttcctgctgtgaagacagggtgcactgctgtccgcacggtgccttctgcgacctggttcacacccgctgcatcacacccacgggcacccaccccctggcaaagaagctccctgcccagaggactaacagggcagtggccttgtccagctcggtcatgtgtccggacgcacggtcccggtgccctgatggttctacctgctgtgagctgcccagtgggaagtatggctgctgcccaatgcccaacgccacctgctgctccgatcacctgcactgctgcccccaagacactgtgtgtgacctgatccagagtaagtgcctctccaaggagaacgctaccacggacctcctcactaagctgcctgcgcacacagtgggggatgtgaaatgtgacatggaggtgagctgcccagatggctatacctgctgccgtctacagtcgggggcctggggctgctgcccttttacccaggctgtgtgctgtgaggaccacatacactgctgtcccgcggggtttacgtgtgacacgcagaagggtacctgtgaacaggggccccaccaggtgccctggatggagaaggccccagctcacctcagcctgccagacccacaagccttgaagagagatgtcccctgtgataatgtcagcagctgtccctcctccgatacctgctgccaactcacgtctggggagtggggctgctgtccaatcccagaggctgtctgctgctcggaccaccagcactgctgcccccagggctacacgtgtgtagctgaggggcagtgtcagcgaggaagcgagatcgtggctggactggagaagatgcctgcccgccgggcttccttatcccaccccagagacatcggctgtgaccagcacaccagctgcccggtggggcagacctgctgcccgagcctgggtgggagctgggcctgctgccagttgccccatgctgtgtgctgcgaggatcgccagcactgctgcccggctggctacacctgcaacgtgaaggctcgatcctgcgagaaggaagtggtctctgcccagcctgccaccttcctggcccgtagccctcacgtgggtgtgaaggacgtggagtgtggggaaggacacttctgccatgataaccagacctgctgccgagacaaccgacagggctgggcctgctgtccctaccgccagggcgtctgttgtgctgatcggcgccactgctgtcctgctggcttccgctgcgcagccaggggtaccaagtgtttgcgcagggaggccccgcgctgggacgcccctttgagggacccagccttgagacagctgctgtgagggacagtactgaagactctgcagccctcgggaccccactcggagggtgccctctgctcaggcctccctagcacctccccctaaccaaattctccctggaccccattctgagctccccatcaccatgggaggtggggcctcaatctaaggccttccctgtcagaagggggttgtggcaaaagccacattacaagctgccatcccctccccgtttcagtggaccctgtggccaggtgcttttccctatccacaggggtgtttgtgtgtgtgcgcgtgtgcgtttcaataaagtttgtacactttcttaa

SEQ ID NO: 451693 - DNA, 1680 bp, Homo sapiens
tcgaactgactatcagggcactggatggcacccacggagttgttacctgatctttggaagcaggatctcccgtctgcactgctgtccgcacggtgccttctgcgacctggttcacacccgctgcatcacacccacgggcacccaccccctggcaaagaagctccctgcccagaggactaacagggcagtggccttgtccagctcggtcatgtgtccggacgcacggtcccggtgccctgatggttctacctgctgtgagctgcccagtgggaagtatggctgctgcccaatgcccaacgccacctgctgctccgatcacctgcactgctgcccccaagacactgtgtgtgacctgatccagagtaagtgcctctccaaggagaacgctaccacggacctcctcactaagctgcctgcgcacacagtgggggatgtgaaatgtgacatggaggtgagctgcccagatggctatacctgctgccgtctacagtcgggggcctggggctgctgcccttttacccaggctgtgtgctgtgaggaccacatacactgctgtcccgcggggtttacgtgtgacacgcagaagggtacctgtgaacaggggccccaccaggtgccctggatggagaaggccccagctcacctcagcctgccagacccacaagccttgaagagagatgtcccctgtgataatgtcagcagctgtccctcctccgatacctgctgccaactcacgtctggggagtggggctgctgtccaatcccagaggctgtctgctgctcggaccaccagcactgctgcccccagggctacacgtgtgtagctgaggggcagtgtcagcgaggaagcgagatcgtggctggactggagaagatgcctgcccgccgggcttccttatcccaccccagagacatcggctgtgaccagcacaccagctgcccggtggggcagacctgctgcccgagcctgggtgggagctgggcctgctgccagttgccccatgctgtgtgctgcgaggatcgccagcactgctgcccggctggctacacctgcaacgtgaaggctcgatcctgcgagaaggaagtggtctctgcccagcctgccaccttcctggcccgtagccctcacgtgggtgtgaaggacgtggagtgtggggaaggacacttctgccatgataaccagacctgctgccgagacaaccgacagggctgggcctgctgtccctaccgccagggcgtctgttgtgctgatcggcgccactgctgtcctgctggcttccgctgcgcagccaggggtaccaagtgtttgcgcagggaggccccgcgctgggacgcccctttgagggacccagccttgagacagctgctgtgagggacagtactgaagactctgcagccctcgggaccccactcggagggtgccctctgctcaggcctccctagcacctccccctaaccaaattctccctggaccccattctgagctccccatcaccatgggaggtggggcctcaatctaaggccttccctgtcagaagggggttgtggcaaaagccacattacaagctgccatcccctccccgtttcagtggaccctgtggccaggtgcttttccctatccacaggggtgtttgtgtgtgtgcgcgtgtgcgtttcaataaagtttgtacactttcttaa

SEQ ID NO: 451694 - DNA, 2553 bp, Homo sapiens
aaggctgggtttagaatcggccgaggggaccgcggagtcggacgcaggcagaccatgtggaccctggtgagctgggtggccttaacagcagggctggtggctggaacgcggtgcccagatggtcagttctgccctgtggcctgctgcctggaccccggaggagccagctacagctgctgccgtccccttctggacaaatggcccacaacactgagcaggcatctgggtggcccctgccaggttgatgcccactgctctgccggccactcctgcatctttaccgtctcagggacttccagttgctgccccttcccagaggccgtggcatgcggggatggccatcactgctgcccacggggcttccactgcagtgcagacgggcgatcctgcttccaaagatcaggtaacaactccgtgggtgccatccagtgccctgatagtcagttcgaatgcccggacttctccacgtgctgtgttatggtcgatggctcctgggggtgctgccccatgccccaggcttcctgctgtgaagacagggtgcactgctgtccgcacggtgccttctgcgacctggttcacacccgctgcatcacacccacgggcacccaccccctggcaaagaagctccctgcccagaggactaacagggcagtggccttgtccagctcggtcatgtgtccggacgcacggtcccggtgccctgatggttctacctgctgtgagctgcccagtgggaagtatggctgctgcccaatgcccaacgccacctgctgctccgatcacctgcactgctgcccccaagacactgtgtgtgacctgatccagagtaagtgcctctccaaggagaacgctaccacggacctcctcactaagctgcctgcgcacacagtgggggatgtgaaatgtgacatggaggtgagctgcccagatggctatacctgctgccgtctacagtcgggggcctggggctgctgcccttttacccaggctgtgtgctgtgaggaccacatacactgctgtcccgcggggtttacgtgtgacacgcagaagggtacctgtgaacaggggccccaccaggtgccctgggtggccttaacagcagggctggtggctggaacgcggtgcccagatggtcagttctgccctgtggcctgctgcctggaccccggaggagccagctacagctgctgccgtccccttctggacaaatggcccacaacactgagcaggcatctgggtggcccctgccaggttgatgcccactgctctgccggccactcctgcatctttaccgtctcagggacttccagttgctgccccttcccagaggccgtggcatgcggggatggccatcactgctgcccacggggcttccactgcagtgcagacgggcgatcctgcttccaaagatcaggtaacaactccgtgggtgccatccagtgccctgatagtcagttcgaatgcccggacttctccacgtgctgtgttatggtcgatggagaaggccccagctcacctcagcctgccagacccacaagccttgaagagagatgtcccctgtgataatgtcagcagctgtccctcctccgatacctgctgccaactcacgtctggggagtggggctgctgtccaatcccagaggctgtctgctgctcggaccaccagcactgctgcccccagggctacacgtgtgtagctgaggggcagtgtcagcgaggaagcgagatcgtggctggactggagaagatgcctgcccgccgggcttccttatcccaccccagagacatcggctgtgaccagcacaccagctgcccggtggggcagacctgctgcccgagcctgggtgggagctgggcctgctgccagttgccccatgctgtgtgctgcgaggatcgccagcactgctgcccggctggctacacctgcaacgtgaaggctcgatcctgcgagaaggaagtggtctctgcccagcctgccaccttcctggcccgtagccctcacgtgggtgtgaaggacgtggagtgtggggaaggacacttctgccatgataaccagacctgctgccgagacaaccgacagggctgggcctgctgtccctaccgccagggcgtctgttgtgctgatcggcgccactgctgtcctgctggcttccgctgcgcagccaggggtaccaagtgtttgcgcagggaggccccgcgctgggacgcccctttgagggacccagccttgagacagctgctgtgagggacagtactgaagactctgcagccctcgggaccccactcggagggtgccctctgctcaggcctccctagcacctccccctaaccaaattctccctggaccccattctgagctccccatcaccatgggaggtggggcctcaatctaaggccttccctgtcagaagggggttgtggcaaaagccacattacaagctgccatcccctccccgtttcagtggaccctgtggccaggtgcttttccctatccacaggggtgtttgtgtgtgtgcgcgtgtgcgtttcaataaagtttgtacactttcttaa

SEQ ID NO: 451695 - DNA, 1279 bp, Homo sapiens
ctgtcctctctgctgcgcacacagtgggggatgtgaaatgtgacatggaggtgagctgcccagatggctatacctgctgccgtctacagtcgggggcctggggctgctgcccttttacccaggctgtgtgctgtgaggaccacatacactgctgtcccgcggggtttacgtgtgacacgcagaagggtacctgtgaacaggggccccaccaggtgccctggatggagaaggccccagctcacctcagcctgccagacccacaagccttgaagagagatgtcccctgtgataatgtcagcagctgtccctcctccgatacctgctgccaactcacgtctggggagtggggctgctgtccaatcccagaggctgtctgctgctcggaccaccagcactgctgcccccagggctacacgtgtgtagctgaggggcagtgtcagcgaggaagcgagatcgtggctggactggagaagatgcctgcccgccgggcttccttatcccaccccagagacatcggctgtgaccagcacaccagctgcccggtggggcagacctgctgcccgagcctgggtgggagctgggcctgctgccagttgccccatgctgtgtgctgcgaggatcgccagcactgctgcccggctggctacacctgcaacgtgaaggctcgatcctgcgagaaggaagtggtctctgcccagcctgccaccttcctggcccgtagccctcacgtgggtgtgaaggacgtggagtgtggggaaggacacttctgccatgataaccagacctgctgccgagacaaccgacagggctgggcctgctgtccctaccgccagggcgtctgttgtgctgatcggcgccactgctgtcctgctggcttccgctgcgcagccaggggtaccaagtgtttgcgcagggaggccccgcgctgggacgcccctttgagggacccagccttgagacagctgctgtgagggacagtactgaagactctgcagccctcgggaccccactcggagggtgccctctgctcaggcctccctagcacctccccctaaccaaattctccctggaccccattctgagctccccatcaccatgggaggtggggcctcaatctaaggccttccctgtcagaagggggttgtggcaaaagccacattacaagctgccatcccctccccgtttcagtggaccctgtggccaggtgcttttccctatccacaggggtgtttgtgtgtgtgcgcgtgtgcgtttcaataaagtttgtacactttcttaa

SEQ ID NO: 451696 - DNA, 1954 bp, Homo sapiens
aaggctgggtttagaatcggccgaggggaccgcggagtcggacgcaggcagaccatgtggaccctggtgagctgggtggccttaacagcagggctggtggctggaacgcggtgcccagatggtcagttctgccctgtggcctgctgcctggaccccggaggagccagctacagctgctgccgtccccttctggacaaatggcccacaacactgagcaggcatctgggtggcccctgccaggttgatgcccactgctctgccggccactcctgcatctttaccgtctcagggacttccagttgctgccccttcccagaggccgtggcatgcggggatggccatcactgctgcccacggggcttccactgcagtgcagacgggcgatcctgcttccaaagatcaggtaacaactccgtgggtgccatccagtgccctgatagtcagttcgaatgcccggacttctccacgtgctgtgttatggtcgatggctcctgggggtgctgccccatgccccaggcttcctgctgtgaagacagggtgcactgctgtccgcacggtgccttctgcgacctggttcacacccgctgcatcacacccacgggcacccaccccctggcaaagaagctccctgcccagaggactaacagggcagtggccttgtccagctcggtcatgtgtccggacgcacggtcccggtgccctgatggttctacctgctgtgagctgcccagtgggaagtatggctgctgcccaatgcccaacgccacctgctgctccgatcacctgcactgctgcccccaagacactgtgtgtgacctgatccagagtaagtgcctctccaaggagaacgctaccacggacctcctcactaagctgcctgcgcacacagtgggggatgtgaaatgtgacatggaggtgagctgcccagatggctatacctgctgccgtctacagtcgggggcctggggctgctgcccttttacccaggctgtgtgctgtgaggaccacatacactgctgtcccgcggggtttacgtgtgacacgcagaagggtacctgtgaacaggggccccaccaggtgccctggatggagaaggccccagctcacctcagcctgccagacccacaagccttgaagagagatgtcccctgtgataatgtcagcagctgtccctcctccgatacctgctgccaactcacgtctggggagtggggctgctgtccaatcccagaggctgtctgctgctcggaccaccagcactgctgcccccagggctacacgtgtgtagctgaggggcagtgtcagcgaggaagcgagatcgtggctggactggagaagatgcctgcccgccgggcttccttatcccaccccagcctgccaccttcctggcccgtagccctcacgtgggtgtgaaggacgtggagtgtggggaaggacacttctgccatgataaccagacctgctgccgagacaaccgacagggctgggcctgctgtccctaccgccagggcgtctgttgtgctgatcggcgccactgctgtcctgctggcttccgctgcgcagccaggggtaccaagtgtttgcgcagggaggccccgcgctgggacgcccctttgagggacccagccttgagacagctgctgtgagggacagtactgaagactctgcagccctcgggaccccactcggagggtgccctctgctcaggcctccctagcacctccccctaaccaaattctccctggaccccattctgagctccccatcaccatgggaggtggggcctcaatctaaggccttccctgtcagaagggggttgtggcaaaagccacattacaagctgccatcccctccccgtttcagtggaccctgtggccaggtgcttttccctatccacaggggtgtttgtgtgtgtgcgcgtgtgcgtttcaataaagtttgtacactttcttaa

SEQ ID NO: 451697 - DNA, 2233 bp, Homo sapiens
aaggctgggtttagaatcggccgaggggaccgcggagtcggacgcaggcagaccatgtggaccctggtgagctgggtggccttaacagcagggctggtggctggaacgcggtgcccagatggtcagttctgccctgtggcctgctgcctggaccccggaggagccagctacagctgctgccgtccccttctggacaaatggcccacaacactgagcaggcatctgggtggcccctgccaggttgatgcccactgctctgccggccactcctgcatctttaccgtctcagggacttccagttgctgccccttcccagaggccgtggcatgcggggatggccatcactgctgcccacggggcttccactgcagtgcagacgggcgatcctgcttccaaagatcaggtaacaactccgtgggtgccatccagtgccctgatagtcagttcgaatgcccggacttctccacgtgctgtgttatggtcgatggctcctgggggtgctgccccatgccccaggcttcctgctgtgaagacagggtgcactgctgtccgcacggtgccttctgcgacctggttcacacccgctgcatcacacccacgggcacccaccccctggcaaagaagctccctgcccagaggactaacagggcagtggccttgtccagctcggtcatgtgtccggacgcacggtcccggtgccctgatggttctacctgctgtgagctgcccagtgggaagtatggctgctgcccaatgcccaacgccacctgctgctccgatcacctgcactgctgcccccaagacactgtgtgtgacctgatccagagtaagtgcctctccaaggagaacgctaccacggacctcctcactaagctgcctgcgcacacagtgggggatgtgaaatgtgacatggaggtgagctgcccagatggctatacctgctgccgtctacagtcgggggcctggggctgctgcccttttacccaggctgtgtgctgtgaggaccacatacactgctgtcccgcggggtttacgtgtgacacgcagaagggtacctgtgaacaggggccccaccaggtgccctggatggagaaggccccagctcacctcagcctgccagacccacaagccttgaagagagatgtcccctgtgataatgtcagcagctgtccctcctccgatacctgctgccaactcacgtctggggagtggggctgctgtccaatcccagaggctgtctgctgctcggaccaccagcactgctgcccccagggctacacgtgtgtagctgaggggcagtgtcagcgaggaagcgagatcgtggctggactggagaagatgcctgcccgccgggcttccttatcccaccccagagacatcggctgtgaccagcacaccagctgcccggtggggcagacctgctgcccgagcctgggtgggagctgggcctgctgccagttgccccatgctgtgtgctgcgaggatcgccagcactgctgcccggctggctacacctgcaacgtgaaggctcgatcctgcgagaaggaagtggtctctgcccagcctgccaccttcctggcccgtagccctcacgtgggtgtgaaggacgtggagtgtggggaaggacacttctgccatgataaccagacctgctgccgagacaaccgacagggctgggcctgctgtccctaccgccaggtcagtgccaacccccatcctggggctgggtatggccagggaccaggtcccacctcgtccaaccctctcgcccccctctgaccatccagggcgtctgttgtgctgatcggcgccactgctgtcctgctggcttccgctgcgcagccaggggtaccaagtgtttgcgcagggaggccccgcgctgggacgcccctttgagggacccagccttgagacagctgctgtgagggacagtactgaagactctgcagccctcgggaccccactcggagggtgccctctgctcaggcctccctagcacctccccctaaccaaattctccctggaccccattctgagctccccatcaccatgggaggtggggcctcaatctaaggccttccctgtcagaagggggttgtggcaaaagccacattacaagctgccatcccctccccgtttcagtggaccctgtggccaggtgcttttccctatccacaggggtgtttgtgtgtgtgcgcgtgtgcgtttcaataaagtttgtacactttcttaa

SEQ ID NO: 451698 - DNA, 2222 bp, Homo sapiens
aaggctgggtttagaatcggccgaggggaccgcggagtcggacgcaggcagaccatgtggaccctggtgagctgggtggccttaacagcagggctggtggctggaacgcggtgcccagatggtcagttctgccctgtggcctgctgcctggaccccggaggagccagctacagctgctgccgtccccttctggacaaatggcccacaacactgagcaggcatctgggtggcccctgccaggttgatgcccactgctctgccggccactcctgcatctttaccgtctcagggacttccagttgctgccccttcccagaggccgtggcatgcggggatggccatcactgctgcccacggggcttccactgcagtgcagacgggcgatcctgcttccaaagatcaggtaacaactccgtgggtgccatccagtgccctgatagtcagttcgaatgcccggacttctccacgtgctgtgttatggtcgatggctcctgggggtgctgccccatgccccaggcttcctgctgtgaagacagggtgcactgctgtccgcacggtgccttctgcgacctggttcacacccgctgcatcacacccacgggcacccaccccctggcaaagaagctccctgcccagaggactaacagggcagtggccttgtccagctcggtcatgtgtccggacgcacggtcccggtgccctgatggttctacctgctgtgagctgcccagtgggaagtatggctgctgcccaatgcccaacgccacctgctgctccgatcacctgcactgctgcccccaagacactgtgtgtgacctgatccagagtaagtgcctctccaaggagaacgctaccacggacctcctcactaagctgcctgcgcacacagtgggggatgtgaaatgtgacatggaggtgagctgcccagatggctatacctgctgccgtctacagtcgggggcctggggctgctgcccttttacccaggctgtgtgctgtgaggaccacatacactgctgtcccgcggggtttacgtgtgacacgcagaagggtacctgtgaacaggggccccaccaggtgccctggatggagaaggccccagctcacctcagcctgccagacccacaagccttgaagagagatgtcccctgtgataatgtcagcagctgtccctcctccgatacctgctgccaactcacgtctggggagtggggctgctgtccaatcccagaggctgtctgctgctcggaccaccagcactgctgcccccagggctacacgtgtgtagctgaggggcagtgtcagcgaggaagcgagatcgtggctggactggagaagatgcctgcccgccgggcttccttatcccaccccagagacatcggctgtgaccagcacaccagctgcccggtggggcagacctgctgcccgagcctgggtgggagctgggcctgctgccagttgccccatgctgtgtgctgcgaggatcgccagcactgctgcccggctggctacacctgcaacgtgaaggctcgatcctgcgagaaggaagtggtctctgcccagcctgccaccttcctggcccgtagccctcacgtgggtgtgaaggacgtggagtgtggggaaggacacttctgccatgataaccagacctgctgccgagacaaccgacagggctgggcctgctgtccctaccgccagggcgtctgttgtgctgatcggcgccactgctgtcctgctggcttccgctgcgcagccaggggtaccaagtgtttgcgcagggaggccccgcgctgggacgcccctttgagggacccagccttgagacagctgctgtgagggacagtactgaagactctgcagccctcgggaccccactcggagggtgccctctgctcaggcctccctagcacctccccctaaccaaattctccctggaccccattctgagctccccatcaccatgggaggtggggcctcaatctaaggccttccctgtcagaagggggttgtggcaaaagtacctcacccgtagctgtacctcaccgtagctgtacctcacccgtagctgtacctcacccgtagctgtacctcacccgtagctgtacctcacccgtagctgtacctcacaccgtagatcgtacctcacccgtagctgtacctcacccgtagcatgtacctcaccacgtagctgtacctcacccgtagctgtacctcacccgtac

SEQ ID NO: 451699 - DNA, 1679 bp, Homo sapiens
aaggctgggtttagaatcggccgaggggaccgcggagtcggacgcaggcagaccatgtggaccctggtgagctgggtggccttaacagcagggctggtggctggaacgcggtgcccagatggtcagttctgccctgtggcctgctgcctggaccccggaggagccagctacagctgctgccgtccccttctggacaaatggcccacaacactgagcaggcatctgggtggcccctgccaggttgatgcccactgctctgccggccactcctgcatctttaccgtctcagggacttccagttgctgccccttcccagaggccgtggcatgcggggatggccatcactgctgcccacggggcttccactgcagtgcagacgggcgatcctgcttccaaagatcaggtaacaactccgtgggtgccatccagtgccctgatagtcagttcgaatgcccggacttctccacgtgctgtgttatggtcgatggctcctgggggtgctgccccatgccccaggcttcctgctgtgaagacagggtgcactgctgtccgcacggtgccttctgcgacctggttcacacccgctgcatcacacccacgggcacccaccccctggcaaagaagctccctgcccagaggactaacagggcagtggccttgtccagctcggtcatgtgtccggacgcacggtcccggtgccctgatggttctacctgctgtgagctgcccagtgggaagtatggctgctgcccaatgcccaacgccacctgctgctccgatcacctgcactgctgcccccaagacactgtgtgtgacctgatccagagtaagtgcctctccaaggagaacgctaccacggacctcctcactaagctgcctgcgcacacagtgggggatgtgaaatgtgacatggaggtgagctgcccagatggctatacctgctgccgtctacagtcgggggcctggggctgctgcccttttacccaggctgtgtgctgtgaggaccacatacactgctgtcccgcggggtttacgtgtgacacgcagaagggtacctgtgaacaggggccccaccaggtgccctggatggagaaggccccagctcacctcagcctgccagacccacaagccttgaagagagatgtcccctgtgataatgtcagcagctgtccctcctccgatacctgctgccgagacaaccgacagggctgggcctgctgtccctaccgccagggcgtctgttgtgctgatcggcgccactgctgtcctgctggcttccgctgcgcagccaggggtaccaagtgtttgcgcagggaggccccgcgctgggacgcccctttgagggacccagccttgagacagctgctgtgagggacagtactgaagactctgcagccctcgggaccccactcggagggtgccctctgctcaggcctccctagcacctccccctaaccaaattctccctggaccccattctgagctccccatcaccatgggaggtggggcctcaatctaaggccttccctgtcagaagggggttgtggcaaaagccacattacaagctgccatcccctccccgtttcagtggaccctgtggccaggtgcttttccctatccacaggggtgtttgtgtgtgtgcgcgtgtgcgtttcaataaagtttgtacactttcttaa

SEQ ID NO: 451700 - DNA, 1545 bp, Homo sapiens
aaggctgggtttagaatcggccgaggggaccgcggagtcggacgcaggcagaccatgtggaccctggtgagctgggtggccttaacagcagggctggtggctggaacgcggtgcccagatggtcagttctgccctgtggcctgctgcctggaccccggaggagccagctacagctgctgccgtccccttctggacaaatggcccacaacactgagcaggcatctgggtggcccctgccaggttgatgcccactgctctgccggccactcctgcatctttaccgtctcagggacttccagttgctgccccttcccagaggccgtggcatgcggggatggccatcactgctgcccacggggcttccactgcagtgcagacgggcgatcctgcttccaaagatcaggtaacaactccgtgggtgccatccagtgccctgatagtcagttcgaatgcccggacttctccacgtgctgtgttatggtcgatggctcctgggggtgctgccccatgccccaggcttcctgctgtgaagacagggtgcactgctgtccgcacggtgccttctgcgacctggttcacacccgctgcatcacacccacgggcacccaccccctggcaaagaagctccctgcccagaggactaacagggcagtggccttgtccagctcggtcatgtgtccggacgcacggtcccggtgccctgatggttctacctgctgtgagctgcccagtgggaagtatggctgctgcccaatgcccaacgccacctgctgctccgatcacctgcactgctgcccccaagacactgtgtgtgacctgatccagagtaagtgcctctccaaggagaacgctaccacggacctcctcactaagctgcctgcgcacacagtgggggatgtgaaatgtgacatggaggtgagctgcccagatggctatacctgctgccgtctacagtcgggggcctggggctgctgcccttttacccaggctgtgtgctgtgaggaccacatacactgctgtcccgcggggtttacgtgtgacacgcagaagggtacctgtgaacaggggccccaccaggtgccctggatggagaaggccccagctcacctcagcctgccagacccacaagccttgaagagagatgtcccctgtgataatgtcagcagctgtccctcctccgatacctgctgccaactcacgtctggggagtggggctgctgtccaatcccagaggctgtctgctgctcggaccaccagcactgctgcccccagggctacacgtgtgtagctgaggggcagtgtcagcgaggaagcgagatcgtggctggactggagaagatgcctgcccgccgggcttccttatcccaccccagagacatcggctgtgaccagcacaccagctgcccggtggggcagacctgctgcccgagcctgggtaggggtttgccaggctcgaaccgccacagtcggcggggcttgaagtggaatacagtataaccacacgcgcggcgtgaacacgcgtgggttaatactaatcagcgtcac

SEQ ID NO: 451701 - DNA, 1286 bp, Homo sapiens
aaggctgggtttagaatcggccgaggggaccgcggagtcggacgcaggcagaccatgtggaccctggtgagctgggtggccttaacagcagggctggtggctggaacgcggtgcccagatggtcagttctgccctgtggcctgctgcctggaccccggaggagccagctacagctgctgccgtccccttctggacaaatggcccacaacactgagcaggcatctgggtggcccctgccaggttgatgcccactgctctgccggccactcctgcatctttaccgtctcagggacttccagttgctgccccttcccagaggccgtggcatgcggggatggccatcactgctgcccacggggcttccactgcagtgcagacgggcgatcctgcttccaaagatcaggtaacaactccgtgggtgccatccagtgccctgatagtcagttcgaatgcccggacttctccacgtgctgtgttatggtcgatggctcctgggggtgctgccccatgccccaggcttcctgctgtgaagacagggtgcactgctgtccgcacggtgccttctgcgacctggttcacacccgctgcatcacacccacgggcacccaccccctggcaaagaagctccctgcccagaggactaacagggcagtggccttgtccagctcggtcatgtgtccggacgcacggtcccggtgccctgatggttctacctgctgtgagctgcccagtgggaagtatggctgctgcccaatgcccaacgccacctgctgctccgatcacctgcactgctgcccccaagacactgtgtgtgacctgatccagagtaagtgcctctccaaggagaacgctaccacggacctcctcactaagctgcctgcgcacacagtgggggatgtgaaatgtgacatggaggtgagctgcccagatggctatacctgctgccgtctacagtcgggggcctggggctgctgcccttttacccaggctgtgtgctgtgaggaccacatacactgctgtcccgcggggtttacgtgtgacacgcagaagggtacctgtgaacaggggccccaccaggtgccctggatggagaaggccccagctcacctcagcctgccagacccacaagccttgaagagagatgtcccctgtgataatgtcagcagctgtccctcctccgatacctgctgccaactcacgtctggggagtggggctgctgtccaatcccagagctgtctgctacaccgacaacctggtgcgagtgtggcaggtgaacatagacaca

SEQ ID NO: 451702 - DNA, 1329 bp, Homo sapiens
aaggctgggtttagaatcggccgaggggaccgcggagtcggacgcaggcagaccatgtggaccctggtgagctgggtggccttaacagcagggctggtggctggaacgcggtgcccagatggtcagttctgccctgtggcctgctgcctggaccccggaggagccagctacagctgctgccgtccccttctggacaaatggcccacaacactgagcaggcatctgggtggcccctgccaggttgatgcccactgctctgccggccactcctgcatctttaccgtctcagggacttccagttgctgccccttcccagaggccgtggcatgcggggatggccatcactgctgcccacggggcttccactgcagtgcagacgggcgatcctgcttccaaagatcaggtaacaactccgtgggtgccatccagtgccctgatagtcagttcgaatgcccggacttctccacgtgctgtgttatggtcgatggctcctgggggtgctgccccatgccccaggcttcctgctgtgaagacagggtgcactgctgtccgcacggtgccttctgcgacctggttcacacccgctgcatcacacccacgggcacccaccccctggcaaagaagctccctgcccagaggactaacagggcagtggccttgtccagctcggtcatgtgtccggacgcacggtcccggtgccctgatggttctacctgctgtgagctgcccagtgggaagtatggctgctgcccaatgcccaacgccacctgctgctccgatcacctgcactgctgcccccaagacactgtgtgtgacctgatccagagtaagtgcctctccaaggagaacgctaccacggacctcctcactaagctgcctgcgcacacagtgggggatgtgaaatgtgacatggaggtgagctgcccagatggctatacctgctgccgtctacagtcgggggcctggggctgctgcccttttacccaggctgtgtgctgtgaggaccacatacactgctgtcccgcggggtttacgtgtgacacgcagaagggtacctgtgaacaggggccccaccaggtgccctggatggagaaggccccagctcacctcagccccctggaccccattctgagctccccatcaccatgggaggtggggcctcaatctaaggccttccctgtcagaagggggttgtggcaaaagccacattacaagctgccatcccctccccgtttcagtggaccctgtggccaggtgcttttccctatccacaggggtgtttgtgtgtgtgcgcgtgtgcgtttcaataaagtttgtacactttcttaa

SEQ ID NO: 451703 - DNA, 1134 bp, Homo sapiens
  misc_feature (1032)..(1032): n is a, c, g, or t
aaggctgggtttagaatcggccgaggggaccgcggagtcggacgcaggcagaccatgtggaccctggtgagctgggtggccttaacagcagggctggtggctggaacgcggtgcccagatggtcagttctgccctgtggcctgctgcctggaccccggaggagccagctacagctgctgccgtccccttctggacaaatggcccacaacactgagcaggcatctgggtggcccctgccaggttgatgcccactgctctgccggccactcctgcatctttaccgtctcagggacttccagttgctgccccttcccagaggccgtggcatgcggggatggccatcactgctgcccacggggcttccactgcagtgcagacgggcgatcctgcttccaaagatcaggtaacaactccgtgggtgccatccagtgccctgatagtcagttcgaatgcccggacttctccacgtgctgtgttatggtcgatggctcctgggggtgctgccccatgccccaggcttcctgctgtgaagacagggtgcactgctgtccgcacggtgccttctgcgacctggttcacacccgctgcatcacacccacgggcacccaccccctggcaaagaagctccctgcccagaggactaacagggcagtggccttgtccagctcggtcatgtgtccggacgcacggtcccggtgccctgatggttctacctgctgtgagctgcccagtgggaagtatggctgctgcccaatgcccaacgccacctgctgctccgatcacctgcactgctgcccccaagacactgtgtgtgacctgatccagagtaagtgcctctccaaggagaacgctaccacggacctcctcactaagctgcctgcgcacacagtgggggatgtgaaatgtgacatggaggtgagctgcccagatggctatacctgctgccgtctacagtcgggggcctggggctgctgcccttttacccaggctgtgtgctgtgaggaccacatacactgcctgggtaaaaggccncgatcccaaggcccaactccccgaaccactcagggtcctgtggacagctcacctagtggcaatggctccaggctcccggacgtccctgctcctggcttttgc

SEQ ID NO: 451704 - DNA, 1690 bp, Homo sapiens
aaggctgggtttagaatcggccgaggggaccgcggagtcggacgcaggcagaccatgtggaccctggtgagctgggtggccttaacagcagggctggtggctggaacgcggtgcccagatggtcagttctgccctgtggcctgctgcctggaccccggaggagccagctacagctgctgccgtccccttctggacaaatggcccacaacactgagcaggcatctgggtggcccctgccaggttgatgcccactgctctgccggccactcctgcatctttaccgtctcagggacttccagttgctgccccttcccagaggccgtggcatgcggggatggccatcactgctgcccacggggcttccactgcagtgcagacgggcgatcctgcttccaaagatcaggtaacaactccgtgggtgccatccagtgccctgatagtcagttcgaatgcccggacttctccacgtgctgtgttatggtcgatggctcctgggggtgctgccccatgccccaggcttcctgctgtgaagacagggtgcactgctgtccgcacggtgccttctgcgacctggttcacacccgctgcatcacacccacgggcacccaccccctggcaaagaagctccctgcccagaggactaacagggcagtggccttgtccagctcggtcatgtgtccggacgcacggtcccggtgccctgatggttctacctgctgtgagctgcccagtgggaagtatggctgctgcccaatgcccaacgccacctgctgctccgatcacctgcactgctgcccccaagacactgtgtgtgacctgatccagagtaagtgcctctccaaggagaacggccactgctgtcctgctggcttccgctgcgcagccaggggtaccaagtgtttgcgcagggaggccccgcgctgggacgcccctttgagggacccagccttgagacagctgctgtgagggacagtactgaagactctgcagccctcgggaccccactcggagggtgccctctgctcaggcctccctagcacctccccctaaccaaattctccctggaccccattctgagctccccatcaccatgggaggtggggcctcaatctaaggccttccctgtcagaagggggttgtggcaaaagccacattacaagctgccatcccctccccgtttcagtggaccctgtggccaggtgcttttccctatccacaggggtgtttgtgtgtgtgcgcgtgtgcgtttcaataaagtttgtacactttcttaaaaaaaaaaaaaaaaaaaaaaaaaaaaaaaaaaaaaaaaaaaaaaaaaaaaaaaaaaaaaaaaaaaaaaagaagagagacagacacacgcaggacgaagaaagaaaatcacaacaaaaacacaacacaaggagaggaggagagcggagcacacccatggttggtcgggcacgacaacggcggcaccacgggtgtttccctgaaggaaacatcgtgcggggaagagaagcaggggcgggggggatccaccgacaaaaaaaaaacgccgcccgcggtggacacaacacagcggctgtgtggagacaaaaatcctcggaggaggtgctcgcgggaagtcataacgacggggtgatcttaagcagagggacccacggaaagaccacaagaacagaaattgaccccacggagaggggaccga

SEQ ID NO: 451705 - DNA, 951 bp, Homo sapiens
aaggctgggtttagaatcggccgaggggaccgcggagtcggacgcaggcagaccatgtggaccctggtgagctgggtggccttaacagcagggctggtggctggaacgcggtgcccagatggtcagttctgccctgtggcctgctgcctggaccccggaggagccagctacagctgctgccgtccccttctggacaaatggcccacaacactgagcaggcatctgggtggcccctgccaggttgatgcccactgctctgccggccactcctgcatctttaccgtctcagggacttccagttgctgccccttcccagaggccgtggcatgcggggatggccatcactgctgcccacggggcttccactgcagtgcagacgggcgatcctgcttccaaagatcaggtaacaactccgtgggtgccatccagtgccctgatagtcagttcgaatgcccggacttctccacgtgctgtgttatggtcgatggctcctgggggtgctgccccatgccccaggcttcctgctgtgaagacagggtgcactgctgtccgcacggtgccttctgcgacctggttcacacccgctgcatcacacccacgggcacccaccccctggcaaagaagctccctgcccagaggactaacagggcagtggccttgtccagctcggtcatgtgtccggacgcacggtcccggtgccctgatggttctacctgctgtgagctgcccagtgggaagtatggctgctgcccaatgcccaacaagccactggtgttcgatcactgactggtgcccaagacatggtggactgatcagataatgcttcaagaaacgtacaggactctcataagtgctggcacgcgggggtcgagtgctgggggtccgcgtggacgcgcgcagggccgggtggcacagttgttgcacccggccggtctgccagtgtagcaccga

SEQ ID NO: 451706 - DNA, 836 bp, Homo sapiens
aaggctgggtttagaatcggccgaggggaccgcggagtcggacgcaggcagaccatgtggaccctggtgagctgggtggccttaacagcagggctggtggctggaacgcggtgcccagatggtcagttctgccctgtggcctgctgcctggaccccggaggagccagctacagctgctgccgtccccttctggacaaatggcccacaacactgagcaggcatctgggtggcccctgccaggttgatgcccactgctctgccggccactcctgcatctttaccgtctcagggacttccagttgctgccccttcccagaggccgtggcatgcggggatggccatcactgctgcccacggggcttccactgcagtgcagacgggcgatcctgcttccaaagatcaggtaacaactccgtgggtgccatccagtgccctgaaggctggtgttggacggcagcattgagtttcctgccgtgccctgcctgagctctcagggccctgctcacctgctctggctgtgtaaccacctgggcttcatcataagcagcctgcgggtctctgtgcgcccgtgagaatatcgagaggagaccaacatctggttgaagcccagtttctcctgctgtgagaacaagtggatgtccctctccccgccctcctgctgaagtggccttgctgctctcaggcccggccactgggctccaagacctcgcaaggtttttccagtcaaggactttgatgacgacgggcaagctgaaacagcagcccttacagatagactcctcgcactctacccccaaattttgtttgacagtgtgcacacgtgcactggcattgtg

SEQ ID NO: 451707 - DNA, 1141 bp, Homo sapiens
catgatccctagaaatggggtgtggggcgagaggaagcagggaggagagtgatttgagtagaaaagaaacacagcattccaggctggccccacctctatattgataagtagccaatgggagcgggtagccctgatccctggccaatggaaactgaggtaggcgggtcatcgcgctggggtctgtagtctgagcgctacccggttgctgctgcccaaggaccgcggagtcggacgcaggcagaccatgtggaccctggtgagctgggtggccttaacagcagggctggtggctggaacgcggtgcccagatggtcagttctgccctgtggcctgctgcctggaccccggaggagccagctacagctgctgccgtccccttctggacaaatggcccacaacactgagcaggcatctgggtggcccctgccaggttgatgcccactgctctgccggccactcctgcatctttaccgtctcagggacttccagttgctgccccttcccagaggccgtggcatgcggggatggccatcactgctgcccacggggcttccactgcagtgcagacgggcgatcctgcttccaaagatcaggtaacaactccgtgggtgccatccagtgccctgatagtcagttcgaatgcccggacttctccacgtgctgtgttatggtcgatggctcctgggggtgctgccccatgccccaggcttcctgctgtgaagacagggtgcactgctgtccgcacggtgccttctgcgacctggttcacacccgctgcatcacacccacgggcacccaccccctggcaaagaagctccctgcccagaggactaacagggcagtggccttgtccagctcggtcatgtgtccggacgcacggtcccggtgccctgatggttctacctgctgtgagctgcccagtgggaagtatggctgctgcccaatgcccaacaagccactggtgttcgatcactgactggtgcccaagacatggtggactgatcagataatgcttcaagaaacgtacaggactctcataagtgctggcacgcgggggtcgagtgctgggggtccgcgtggacgcgcgcagggccgggtggcacagttgttgcacccggccggtctgccagtgtagcaccga

SEQ ID NO: 451708 - DNA, 1014 bp, Homo sapiens
  misc_feature (845)..(845): n is a, c, g, or t
  misc_feature (903)..(903): n is a, c, g, or t
catgatccctagaaatggggtgtggggcgagaggaagcagggaggagagtgatttgagtagaaaagaaacacagcattccaggctggccccacctctatattgataagtagccaatgggagcgggtagccctgatccctggccaatggaaactgaggtaggcgggtcatcgcgctggggtctgtagtctgagcgctacccggttgctgctgcccaaggaccgcggagtcggacgcaggcagaccatgtggaccctggtgagctgggtggccttaacagcagggctggtggctggaacgcggtgcccagatggtcagttctgccctgtggcctgctgcctggaccccggaggagccagctacagctgctgccgtccccttctggacaaatggcccacaacactgagcaggcatctgggtggcccctgccaggttgatgcccactgctctgccggccactcctgcatctttaccgtctcagggacttccagttgctgccccttcccagaggccgtggcatgcggggatggccatcactgctgcccacggggcttccactgcagtgcagacgggcgatcctgcttccaaagatcaggtaacaactccgtgggtgccatccagtgccctgatagtcagttcgaatgcccggacttctccacgtgctgtgttatggtcgatggctcctgggggtgctgccccatgccccaggcttcctgctgtgaagacagggtgcactgctgtccgcacggtgccttctgcgacctggttcacacccgctgcatcacacccacgggcacccaccccctggcaaagaagctccctgcccagaggactaacagggcagatnggccttgtccagctcgggtcatgttgtcccggacgcaacggtccccgggtggcccctngaatggggttcctaacctggcctgttgaagcttgaacccaggtgggggaacgttactgcgctgcttggccccaaattgcgcacaaacgggcccaacccttgctttgctccg

SEQ ID NO: 451709 - DNA, 1869 bp, Homo sapiens
catgatccctagaaatggggtgtggggcgagaggaagcagggaggagagtgatttgagtagaaaagaaacacagcattccaggctggccccacctctatattgataagtagccaatgggagcgggtagccctgatccctggccaatggaaactgaggtaggcgggtcatcgcgctggggtctgtagtctgagcgctacccggttgctgctgcccaaggaccgcggagtcggacgcaggcagaccatgtggaccctggtgagctgggtggccttaacagcagggctggtggctggaacgcggtgcccagatggtcagttctgccctgtggcctgctgcctggaccccggaggagccagctacagctgctgccgtccccttctggacaaatggcccacaacactgagcaggcatctgggtggcccctgccaggttgatgcccactgctctgccggccactcctgcatctttaccgtctcagggacttccagttgctgccccttcccagaggccgtggcatgcggggatggccatcactgctgcccacggggcttccactgcagtgcagacgggcgatcctgcttccaaagatcaggtaacaactccgtgggtgccatccagtgccctgatagtcagttcgaatgcccggacttctccacgtgctgtgttatggtcgatggctcctgggggtgctgccccatgccccaggcttcctgctgtgaagacagggtgcactgctgtccgcacggtgccttctgcgacctggttcacacccgctgcatcacacccacgggcacccaccccctggcaaagaagctccctgcccagaggactaacagggcagtggccttgtccagctcggtcatgtgtccggacgcacggtcccggtgccctgatggttctacctgctgtgagctgcccagtgggaagtatggctgctgcccaatgcccaacgccacctgctgctccgatcacctgcactgctgcccccaagacactgtgtgtgacctgatccagagtaagtgcctctccaaggagaacgctaccacggacctcctcactaagctgcctgcgcacacagtgggggatgtgaaatgtgacatggaggtgagctgcccagatggctatacctgctgccgtctacagtcgggggcctggggctgctgcccttttacccaggctgtgtgctgtgaggaccacatacactgctgtcccgcggggtttacgtgtgacacgcagaagggtacctgtgaacaggggccccaccaggtgccctggatggagaaggccccagctcacctcagcctgccagacccacaagccttgaagagagatgtcccctgtgataatgtcagcagctgtccctcctccgatacctgctgccgagacaaccgacagggctgggcctgctgtccctaccgccagggcgtctgttgtgctgatcggcgccactgctgtcctgctggcttccgctgcgcagccaggggtaccaagtgtttgcgcagggaggccccgcgctgggacgcccctttgagggacccagccttgagacagctgctgtgagggacagtactgaagactctgcagccctcgggaccccactcggagggtgccctctgctcaggcctccctagcacctccccctaaccaaattctccctggaccccattctgagctccccatcaccatgggaggtggggcctcaatctaaggccttccctgtcagaagggggttgtggcaaaagccacattacaagctgccatcccctccccgtttcagtggaccctgtggccaggtgcttttccctatccacaggggtgtttgtgtgtgtgcgcgtgtgcgtttcaataaagtttgtacactttcttaa

SEQ ID NO: 451710 - DNA, 475 bp, Homo sapiens
  misc_feature (423)..(423): n is a, c, g, or t
tacccttctgcgtgtcacacgtaaaccccgcgggacagcagtgtatgtggtctgccagacccacaagccttgaagagagatgtcccctgtgataatgtcagcagctgtccctcctccgatacctgctgccaactcacgtctggggagtggggctgctgtccaatcccagaggctgtctgctgctcggaccaccagcactgctgcccccagggctacacgtgtgtagctgaggggcagtgtcagcgaggaagcgagatcgtggctggactggagaagatgcctgcccgccgggcttccttatcccaccccagagacatcggctgtgaccagcacaccagctgcccggtggggcagacctgctgcccgagcctgggtgggagctgggcctgctgccagttgccccattgcgaggatcgcagcacntgctgccccggctggcgtacactacccaaccgatgaatagtggcgagcagta

SEQ ID NO: 451711 - DNA, 2618 bp, Homo sapiens
aaggctgggtttagaatcggccgaggggaccgcggagtcggacgcaggcagaccatgtggaccctggtgagctgggtggccttaacagcagggctggtggctggaacgcggtgcccagatggtcagttctgccctgtggcctgctgcctggaccccggaggagccagctacagctgctgccgtccccttctggacaaatggcccacaacactgagcaggcatctgggtggcccctgccaggttgatgcccactgctctgccggccactcctgcatctttaccgtctcagggacttccagttgctgccccttcccagaggccgtggcatgcggggatggccatcactgctgcccacggggcttccactgcagtgcagacgggcgatcctgcttccaaagatcaggtgcagctggggtgtgggtgcagggcaggcagacgggcagcatgtggagtctggaacccaggagcccagctggcgggggcagccctgattcctgcccttgtgccctcattcatgtggcatctgtactaagcaacagccctgctgtggacagaggggcagcactggggataggagggtgcgggagaaagtgcaagactccaggtccaggcgttgtgggggtggggagaggtcgagctgggccggtctaataccaacccatggtcagtgggtgccccttccccatgccatcttgctgagggagggactggattgtgaggagggtgagttaggcctcctaggagatcactgagccttagtgtcaccctcaaaccccagtagctgggcttgcaggcctggtgccaccagctccttgtgtgatgggggagtcaccttccctgagtgggctggtagtatcctgggtcatcttgtccacaggtaacaactccgtgggtgccatccagtgccctgatagtcagttcgaatgcccggacttctccacgtgctgtgttatggtcgatggctcctgggggtgctgccccatgccccaggcttcctgctgtgaagacagggtgcactgctgtccgcacggtgccttctgcgacctggttcacacccgctgcatcacacccacgggcacccaccccctggcaaagaagctccctgcccagaggactaacagggcagtggccttgtccagctcggtcatgtgtccggacgcacggtcccggtgccctgatggttctacctgctgtgagctgcccagtgggaagtatggctgctgcccaatgcccaacgccacctgctgctccgatcacctgcactgctgcccccaagacactgtgtgtgacctgatccagagtaagtgcctctccaaggagaacgctaccacggacctcctcactaagctgcctgcgcacacagtgggggatgtgaaatgtgacatggaggtgagctgcccagatggctatacctgctgccgtctacagtcgggggcctggggctgctgcccttttacccaggctgtgtgctgtgaggaccacatacactgctgtcccgcggggtttacgtgtgacacgcagaagggtacctgtgaacaggggccccaccaggtgccctggatggagaaggccccagctcacctcagcctgccagacccacaagccttgaagagagatgtcccctgtgataatgtcagcagctgtccctcctccgatacctgctgccaactcacgtctggggagtggggctgctgtccaatcccagaggctgtctgctgctcggaccaccagcactgctgcccccagggctacacgtgtgtagctgaggggcagtgtcagcgaggaagcgagatcgtggctggactggagaagatgcctgcccgccgggcttccttatcccaccccagagacatcggctgtgaccagcacaccagctgcccggtggggcagacctgctgcccgagcctgggtgggagctgggcctgctgccagttgccccatgctgtgtgctgcgaggatcgccagcactgctgcccggctggctacacctgcaacgtgaaggctcgatcctgcgagaaggaagtggtctctgcccagcctgccaccttcctggcccgtagccctcacgtgggtgtgaaggacgtggagtgtggggaaggacacttctgccatgataaccagacctgctgccgagacaaccgacagggctgggcctgctgtccctaccgccagggcgtctgttgtgctgatcggcgccactgctgtcctgctggcttccgctgcgcagccaggggtaccaagtgtttgcgcagggaggccccgcgctgggacgcccctttgagggacccagccttgagacagctgctgtgagggacagtactgaagactctgcagccctcgggaccccactcggagggtgccctctgctcaggcctccctagcacctccccctaaccaaattctccctggaccccattctgagctccccatcaccatgggaggtggggcctcaatctaaggccttccctgtcagaagggggttgtggcaaaagccacattacaagctgccatcccctccccgtttcagtggaccctgtggccaggtgcttttccctatccacaggggtgtttgtgtgtgtgcgcgtgtgcgtttcaataaagtttgtacactttcttaa

SEQ ID NO: 451712 - DNA, 1884 bp, Homo sapiens
aaggctgggtttagaatcggccgaggggaccgcggagtcggacgcaggcagaccatgtggaccctggtgagctgggtggccttaacagcagggctggtggctggaacgcggtgcccagatggtcagttctgccctgtggcctgctgcctggaccccggaggagccagctacagctgctgccgtccccttctggacaaatggcccacaacactgagcaggcatctgggtggcccctgccaggttgatgcccactgctctgccggccactcctgcatctttaccgtctcagggacttccagttgctgccccttcccagaggccgtggcatgcggggatggccatcactgctgcccacggggcttccactgcagtgcagacgggcgatcctgcttccaaagatcaggtaacaactccgtgggtgccatccagtgccctgatagtcagttcgaatgcccggacttctccacgtgctgtgttatggtcgatggctcctgggggtgctgccccatgccccaggcttcctgctgtgaagacagggtgcactgctgtgtgtgacctgatccagagtaagtgcctctccaaggagaacgctaccacggacctcctcactaagctgcctgcgcacacagtgggggatgtgaaatgtgacatggaggtgagctgcccagatggctatacctgctgccgtctacagtcgggggcctggggctgctgcccttttacccaggctgtgtgctgtgaggaccacatacactgctgtcccgcggggtttacgtgtgacacgcagaagggtacctgtgaacaggggccccaccaggtgccctggatggagaaggccccagctcacctcagcctgccagacccacaagccttgaagagagatgtcccctgtgataatgtcagcagctgtccctcctccgatacctgctgccaactcacgtctggggagtggggctgctgtccaatcccagaggctgtctgctgctcggaccaccagcactgctgcccccagggctacacgtgtgtagctgaggggcagtgtcagcgaggaagcgagatcgtggctggactggagaagatgcctgcccgccgggcttccttatcccaccccagagacatcggctgtgaccagcacaccagctgcccggtggggcagacctgctgcccgagcctgggtgggagctgggcctgctgccagttgccccatgctgtgtgctgcgaggatcgccagcactgctgcccggctggctacacctgcaacgtgaaggctcgatcctgcgagaaggaagtggtctctgcccagcctgccaccttcctggcccgtagccctcacgtgggtgtgaaggacgtggagtgtggggaaggacacttctgccatgataaccagacctgctgccgagacaaccgacagggctgggcctgctgtccctaccgccagggcgtctgttgtgctgatcggcgccactgctgtcctgctggcttccgctgcgcagccaggggtaccaagtgtttgcgcagggaggccccgcgctgggacgcccctttgagggacccagccttgagacagctgctgtgagggacagtactgaagactctgcagccctcgggaccccactcggagggtgccctctgctcaggcctccctagcacctccccctaaccaaattctccctggaccccattctgagctccccatcaccatgggaggtggggcctcaatctaaggccttccctgtcagaagggggttgtggcaaaagccacattacaagctgccatcccctccccgtttcagtggaccctgtggccaggtgcttttccctatccacaggggtgtttgtgtgtgtgcgcgtgtgcgtttcaataaagtttgtacactttcttaa

SEQ ID NO: 451713 - DNA, 2202 bp, Homo sapiens
aaggctgggtttagaatcggccgaggggaccgcggagtcggacgcaggcagaccatgtggaccctggtgagctgggtggccttaacagcagggctggtggctggaacgcggtgcccagatggtcagttctgccctgtggcctgctgcctggaccccggaggagccagctacagctgctgccgtccccttctggacaaatggcccacaacactgagcaggcatctgggtggcccctgccaggttgatgcccactgctctgccggccactcctgcatctttaccgtctcagggacttccagttgctgccccttcccagaggccgtggcatgcggggatggccatcactgctgcccacggggcttccactgcagtgcagacgggcgatcctgcttccaaagatcaggtaacaactccgtgggtgccatccagtgccctgatagtcagttcgaatgcccggacttctccacgtgctgtgttatggtcgatggctcctgggggtgctgccccatgccccaggcttcctgctgtgaagacagggtgcactgctgtccgcacggtgccttctgcgacctggttcacacccgctgcatcacacccacgggcacccaccccctggcaaagaagctccctgcccagaggactaacagggcagtggccttgtccagctcggtcatgtgtccggacgcacggtcccggtgccctgatggttctacctgctgtgagctgcccagtgggaagtatggctgctgcccaatgcccaacgccacctgctgctccgatcacctgcactgctgcccccaagacactgtgtgtgacctgatccagagtaagtgcctctccaaggagaacgctaccacggacctcctcactaagctgcctgcgcacacagtgggggatgtgaaatgtgacatggaggtgagctgcccagatggctatacctgctgccgtctacagtcgggggcctggggctgctgcccttttacccaggctgtgtgctgtgaggaccacatacactgctgtcccgcggggtttacgtgtgacacgcagaagggtacctgtgaacaggggccccaccaggtgccctggatggagaaggccccagctcacctcagcctgccagacccacaagccttgaagagagatgtcccctgtgataatgtcagcagctgtccctcctccgatacctgctgccaactcacgtctggggagtggggctgctgtccaatcccagaggctgtctgctgctcggaccaccagcactgctgcccccagggctacacgtgtgtagctgaggggcagtgtcagcgaggaagcgagatcgtggctggactggagaagatgcctgcccgccgggcttccttatcccaccccagagacatcggctgtgaccagcacaccagctgcccggtggggcagacctgctgcccgagcctgggtgggagctgggcctgctgccagttgccccatgctgtgtgctgcgaggatcgccagcactgctgcccggctggctacacctgcaacgtgaaggctcgatcctgcgagaaggaagtggtctctgcccagcctgccaccttcctggcccgtagccctcacgtgggtgtgaaggacgtggagtgtggggaaggacacttctgccatgataaccagacctgctgccgagacaaccgacagggctgggcctgctgtccctaccgccagggcgtctgttgtgctgatcggcgccactgctgtcctgctggcttccgctgcgcagccaggggtaccaagtgtttgcgcagggaggccccgcgctgggacgcccctttgagggacccagccttgagacagctgctgtgagggacagtactgaagactctgcagccctcgggaccccactcggagggtgccctctgctcaggcctccctagcacctccccctaaccaaattctccctggaccccattctgagctccccatcaccatgggaggtggggcctcaatctaaggccttccctgtcagaagggggttgtggcaaaagccacattacaagctgccatcccctccccgtttcagtggaccctgtggccaggtgcttttccctatccacaggggtgtttgtgtgtgtgcgcgtgtgcgtttcaataaagtttgtacactttcttaaaaaaaaaaaagagcggcaaaaaaaaaagtccgtatcgatgtcgagccgacatggatga

SEQ ID NO: 451714 - DNA, 2560 bp, Homo sapiens
aaggctgggtttagaatcggccgaggggaccgcggagtcggacgcaggcagaccatgtggaccctggtgagctgggtggccttaacagcagggctggtggctggaacgcggtgcccagatggtcagttctgccctgtggcctgctgcctggaccccggaggagccagctacagctgctgccgtccccttctggacaaatggcccacaacactgagcaggcatctgggtggcccctgccaggttgatgcccactgctctgccggccactcctgcatctttaccgtctcagggacttccagttgctgccccttcccagaggccgtggcatgcggggatggccatcactgctgcccacggggcttccactgcagtgcagacgggcgatcctgcttccaaagatcaggtaacaactccgtgggtgccatccagtgccctgatagtcagttcgaatgcccggacttctccacgtgctgtgttatggtcgatggctcctgggggtgctgccccatgccccaggcttcctgctgtgaagacagggtgcactgctgtccgcacggtgccttctgcgacctggttcacacccgctgcatcacacccacgggcacccaccccctggcaaagaagctccctgcccagaggactaacagggcagtggccttgtccagctcggtcatgtgtccggacgcacggtcccggtgccctgatggttctacctgctgtgagctgcccagtgggaagtatggctgctgcccaatgcccaacgccacctgctgctccgatcacctgcactgctgcccccaagacactgtgtgtgacctgatccagagtaagtgcctctccaaggagaacgctaccacggacctcctcactaagctgcctgcgcacacagtgggggatgtgaaatgtgacatggaggtgagctgcccagatggctatacctgctgccgtctacagtcgggggcctggggctgctgcccttttacccaggctgtgtgctgtgaggaccacatacactgctgtcccgcggggtttacgtgtgacacgcagaagggtacctgtgaacaggggccccaccaggtgccctggatggagaaggccccagctcacctcagcctgccagacccacaagccttgaagagagatgtcccctgtgataatgtcagcagctgtccctcctccgatacctgctgccaactcacgtctggggagtggggctgctgtccaatcccagaggctgtctgctgctcggaccaccagcactgctgcccccagggctacacgtgtgtagctgaggggcagtgtcagcgaggaagcgagatcgtggctggactggagaagatgcctgcccgccgggcttccttatcccaccccagagacatcggctgtgaccagcacaccagctgcccggtggggcagacctgctgcccgagcctgggtgggagctgggcctgctgccagttgccccatgctgtgtgctgcgaggatcgccagcactgctgcccggctggctacacctgcaacgtgaaggctcgatcctgcgagaaggaagtggtctctgcccagcctgccaccttcctggcccgtagccctcacgtgggtgtgaaggacgtggagtgtggggaaggacacttctgccatgataaccagacctgctgccgagacaaccgacagggctgggcctgctgtccctaccgccagggcgtctgttgtgctgatcggcgccactgctgtcctgctggcttccgctgcgcagccaggggtaccaagtgtttgcgcagggaggccccgcgctgggacgcccctttgagggacccagccttgagacagctgctgtgagggacagtactgaagactctgcagccctcgggaccccactcggagggtgccctctgctcaggcctccctagcacctccccctaaccaaattctccctggaccccattctgagctccccatcaccatgggaggtggggcctcaatctaaggccttccctgtcagaagggggttgtggcaaaagccacattacaagctgccatcccctccccgtttcagtggaccctgtggccaggtgcttttccctatccacaggggtgtttgtgtgtgtgcgcgtgtgcgtttcaataaagtttgtacactttcttaaaaaaaaaaaaaaaaaaaaaaaaaaaaaaaaaaaaaaaaaaaaaaaaaaaaaaaaaaaaaaaaaaaaaaagaagagagacagacacacgcaggacgaagaaagaaaatcacaacaaaaacacaacacaaggagaggaggagagcggagcacacccatggttggtcgggcacgacaacggcggcaccacgggtgtttccctgaaggaaacatcgtgcggggaagagaagcaggggcgggggggatccaccgacaaaaaaaaaacgccgcccgcggtggacacaacacagcggctgtgtggagacaaaaatcctcggaggaggtgctcgcgggaagtcataacgacggggtgatcttaagcagagggacccacggaaagaccacaagaacagaaattgaccccacggagaggggaccga

SEQ ID NO: 451715 - DNA, 2187 bp, Homo sapiens
aaggctgggtttagaatcggccgaggggaccgcggagtcggacgcaggcagaccatgtggaccctggtgagctgggtggccttaacagcagggctggtggctggaacgcggtgcccagatggtcagttctgccctgtggcctgctgcctggaccccggaggagccagctacagctgctgccgtccccttctggacaaatggcccacaacactgagcaggcatctgggtggcccctgccaggttgatgcccactgctctgccggccactcctgcatctttaccgtctcagggacttccagttgctgccccttcccagaggccgtggcatgcggggatggccatcactgctgcccacggggcttccactgcagtgcagacgggcgatcctgcttccaaagatcaggtaacaactccgtgggtgccatccagtgccctgatagtcagttcgaatgcccggacttctccacgtgctgtgttatggtcgatggctcctgggggtgctgccccatgccccaggcttcctgctgtgaagacagggtgcactgctgtccgcacggtgccttctgcgacctggttcacacccgctgcatcacacccacgggcacccaccccctggcaaagaagctccctgcccagaggactaacagggcagtggccttgtccagctcggtcatgtgtccggacgcacggtcccggtgccctgatggttctacctgctgtgagctgcccagtgggaagtatggctgctgcccaatgcccaacgccacctgctgctccgatcacctgcactgctgcccccaagacactgtgtgtgacctgatccagagtaagtgcctctccaaggagaacgctaccacggacctcctcactaagctgcctgcgcacacagtgggggatgtgaaatgtgacatggaggtgagctgcccagatggctatacctgctgccgtctacagtcgggggcctggggctgctgcccttttacccaggctgtgtgctgtgaggaccacatacactgctgtcccgcggggtttacgtgtgacacgcagaagggtacctgtgaacaggggccccaccaggtgccctggatggagaaggccccagctcacctcagcctgccagacccacaagccttgaagagagatgtcccctgtgataatgtcagcagctgtccctcctccgatacctgctgccaactcacgtctggggagtggggctgctgtccaatcccagaggctgtctgctgctcggaccaccagcactgctgcccccagggctacacgtgtgtagctgaggggcagtgtcagcgaggaagcgagatcgtggctggactggagaagatgcctgcccgccgggcttccttatcccaccccagagacatcggctgtgaccagcacaccagctgcccggtggggcagacctgctgcccgagcctgggtgggagctgggcctgctgccagttgccccatgctgtgtgctgcgaggatcgccagcactgctgcccggctggctacacctgcaacgtgaaggctcgatcctgcgagaaggaagtggtctctgcccagcctgccaccttcctggcccgtagccctcacgtgggtgtgaaggacgtggagtgtggggaaggacacttctgccatgataaccagacctgctgccgagacaaccgacagggctgggcctgctgtccctaccgccagggcgtctgttgtgctgatcggcgccactgctgtcctgctggcttccgctgcgcagccaggggtaccaagtgtttgcgcagggaggccccgcgctgggacgcccctttgagggacccagccttgagacagctgctgtgagggacagtactgaagactctgcagccctcgggaccccactcggagggtgccctctgctcaggcctccctagcacctccccctaaccaaattctccctggaccccattctgagctccccatcaccatgggaggtggggcctcaatctaaggccttccctgtcagaagggggttgtggcaaaagggtggccaccggcaggttgtactggagatgtatttgagaaccaagattataggtaaattttcaccagtacttagttctatttgcacactgaaaaatgtagtaggctgaatataatataaccaccactagtgaacattatatctcttagaagaaagcccatattttgctc

SEQ ID NO: 451716 - DNA, 2326 bp, Homo sapiens
aaggctgggtttagaatcggccgaggggaccgcggagtcggacgcaggcagaccatgtggaccctggtgagctgggtggccttaacagcagggctggtggctggaacgcggtgcccagatggtcagttctgccctgtggcctgctgcctggaccccggaggagccagctacagctgctgccgtccccttctggacaaatggcccacaacactgagcaggcatctgggtggcccctgccaggttgatgcccactgctctgccggccactcctgcatctttaccgtctcagggacttccagttgctgccccttcccagaggccgtggcatgcggggatggccatcactgctgcccacggggcttccactgcagtgcagacgggcgatcctgcttccaaagatcaggtaacaactccgtgggtgccatccagtgccctgatagtcagttcgaatgcccggacttctccacgtgctgtgttatggtcgatggctcctgggggtgctgccccatgccccaggcttcctgctgtgaagacagggtgcactgctgtccgcacggtgccttctgcgacctggttcacacccgctgcatcacacccacgggcacccaccccctggcaaagaagctccctgcccagaggactaacagggcagtggccttgtccagctcggtcatgtgtccggacgcacggtcccggtgccctgatggttctacctgctgtgagctgcccagtgggaagtatggctgctgcccaatgcccaacgccacctgctgctccgatcacctgcactgctgcccccaagacactgtgtgtgacctgatccagagtaagtgcctctccaaggagaacgctaccacggacctcctcactaagctgcctgcgcacacagtgggggatgtgaaatgtgacatggaggtgagctgcccagatggctatacctgctgccgtctacagtcgggggcctggggctgctgcccttttacccaggctgtgtgctgtgaggaccacatacactgctgtcccgcggggtttacgtgtgacacgcagaagggtacctgtgaacaggggccccaccaggtgccctggatggagaaggccccagctcacctcagcctgccagacccacaagccttgaagagagatgtcccctgtgataatgtcagcagctgtccctcctccgatacctgctgccaactcacgtctggggagtggggctgctgtccaatcccagaggctgtgtgctgcgaggatcgccagcactgctgcccggctggctacacctgcaacgtgaaggctcgatcctgcgagaaggaagtggtctctgcccagcctgccaccttcctggcccgtagccctcacgtgggtgtgaaggacgtggagtgtggggaaggacacttctgccatgataaccagacctgctgccgagacaaccgacagggctgggcctgctgtccctaccgccagggcgtctgttgtgctgatcggcgccactgctgtcctgctggcttccgctgcgcagccaggggtaccaagtgtttgcgcagggaggccccgcgctgggacgcccctttgagggacccagccttgagacagctgctgtgagggacagtactgaagactctgcagccctcgggaccccactcggagggtgccctctgctcaggcctccctagcacctccccctaaccaaattctccctggaccccattctgagctccccatcaccatgggaggtggggcctcaatctaaggccttccctgtcagaagggggttgtggcaaaagccacattacaagctgccatcccctccccgtttcagtggaccctgtggccaggtgcttttccctatccacaggggtgtttgtgtgtgtgcgcgtgtgcgtttcaataaagtttgtacactttcttaaaaaaaaaaaaaaaaaaaaaaaaaaaaaaaaaaaaaaaaaaaaaaaaaaaaaaaaaaaaaaaaaaaaaaagaagagagacagacacacgcaggacgaagaaagaaaatcacaacaaaaacacaacacaaggagaggaggagagcggagcacacccatggttggtcgggcacgacaacggcggcaccacgggtgtttccctgaaggaaacatcgtgcggggaagagaagcaggggcgggggggatccaccgacaaaaaaaaaacgccgcccgcggtggacacaacacagcggctgtgtggagacaaaaatcctcggaggaggtgctcgcgggaagtcataacgacggggtgatcttaagcagagggacccacggaaagaccacaagaacagaaattgaccccacggagaggggaccga

SEQ ID NO: 451717 - DNA, 1447 bp, Homo sapiens
aaggctgggtttagaatcggccgaggggaccgcggagtcggacgcaggcagaccatgtggaccctggtgagctgggtggccttaacagcagggctggtggctggaacgcggtgcccagatggtcagttctgccctgtggcctgctgcctggaccccggaggagccagctacagctgctgccgtccccttctggacaaatggcccacaacactgagcaggcatctgggtggcccctgccaggttgatgcccactgctctgccggccactcctgcatctttaccgtctcagggacttccagttgctgccccttcccagaggccgtggcatgcggggatggccatcactgctgcccacggggcttccactgcagtgcagacgggcgatcctgcttccaaagatcaggtaacaactccgtgggtgccatccagtgccctgatagtcagttcgaatgcccggacttctccacgtgctgtgttatggtcgatggctcctgggggtgctgccccatgccccaggcttcctgctgtgaagacagggtgcactgctgtccgcacggtgccttctgcgacctggttcacacccgctgcatcacacccacgggcacccaccccctggcaaagaagctccctgcccagaggactaacagggcagtggccttgtccagctcggtcatgtgtccggacgcacggtcccggtgccctgatggttctacctgctgtgagctgcccagtgggaagtatggctgctgcccaatgcccaacgccacctgctgctccgatcacctgcactgctgcccccaagacactgtgtgtgacctgatccagagtaagtgcctctccaaggagaacgctaccacggacctcctcactaagctgcctgcgcacacagtgggggatgtgaaatgtgacatggaggtgagctgcccagatggctatacctgctgccgtctacagtcgggggcctggggctgctgcccttttacccaggctgtgtgctgtgaggaccacatacactgctgtcccgcggggtttacgtgtgacacgcagaagggtacctgtgaacaggggccccaccaggtgccctggatggagaaggccccagctcacctcagcctgccagacccacaagccttgaagagagatgtcccctgtgataatgtcagcagctgtccctcctccgatacctgctgccaactcacgtctggggagtggggctgctgtccaatcccagagaaaggtgtttgtgttcgacaccaggtggggcccagggtaacgttttactaagggaggcaaggaacgaaacggctgaggaaaaacgcgcccgggttctatccccccaaactgggccacctgcgggggaccctccccgggaggggaccctgggaaccacgggcacgaggccaaagccccccggtaggacacccccgggcccgccgccgggcccgcg

SEQ ID NO: 451718 - DNA, 1274 bp, Homo sapiens
aaggctgggtttagaatcggccgaggggaccgcggagtcggacgcaggcagaccatgtggaccctggtgagctgggtggccttaacagcagggctggtggctggaacgcggtgcccagatggtcagttctgccctgtggcctgctgcctggaccccggaggagccagctacagctgctgccgtccccttctggacaaatggcccacaacactgagcaggcatctgggtggcccctgccaggttgatgcccactgctctgccggccactcctgcatctttaccgtctcagggacttccagttgctgccccttcccagaggccgtggcatgcggggatggccatcactgctgcccacggggcttccactgcagtgcagacgggcgatcctgcttccaaagatcaggtaacaactccgtgggtgccatccagtgccctgatagtcagttcgaatgcccggacttctccacgtgctgtgttatggtcgatggctcctgggggtgctgccccatgccccaggcttcctgctgtgaagacagggtgcactgctgtccgcacggtgccttctgcgacctggttcacacccgctgcatcacacccacgggcacccaccccctggcaaagaagctccctgcccagaggactaacagggcagtggccttgtccagctcggtcatgtgtccggacgcacggtcccggtgccctgatggttctacctgctgtgagctgcccagtgggaagtatggctgctgcccaatgcccaacgccacctgctgctccgatcacctgcactgctgcccccaagacactgtgtgtgacctgatccagagtaagtgcctctccaaggagaacggccactgctgtcctgctggcttccgctgcgcagccaggggtaccaagtgtttgcgcagggaggccccgcgctgggacgcccctttgagggacccagccttgagacagctgctgtgagggacagtactgaagactctgcagccctcgggaccccactcggagggtgccctctgctcaggcctccctagcacctccccctaaccaaattctccctggaccccattctgagctccccatcaccatgggaggtggggcctcaatctaaggccttccctgtcagaagggggttgtggcaaaagccacattacaagctgccatcccctccccgtttcagtggaccctgtggccaggtgcttttccctatccacaggggtgtttgtgtgtgtgcgcgtgtgcgtttcaataaagtttgtacactttcttaa

SEQ ID NO: 451719 - DNA, 1128 bp, Homo sapiens
aaggctgggtttagaatcggccgaggggaccgcggagtcggacgcaggcagaccatgtggaccctggtgagctgggtggccttaacagcagggctggtggctggaacgcggtgcccagatggtcagttctgccctgtggcctgctgcctggaccccggaggagccagctacagctgctgccgtccccttctggacaaatggcccacaacactgagcaggcatctgggtggcccctgccaggttgatgcccactgctctgccggccactcctgcatctttaccgtctcagggacttccagttgctgccccttcccagaggccgtggcatgcggggatggccatcactgctgcccacggggcttccactgcagtgcagacgggcgatcctgcttccaaagatcaggtaacaactccgtgggtgccatccagtgccctgatagtcagttcgaatgcccggacttctccacgtgctgtgttatggtcgatggctcctgggggtgctgccccatgccccaggcttcctgctgtgaagacagggtgcactgctgtccgcacggtgccttctgcgacctggttcacacccgctgcatcacacccacgggcacccaccccctggcaaagaagctccctgcccagaggactaacagggcagtggccttgtccagctcggtcatgtgtccggacgcacggtcccggtgccctgatggttctacctgctgtgagctgcccagtgggaagtatggctgctgcccaatgcccaacgccacctgctgctccgatcacctgcactgctgcccccaagacactgtgtgtgacctgatccagagtaagtgcctctccaaggagaacgctaccacggacctcctcactaagctgcctgcgcacacagtgggggatgtgaaatgtgacatggaggtgagctgcccagatggctatacctgctgccgtctacagtcgggggcctggggctgctgcccttttacccaggctgtgtgctgtgaggacaggaggcggaagcggaggcagggccagcggaggagaggtgagaagtgagagcccaggagtctttcatcagggggcctgaggggaagggacctgggaagccttcaggcagctgctttttctaaa

SEQ ID NO: 451720 - DNA, 809 bp, Homo sapiens
aaggctgggtttagaatcggccgaggggaccgcggagtcggacgcaggcagaccatgtggaccctggtgagctgggtggccttaacagcagggctggtggctggaacgcggtgcccagatggtcagttctgccctgtggcctgctgcctggaccccggaggagccagctacagctgctgccgtccccttctggacaaatggcccacaacactgagcaggcatctgggtggcccctgccaggttgatgcccactgctctgccggccactcctgcatctttaccgtctcagggacttccagttgctgccccttcccagaggccgtggcatgcggggatggccatcactgctgcccacggggcttccactgcagtgcagacgggcgatcctgcttccaaagatcaggtaacaactccgtgggtgccatccagtgccctgatagtcagttcgaatgcccggacttctccacgtgctgtgttatggtcgatggctcctgggggtgctgccccatgccccaggcttcctgctgtgaagacagggtgcactgctgtccgcacggtgccttctgcgacctggttcacacccgctgcatcacacccacgggcacccaccccctggcaaagaagctccctgcccagaggactaacagggcagtggccttgtccagctcggtcatgtgtccggacgcacggtcccggtgccctgatggttctacctgctgtgagctgcccagtgggaagtatggctgctgcccaatgcccaacaagccctgtgtcgacactgtgtgcccagaatggttgccggccatatg

SEQ ID NO: 451721 - DNA, 2183 bp, Homo sapiens
  misc_feature (234)..(234): n is a, c, g, or t
  misc_feature (459)..(459): n is a, c, g, or t
  misc_feature (1249)..(1249): n is a, c, g, or t
  misc_feature (1287)..(1287): n is a, c, g, or t
  misc_feature (1701)..(1701): n is a, c, g, or t
  misc_feature (1732)..(1732): n is a, c, g, or t
aaggctgggtttagaatcggccgaggggaccgcggagtcggacgcaggcagaccatgtggaccctggtgagctgggtggccttaacagcagggctggtggctggaacgcggtgcccagatggtcagttctgccctgtggcctgctgcctggaccccggaggagccagctacagctgctgccgtccccttctgtgagtgccctcagcctaggcaagagctggcagctgggttttnccaaagggtcatcttggattggccagaggaggacgccaggcacaagtctgtggtttatcattttccctgtctttctaggacaaatggcccacaacactgagcaggcatctgggtggcccctgccaggttgatgcccactgctctgccggccactcctgcatctttaccgtctcagggacttccagttgctgccccttcccagaggtgagcgtgccatcagcccantggaggggcttaggtctgcatttatgcttttcctgcactctaccacctgcagataaaagggccctgccaatgcaggtttctctgtgttccacaggccgtggcatgcggggatggccatcactgctgcccacggggcttccactgcagtgcagacgggcgatcctgcttccaaagatcaggtgcagctggggtgtgggtgcagggcaggcagacgggcagcatgtggagtctggaacccaggagcccagctggcgggggcagccctgattcctgcccttgtgccctcattcatgtggcatctgtactaagcaacagccctgctgtggacagaggggcagcactggggataggagggtgcgggagaaagtgcaagactccaggtccaggcgttgtgggggtggggagaggtcgagctgggccggtctaataccaacccatggtcagtgggtgccccttccccatgccatcttgctgagggagggactggattgtgaggagggtgagttaggcctcctaggagatcactgagccttagtgtcaccctcaaaccccagtagctgggcttgcaggcctggtgccaccagctccttgtgtgatgggggagtcaccttccctgagtgggctggtagtatcctgggtcatcttgtccacaggtaacaactccgtgggtgccatccagtgccctgatagtcagttcgaatgcccggacttctccacgtgctgtgttatggtcgatggctcctgggggtgctgccccatgccccaggtacaaatctgggggagatggggntatgtggagggaagtgggggcagagttgggggccaggncagggggtgaagacggagtcaggaccattttttctcaggcttcctgctgtgaagacagggtgcactgctgtccgcacggtgccttctgcgacctggttcacacccgctgcatcacacccacgggcacccaccccctggcaaagaagctccctgcccagaggactaacagggcagggtgaggaggtgggagagcatcaggccaggggctggggcgggcctcattgactccaagtgtaggaaaaagtttcctccatcctggctgcccctcacgtttgctcctcttccagtggccttgtccagctcggtcatgtgtccggacgcacggtcccggtgccctgatggttctacctgctgtgagctgcccagtgggaagtatggctgctgcccaatgcccaaccgtgagtgagggctganccagcttggctgtgtgcccccagccacctgnccctgacacgcaccttacaggggctctgtggcatggggctggctggctgcttgctgggagcctggctgatgcagggttcatgctaccccctagtgggggattggggcagtgccagccatcagcctggctgctccctgtgtgctactgagcctggaagtgacaaagacccacccctgtccccactcagccacctgctgctccgatcacctgcactgctgcccccaagacactgtgtgtgacctgatccagagtaagtgcctctccaaggagaacgctaccacggacctcctcactaagctgcctgcgcacacaggtaccagaggcagggtgcagatacaggggtggggccccctttcctcccttttaggcctggccttaggatcactgcaaggtggtgtaagcggtaccctccatcttcaacacctggttccagctgtggagccggcaaagg

SEQ ID NO: 451722 - DNA, 513 bp, Homo sapiens
cggacgcgtgggtcgcccacgcgtccgtagaccagggttggggtgtgcggtttgggacagcccaaaccccagccgctgtgtcaaggcctaggacgccatgctgccatcaaaagggggttccaggtttccatcagtggcctaaagaagggacttcttgttgtactgaggagtgcggaattaaagagatttgactccctttagtattgggggcagtccgttccccagacactgtggcctctgaagtggaaactgaaagctgcatacctgggaaagaactttctaggaataggcaatggccttcagtggaagagggagggctggaggtgtgcccagtacttggatgttcatctgtccacaacagctttttgtttttttaaaaaagctaaaatggaaatggattttatcataaaggatgacatcgttttcttctacaattaatacatgttcattgtataaaacccaaaaagcagctaaaaaataaagcgggaaaggaactactggtaaaaaaaaaac

SEQ ID NO: 451723 - DNA, 281 bp, Homo sapiens
cggacgcgtgggtcgcccacgcgtccggagaagatgatctcggatgccatccccgagctgaaggcctccatcaagaagggggaagatttcgtgaagaccctgaagtgagccgctgtgacgggtggccagtttccttaatttatgaaggcatcatgtcactgcaaagccgttgcagataaactttgtattttaatttgctttggtgatgattactgtattgacatcatcatgccttccaaattgtgggtggctctgtgggcgcatcaataaaagccgtcctt

SEQ ID NO: 451724 - DNA, 178 bp, Homo sapiens
tttggttctgtatgacttttagaaaagttttttctaattctgtgaaaactcggaattccgctttgttgcagagctgaagggtttggatccagctcgagtcaacgtccctgtcattggtggccatgctgggaagaccatcatccccctgatctctcaggtacacgcatatgaccctgtg

SEQ ID NO: 451725 - DNA, 2261 bp, Homo sapiens
  misc_feature (2221)..(2221): n is a, c, g, or t
cgaccggaagtccggtcactctcgcgaggccccagagagcaggcgctgggcagtgtggaggtcgttggagtcacttccgcgtcaccagctcctgtgcctgccagtcggtgcccctcccgctccagccatgctctccgccctcgcccggcctgccagcgctgctctccgccgcagcttcagcacctcggcccagaacaatgctaaagtagctgtgctaggggcctctggaggcatcgggcagccactttcacttctcctgaagaacagccccttggtgagccgcctgaccctctatgatatcgcgcacacacccggagtggccgcagatctgagccacatcgagaccaaagccgctgtgaaaggctacctcggacctgaacagctgcctgactgcctgaaaggttgtgatgtggtagttattccggctggagtccccagaaagccaggcatgacccgggacgacctgttcaacaccaatgccacgattgtggccaccctgaccgctgcctgtgcccagcactgcccggaagccatgatctgcgtcattgccaatccggttaattccaccatccccatcacagcagaagttttcaagaagcatggagtgtacaaccccaacaaaatcttcggcgtgacgaccctggacatcgtcagagccaacacctttgttgcagagctgaagggtttggatccagctcgagtcaacgtccctgtcattggtggccatgctgggaagaccatcatccccctgatctctcagtgcacccccaaggtggactttccccaggaccagctgacagcactcactgggcggatccaggaggccggcacggaggtggtcaaggctaaagccggagcaggctctgccaccctctccatggcgtatgccggcgcccgctttgtcttctcccttgtggatgcaatgaatggaaaggaaggtgttgtggaatgttccttcgttaagtcacaggaaacggaatgtacctacttctccacaccgctgctgcttgggaaaaagggcatcgagaagaacctgggcatcggcaaagtctcctcttttgaggagaagatgatctcggatgccatccccgagctgaaggcctccatcaagaagggggaagatttcgtgaagaccctgaagtgagccgctgtgacgggtggccagtttccttaatttatgaaggcatcatgtcactgcaaagccgttgcagataaactttgtattttaatttgctttggtgatgattactgtattgacatcatcatgccttccaaattgtgggtggctctgtgggcgcatcaataaaagccgtccttgattttatttttcaaggtcccttctgtaaatgctgtgctttcttccctgtgagagccaactttagagtgtctgctacctcttcattaccaatcagaattagatgatgtttaactgttagactgaagcgtgacgctttcatcagtagcttcaagaaagtctaaattgttaatttatggaattggacacagtattcagtttacccgtacatgctcctcccgcccctcctgttggcacccttgcatcgcccaggcctgattcctcctgggggtagttcacccccacgggttcatagttcagcggcgaatgccaggcagctgttttctggctgagcaaacagcacctttctcattgagcttcctctactgacctctgtcccccttgggatttcatcttctgaccgaaccctgatgttcagtggcagagacagcccatagccagaactgtgggtagaccagggttggggtgtgcggtttgggacagcccaaaccccagccgctgtgtcaaggcctaggacgccatgctgccatcaaaagggggttccaggtttccatcagtggcctaaagaagggacttcttgttgtactgaggagtgcggaattaaagagatttgactccctttagtattgggggcagtccgttccccagacactgtggcctctgaagtggaaactgaaagctgcatacctgggaaagaactttctaggaataggcaatggccttcagtggaagagggagggctggaggtgtgcccagtacttggatgttcatctgtccacaacagctttttgtttttttaaaaaagctaaaatggaaatggattttatcataaaggatgacatcgttttcttctacaattaatacatgttcattgtataaaacctcgcctttaaatggccaggcgtnaaaaataaggcgagaaaaaggaactgccttgccccacttg

SEQ ID NO: 451726 - DNA, 2197 bp, Homo sapiens
cgaccggaagtccggtcactctcgcgaggccccagagagcaggcgctgggcagtgtggaggtcgttggagtcacttccgcgtcaccagctcctgtgcctgccagtcggtgcccctcccgctccagccatgctctccgccctcgcccggcctgccagcgctgctctccgccgcagcttcagcacctcggcccagaacaatgctaaagtagctgtgctaggggcctctggaggcatcgggcagccactttcacttctcctgaagaacagccccttggtgagccgcctgaccctctatgatatcgcgcacacacccggagtggccgcagatctgagccacatcgagaccaaagccgctgtgaaaggctacctcggacctgaacagctgcctgactgcctgaaaggttgtgatgtggtagttattccggctggagtccccagaaagccaggcatgacccgggacgacctgttcaacaccaatgccacgattgtggccaccctgaccgctgcctgtgcccagcactgcccggaagccatgatctgcgtcattgccaatccggttaattccaccatccccatcacagcagaagttttcaagaagcatggagtgtacaaccccaacaaaatcttcggcgtgacgaccctggacatcgtcagagccaacacctttgttgcagagctgaagggtttggatccagctcgagtcaacgtccctgtcattggtggccatgctgggaagaccatcatccccctgatctctcagtgcacccccaaggtggactttccccaggaccagctgacagcactcactgggcggatccaggaggccggcacggaggtggtcaaggctaaagccggagcaggctctgccaccctctccatggcgtatgccggcgcccgctttgtcttctcccttgtggatgcaatgaatggaaaggaaggtgttgtggaatgttccttcgttaagtcacaggaaacggaatgtacctacttctccacaccgctgctgcttgggaaaaagggcatcgagaagaacctgggcatcggcaaagtctcctcttttgaggagaagatgatctcggatgccatccccgagctgaaggcctccatcaagaagggggaagatttcgtgaagaccctgaagtgagccgctgtgacgggtggccagtttccttaatttatgaaggcatcatgtcactgcaaagccgttgcagataaactttgtattttaatttgctttggtgatgattactgtattgacatcatcatgccttccaaattgtgggtggctctgtgggcgcatcaataaaagccgtccttgattttatttttcaaggtcccttctgtaaatgctgtgctttcttccctgtgagagccaactttagagtgtctgctacctcttcattaccaatcagaattagatgatgtttaactgttagactgaagcgtgacgctttcatcagtagcttcaagaaagtctaaattgttaatttatggaattggacacagtattcagtttacccgtacatgctcctcccgcccctcctgttggcacccttgcatcgcccaggcctgattcctcctgggggtagttcacccccacgggttcatagttcagcggcgaatgccaggcagctgttttctggctgagcaaacagcacctttctcattgagcttcctctactgacctctgtcccccttgggatttcatcttctgaccgaaccctgatgttcagtggcagagacagcccatagccagaactgtgggtagaccagggttggggtgtgcggtttgggacagcccaaaccccagccgctgtgtcaaggcctaggacgccatgctgccatcatgaggagtgcggaattaaagagatttgactccctttagtattgggggcagtccgttccccagacactgtggcctctgaagtggaaactgaaagctgcatacctgggaaagaactttctaggaataggcaatggccttcagtggaagagggagggctggaggtgtgcccagtacttggatgttcatctgtccacaacagctttttgtttttttaaaaaagctaaaatggaaatggattttatcataaaggatgacatcgttttcttctacaattaatacatgttcattgtataaaacccaaaaagcagctaaaaaataaagcgggaaaggaactactggtaaaaaaaaaac

SEQ ID NO: 451727 - DNA, 2233 bp, Homo sapiens
  misc_feature (14)..(14): n is a, c, g, or t
aaggctaggtacgngcgggtgtgaatcggccgaggtgtggaggtcgttggagtcacttccgcgtcaccagctcctgtgcctgccagtcggtgcccctcccgctccagccatgctctccgccctcgcccggcctgccagcgctgctctccgccgcagcttcagcacctcggcccagaacaatgctaaagtagctgtgctaggggcctctggaggcatcgggcagccactttcacttctcctgaagaacagccccttggtgagccgcctgaccctctatgatatcgcgcacacacccggagtggccgcagatctgagccacatcgagaccaaagccgctgtgaaaggctacctcggacctgaacagctgcctgactgcctgaaaggttgtgatgtggtagttattccggctggagtccccagaaagccaggcatgacccgggacgacctgttcaacaccaatgccacgattgtggccaccctgaccgctgcctgtgcccagcactgcccggaagccatgatctgcgtcattgccaatccggttaattccaccatccccatcacagcagaagttttcaagaagcatggagtgtacaaccccaacaaaatcttcggcgtgacgaccctggacatcgtcagagccaacacctttgttgcagagctgaagggtttggatccagctcgagtcaacgtccctgtcattggtggccatgctgggaagaccatcatccccctgatctctcagtgcacccccaaggtggactttccccaggaccagctgacagcactcactgggcggatccaggaggccggcacggaggtggtcaaggctaaagccggagcaggctctgccaccctctccatggcgtatgccggcgcccgctttgtcttctcccttgtggatgcaatgaatggaaaggaaggtgttgtggaatgttccttcgttaagtcacaggaaacggaatgtacctacttctccacaccgctgctgcttgggaaaaagggcatcgagaagaacctgggcatcggcaaagtctcctcttttgaggagaagatgatctcggatgccatccccgagctgaaggcctccatcaagaagggggaagatttcgtgaagaccctgaagtgagccgctgtgacgggtggccagtttccttaatttatgaaggcatcatgtcactgcaaagccgttgcagataaactttgtattttaatttgctttggtgatgattactgtattgacatcatcatgccttccaaattgtgggtggctctgtgggcgcatcaataaaagccgtccttgattttatttttcaaggtcccttctgtaaatgctgtgctttcttccctgtgagagccaactttagagtgtctgctacctcttcattaccaatcagaattagatgatgtttaactgttagactgaagcgtgacgctttcatcagtagcttcaagaaagtctaaattgttaatttatggaattggacacagtattcagtttacccgtacatgctcctcccgcccctcctgttggcacccttgcatcgcccaggcctgattcctcctgggggtagttcacccccacgggttcatagttcagcggcgaatgccaggcagctgttttctggctgagcaaacagcacctttctcattgagcttcctctactgacctctgtcccccttgggatttcatcttctgaccgaaccctgatgttcagtggcagagacagcccatagccagaactgtgggtagaccagggttggggtgtgcggtttgggacagcccaaaccccagccgctgtgtcaaggcctaggacgccatgctgccatcaaaagggggttccaggtttccatcagtggcctaaagaagggacttcttgttgtactgaggagtgcggaattaaagagatttgactccctttagtattgggggcagtccgttccccagacactgtggcctctgaagtggaaactgaaagctgcatacctgggaaagaactttctaggaataggcaatggccttcagtggaagagggagggctggaggtgtgcccagtacttggatgttcatctgtccacaacagctttttgtttttttaaaaaagctaaaatggaaatggattttatcataaaggatgacatcgttttcttctacaattaatacatgttcattgtataaaacccaaaaagcagctaaaaaataaagcgggaaaggaactactggtaaaaaaaaaac

SEQ ID NO: 451728 - DNA, 1317 bp, Homo sapiens
cgaccggaagtccggtcactctcgcgaggccccagagagcaggcgctgggcagtgtggaggtcgttggagtcacttccgcgtcaccagctcctgtgcctgccagtcggtgcccctcccgctccagccatgctctccgccctcgcccggcctgccagcgctgctctccgccgcagcttcagcacctcggcccagaacaatgctaaagtagctgtgctaggggcctctggaggcatcgggcagccactttcacttctcctgaagaacagccccttggtgagccgcctgaccctctatgatatcgcgcacacacccggagtggccgcagatctgagccacatcgagaccaaagccgctgtgaaaggctacctcggacctgaacagctgcctgactgcctgaaaggttgtgatgtggtagttattccggctggagtccccagaaagccaggcatgacccgggacgacctgttcaacaccaatgccacgattgtggccaccctgaccgctgcctgtgcccagcactgcccggaagccatgatctgcgtcattgccaatccggttaattccaccatccccatcacagcagaagttttcaagaagcatggagtgtacaaccccaacaaaatcttcggcgtgacgaccctggacatcgtcagagccaacacctttgttgcagagctgaagggtttggatccagctcgagtcaacgtccctgtcattggtggccatgctgggaagaccatcatccccctgatctctcagtgcacccccaaggtggactttccccaggaccagctgacagcactcactgggcggatccaggaggccggcacggaggtggtcaaggctaaagccggagcaggctctgccaccctctccatggcgtatgccggcgcccgctttgtcttctcccttgtggatgcaatgaatggaaaggaaggtgttgtggaatgttccttcgttaagtcacaggaaacggaatgtacctacttctccacaccgctgctgcttgggaaaaagggcatcgagaagaacctgggcatcggcaaagtctcctcttttgaggagaagatgatctcggatgccatccccgagctgaaggcctccatcaagaagggggaagatttcgtgaagaccctgaagtgagccgctgtgacgggtggccagtttccttaatttatgaaggcatcatgtcactgcaaagccgttgcagataaactttgtattttaatttgctttggtgatgattactgtattgacatcatcatgccttccaaattgtgggtggctctgtgggcgcatcaataaaagccgtcctt

SEQ ID NO: 451729 - DNA, 1984 bp, Homo sapiens
cgaccggaagtccggtcactctcgcgaggccccagagagcaggcgctgggcagtgtggaggtcgttggagtcacttccgcgtcaccagctcctgtgcctgccagtcggtgcccctcccgctccagccatgctctccgccctcgcccggcctgccagcgctgctctccgccgcagcttcagcacctcggcccagaacaatgctaaagtagctgtgctaggggcctctggaggcatcgggcagccactttcacttctcctgaagaacagccccttggtgagccgcctgaccctctatgatatcgcgcacacacccggagtggccgcagatctgagccacatcgagaccaaagccgctgtgaaaggctacctcggacctgaacagctgcctgactgcctgaaaggttgtgatgtggtagttattccggctggagtccccagaaagccaggcatgacccgggacgacctgttcaacaccaatgccacgattgtggccaccctgaccgctgcctgtgcccagcactgcccggaagccatgatctgcgtcattgccaatccggttaattccaccatccccatcacagcagaagttttcaagaagcatggagtgtacaaccccaacaaaatcttcggcgtgacgaccctggacatcgtcagagccaacacctttgttgcagagctgaagggtttggatccagctcgagtcaacgtccctgtcattggtggccatgctgggaagaccatcatccccctgatctctcagtgcacccccaaggtggactttccccaggaccagctgacagcactcactgggcggatccaggaggccggcacggaggtggtcaaggctaaagccggagcaggctctgccaccctctccatggcgtatgccggcgcccgctttgtcttctcccttgtggatgcaatgaatggaaaggaaggtgttgtggaatgttccttcgttaagtcacaggaaacggaatgtacctacttctccacaccgctgctgcttgggaaaaagggcatcgagaagaacctgggcatcggcaaagtctcctcttttgaggagaagatgatctcggatgccatccccgagctgaaggcctccatcaagaagggggaagatttcgtgaagaccctgaagtgagccgctgtgacgggtggccagtttccttaatttatgaaggcatcatgtcactgcaaagccgttgcagataaactttgtattttaatttgctttggtgatgattactgtattgacatcatcatgccttccaaattgtgggtggctctgtgggcgcatcaataaaagccgtccttaaaaaaaaaaaaaaaaaaaaaaaaaaaaaaaaaaaaaaaaaaaaaaaaaaaaagaggggcgcgcgcgcccccgagaagaatatcccccgcggggggcgccccaaacttacagcggcgcccccgcgctttctgttgtgatgtacaagaggggggcgccccaccaatatagagaggagagcgcgctattataaagcgcacgcgagacgaacagcggggcgcgcgcggcgttatatacacacagacggggcgcgatcagtgtgggagacacagcggtggacacagggggagaaacactctggcgggaggaaagagcgacacccctattctatatatcgttggggggggagcgagagagcgcacaacaatatatgtggggagaagagatatccacatcacagtcgggcggaggattttttataggcgcgtccttaaggggggggatcaacatcttttatacacaatatttgtatagagacgcggggtgatataaatacggggggtgggtaaaacaatacgcgacgggcggcgacgaaatatttggggtctgggggagcggtgtagaagacaaagtgtttgacgcggagaaaatagaggggagatgctactgtcttagttggagagcaaatgtttttatatcaacgaggggcgatcctaagtgaggaaaaag

SEQ ID NO: 451730 - DNA, 2160 bp, Homo sapiens
cgaccggaagtccggtcactctcgcgaggccccagagagcaggcgctgggcagtgtggaggtcgttggagtcacttccgcgtcaccagctcctgtgcctgccagtcggtgcccctcccgctccagccatgctctccgccctcgcccggcctgccagcgctgctctccgccgcagcttcagcacctcggcccagaacaatgctaaagtagctgtgctaggggcctctggaggcatcgggcagccactttcacttctcctgaagaacagccccttggtgagccgcctgaccctctatgatatcgcgcacacacccggagtggccgcagatctgagccacatcgagaccaaagccgctgtgaaaggctacctcggacctgaacagctgcctgactgcctgaaaggttgtgatgtggtagttattccggctggagtccccagaaagccaggcatgacccgggacgacctgttcaacaccaatgccacgattgtggccaccctgaccgctgcctgtgcccagcactgcccggaagccatgatctgcgtcattgccaatccggttaattccaccatccccatcacagcagaagttttcaagaagcatggagtgtacaaccccaacaaaatcttcggcgtgacgaccctggacatcgtcagagccaacacctttgttgcagagctgaagggtttggatccagctcgagtcaacgtccctgtcattggtggccatgctgggaagaccatcatccccctgatctctcagtgcacccccaaggtggactttccccaggaccagctgacagcactcactgggcggatccaggaggccggcacggaggtggtcaaggctaaagccggagcaggctctgccaccctctccatggcgtatgccggcgcccgctttgtcttctcccttgtggatgcaatgaatggaaaggaaggtgttgtggaatgttccttcgttaagtcacaggaaacggaatgtacctacttctccacaccgctgctgcttgggaaaaagggcatcgagaagaacctgggcatcggcaaagtctcctcttttgaggagaagatgatctcggatgccatccccgagctgaaggcctccatcaagaagggggaagatttcgtgaagaccctgaagtgagccgctgtgacgggtggccagtttccttaatttatgaaggcatcatgtcactgcaaagccgttgcagataaactttgtattttaatttgctttggtgatgattactgtattgagctgtgctttcttccctgtgagagccaactttagagtgtctgctacctcttcattaccaatcagaattagatgatgtttaactgttagactgaagcgtgacgctttcatcagtagcttcaagaaagtctaaattgttaatttatggaattggacacagtattcagtttacccgtacatgctcctcccgcccctcctgttggcacccttgcatcgcccaggcctgattcctcctgggggtagttcacccccacgggttcatagttcagcggcgaatgccaggcagctgttttctggctgagcaaacagcacctttctcattgagcttcctctactgacctctgtcccccttgggatttcatcttctgaccgaaccctgatgttcagtggcagagacagcccatagccagaactgtgggtagaccagggttggggtgtgcggtttgggacagcccaaaccccagccgctgtgtcaaggcctaggacgccatgctgccatcaaaagggggttccaggtttccatcagtggcctaaagaagggacttcttgttgtactgaggagtgcggaattaaagagatttgactccctttagtattgggggcagtccgttccccagacactgtggcctctgaagtggaaactgaaagctgcatacctgggaaagaactttctaggaataggcaatggccttcagtggaagagggagggctggaggtgtgcccagtacttggatgttcatctgtccacaacagctttttgtttttttaaaaaagctaaaatggaaatggattttatcataaaggatgacatcgttttcttctacaattaatacatgttcattgtataaaacccaaaaagcagctaaaaaataaagcgggaaaggaactactggtaaaaaaaaaac

SEQ ID NO: 451731 - DNA, 1550 bp, Homo sapiens
cgaccggaagtccggtcactctcgcgaggccccagagagcaggcgctgggcagtgtggaggtcgttggagtcacttccgcgtcaccagctcctgtgcctgccagtcggtgcccctcccgctccagccatgctctccgccctcgcccggcctgccagcgctgctctccgccgcagcttcagcacctcggcccagaacaatgctaaagtagctgtgctaggggcctctggaggcatcgggcagccactttcacttctcctgaagaacagccccttggtgagccgcctgaccctctatgatatcgcgcacacacccggagtggccgcagatctgagccacatcgagaccaaagccgctgtgaaaggctacctcggacctgaacagctgcctgactgcctgaaaggttgtgatgtggtagttattccggctggagtccccagaaagccaggcatgacccgggacgacctgttcaacaccaatgccacgattgtggccaccctgaccgctgcctgtgcccagcactgcccggaagccatgatctgcgtcattgccaatccggttaattccaccatccccatcacagcagaagttttcaagaagcatggagtgtacaaccccaacaaaatcttcggcgtgacgaccctggacatcgtcagagccaacacctttgttgcagagctgaagggtttggatccagctcgagtcaacgtccctgtcattggtggccatgctgggaagaccatcatccccctgatctctcagtgcacccccaaggtggactttccccaggaccagctgacagcactcactgggcggatccaggaggccggcacggaggtggtcaaggctaaagccggagcaggctctgccaccctctccatggcgtatgccggcgcccgctttgtcttctcccttgtggatgcaatgaatggaaaggaaggtgttgtggaatgttccttcgttaagtcacaggaaacggaatgtacctacttctccacaccgctgctgcttgggaaaaagggcatcgagaagaacctgggcatcggcaaagtctcctcttttgaggagaagatgatctcggatgccatccccgagctgaaggcctccatcaagaagggggaagatttcgtgaagaccctgaagtgagccgctgtgacgggtggccagtttccttaatttatgaaggcatcatgtcactgcaaagccgttgcagataaactttgtattttaatttgctttggtgatgattactgtattgacatcatcatgccttccaaattgtgggtggctctgtgggcgcatcaataaaagccgtccttaaaaaaaaaatcaacctccacccaaaactacccccacctatcctttctcctcacttctctcatgatcactccttttcctaacctttctctctctacttcctcacttgatcaaaaaaaaaaattccttttgcccaaattgcgagggccccgtttttgccccacggcaaaacttaacccagggctttaaagtcgggccgccttctctaaatgtccccccgttaatgtgccctttt

SEQ ID NO: 451732 - DNA, 2193 bp, Homo sapiens
  misc_feature (14)..(14): n is a, c, g, or t
aaggctaggtacgngcgggtgtgaatcggccgagggtgcctgccagtcggtgcccctcccgctccagccatgctctccgccctcgcccggcctgccagcgctgctctccgccgcagcttcagcacctcggcccagaacaatgctaaagtagctgtgctaggggcctctggaggcatcgggcagccactttcacttctcctgaagaacagccccttggtgagccgcctgaccctctatgatatcgcgcacacacccggagtggccgcagatctgagccacatcgagaccaaagccgctgtgaaaggctacctcggacctgaacagctgcctgactgcctgaaaggttgtgatgtggtagttattccggctggagtccccagaaagccaggcatgacccgggacgacctgttcaacaccaatgccacgattgtggccaccctgaccgctgcctgtgcccagcactgcccggaagccatgatctgcgtcattgccaatccggttaattccaccatccccatcacagcagaagttttcaagaagcatggagtgtacaaccccaacaaaatcttcggcgtgacgaccctggacatcgtcagagccaacacctttgttgcagagctgaagggtttggatccagctcgagtcaacgtccctgtcattggtggccatgctgggaagaccatcatccccctgatctctcagtgcacccccaaggtggactttccccaggaccagctgacagcactcactgggcggatccaggaggccggcacggaggtggtcaaggctaaagccggagcaggctctgccaccctctccatggcgtatgccggcgcccgctttgtcttctcccttgtggatgcaatgaatggaaaggaaggtgttgtggaatgttccttcgttaagtcacaggaaacggaatgtacctacttctccacaccgctgctgcttgggaaaaagggcatcgagaagaacctgggcatcggcaaagtctcctcttttgaggagaagatgatctcggatgccatccccgagctgaaggcctccatcaagaagggggaagatttcgtgaagaccctgaagtgagccgctgtgacgggtggccagtttccttaatttatgaaggcatcatgtcactgcaaagccgttgcagataaactttgtattttaatttgctttggtgatgattactgtattgacatcatcatgccttccaaattgtgggtggctctgtgggcgcatcaataaaagccgtccttgattttatttttcaaggtcccttctgtaaatgctgtgctttcttccctgtgagagccaactttagagtgtctgctacctcttcattaccaatcagaattagatgatgtttaactgttagactgaagcgtgacgctttcatcagtagcttcaagaaagtctaaattgttaatttatggaattggacacagtattcagtttacccgtacatgctcctcccgcccctcctgttggcacccttgcatcgcccaggcctgattcctcctgggggtagttcacccccacgggttcatagttcagcggcgaatgccaggcagctgttttctggctgagcaaacagcacctttctcattgagcttcctctactgacctctgtcccccttgggatttcatcttctgaccgaaccctgatgttcagtggcagagacagcccatagccagaactgtgggtagaccagggttggggtgtgcggtttgggacagcccaaaccccagccgctgtgtcaaggcctaggacgccatgctgccatcaaaagggggttccaggtttccatcagtggcctaaagaagggacttcttgttgtactgaggagtgcggaattaaagagatttgactccctttagtattgggggcagtccgttccccagacactgtggcctctgaagtggaaactgaaagctgcatacctgggaaagaactttctaggaataggcaatggccttcagtggaagagggagggctggaggtgtgcccagtacttggatgttcatctgtccacaacagctttttgtttttttaaaaaagctaaaatggaaatggattttatcataaaggatgacatcgttttcttctacaattaatacatgttcattgtataaaacccaaaaagcagctaaaaaataaagcgggaaaggaactactggtaaaaaaaaaac

SEQ ID NO: 451733 - DNA, 2201 bp, Homo sapiens
cgaccggaagtccggtcactctcgcgaggccccagagagcaggcgctgggcagtgtggaggtcgttggagtcacttccgcgtcaccagctcctgtgcctgccagtcggtgcccctcccgctccagccatgctctccgccctcgcccggcctgccagcgctgctctccgccgcagcttcagcacctcggcccagaacaatgctaaagtagctgtgctaggggcctctggaggcatcgggcagccactttcacttctcctgaagaacagccccttggtgagccgcctgaccctctatgatatcgcgcacacacccggagtggccgcagatctgagccacatcgagaccaaagccgctgtgaaaggctacctcggacctgaacagctgcctgactgcctgaaaggttgtgatgtggtagttattccggctggagtccccagaaagccaggcatgacccgggacgacctgttcaacaccaatgccacgattgtggccaccctgaccgctgcctgtgcccagcactgcccggaagccatgatctgcgtcattgccaatccggttaattccaccatccccatcacagcagaagttttcaagaagcatggagtgtacaaccccaacaaaatcttcggcgtgacgaccctggacatcgtcagagccaacacctttgttgcagagctgaagggtttggatccagctcgagtcaacgtccctgtcattggtggccatgctgggaagaccatcatccccctgatctctcagtgcacccccaaggtggactttccccaggaccagctgacagcactcactgggcggatccaggaggccggcacggaggtggtcaaggctaaagccggagcaggctctgccaccctctccatggcgtatgccggcgcccgctttgtcttctcccttgtggatgcaatgaatggaaaggaaggtgttgtggaatgttccttcgttaagtcacaggaaacggaatgtacctacttctccacaccgctgctgcttgggggagaagatgatctcggatgccatccccgagctgaaggcctccatcaagaagggggaagatttcgtgaagaccctgaagtgagccgctgtgacgggtggccagtttccttaatttatgaaggcatcatgtcactgcaaagccgttgcagataaactttgtattttaatttgctttggtgatgattactgtattgacatcatcatgccttccaaattgtgggtggctctgtgggcgcatcaataaaagccgtccttgattttatttttcaaggtcccttctgtaaatgctgtgctttcttccctgtgagagccaactttagagtgtctgctacctcttcattaccaatcagaattagatgatgtttaactgttagactgaagcgtgacgctttcatcagtagcttcaagaaagtctaaattgttaatttatggaattggacacagtattcagtttacccgtacatgctcctcccgcccctcctgttggcacccttgcatcgcccaggcctgattcctcctgggggtagttcacccccacgggttcatagttcagcggcgaatgccaggcagctgttttctggctgagcaaacagcacctttctcattgagcttcctctactgacctctgtcccccttgggatttcatcttctgaccgaaccctgatgttcagtggcagagacagcccatagccagaactgtgggtagaccagggttggggtgtgcggtttgggacagcccaaaccccagccgctgtgtcaaggcctaggacgccatgctgccatcaaaagggggttccaggtttccatcagtggcctaaagaagggacttcttgttgtactgaggagtgcggaattaaagagatttgactccctttagtattgggggcagtccgttccccagacactgtggcctctgaagtggaaactgaaagctgcatacctgggaaagaactttctaggaataggcaatggccttcagtggaagagggagggctggaggtgtgcccagtacttggatgttcatctgtccacaacagctttttgtttttttaaaaaagctaaaatggaaatggattttatcataaaggatgacatcgttttcttctacaattaatacatgttcattgtataaaacccaaaaagcagctaaaaaataaagcgggaaaggaactactggtaaaaaaaaaac

SEQ ID NO: 451734 - DNA, 1274 bp, Homo sapiens
cgaccggaagtccggtcactctcgcgaggccccagagagcaggcgctgggcagtgtggaggtcgttggagtcacttccgcgtcaccagctcctgtgcctgccagtcggtgcccctcccgctccagccatgctctccgccctcgcccggcctgccagcgctgctctccgccgcagcttcagcacctcggcccagaacaatgctaaagtagctgtgctaggggcctctggaggcatcgggcagccactttcacttctcctgaagaacagccccttggtgagccgcctgaccctctatgatatcgcgcacacacccggagtggccgcagatctgagccacatcgagaccaaagccgctgtgaaaggctacctcggacctgaacagctgcctgactgcctgaaaggttgtgatgtggtagttattccggctggagtccccagaaagccaggcatgacccgggacgacctgttcaacaccaatgccacgattgtggccaccctgaccgctgcctgtgcccagcactgcccggaagccatgatctgcgtcattgccaatccggttaattccaccatccccatcacagcagaagttttcaagaagcatggagtgtacaaccccaacaaaatcttcggcgtgacgaccctggacatcgtcagagccaacacctttgttgcagagctgaagggtttggatccagctcgagtcaacgtccctgtcattggtggccatgctgggaagaccatcatccccctgatctctcagtgcacccccaaggtggactttccccaggaccagctgacagcactcactgggcggatccaggaggccggcacggaggtggtcaaggctaaagccggagcaggctctgccaccctctccatggcgtatgccggcgcccgctttgtcttctcccttgtggatgcaatgaatggaaaggaaggtgttgtggaatgttccttcgttaagtcacaggaaacggaatgtacctacttctccacaccgctgctgcttgggaaaaagggcatcgagaagaacctgggcatcggcaaagtctcctcttttgaggagaagatgatctcggatgccatccccgagctgaaggcctccatcaagaagggggaagatttcgtgaagaccctgaagtgagccgctgtgacgggtggccagtttccttaatttatgaaggggactgtcatgtgtacaagccaacgcaagatcactggtgaactagagactttgccttgggattgagtagtagtatgtaggctataataca

SEQ ID NO: 451735 - DNA, 2136 bp, Homo sapiens
ccatgttcatgccactgccattaaaggagctgttcatgccactgccattaaaggagctgttcatgccactgccattaaaggagctgttcatgccactgccattaaaaacagctcctttaatggcagccactttcacttctcctgaagaacagccccttggtgagccgcctgaccctctatgatatcgcgcacacacccggagtggccgcagatctgagccacatcgagaccaaagccgctgtgaaaggctacctcggacctgaacagctgcctgactgcctgaaaggttgtgatgtggtagttattccggctggagtccccagaaagccaggcatgacccgggacgacctgttcaacaccaatgccacgattgtggccaccctgaccgctgcctgtgcccagcactgcccggaagccatgatctgcgtcattgccaatccggttaattccaccatccccatcacagcagaagttttcaagaagcatggagtgtacaaccccaacaaaatcttcggcgtgacgaccctggacatcgtcagagccaacacctttgttgcagagctgaagggtttggatccagctcgagtcaacgtccctgtcattggtggccatgctgggaagaccatcatccccctgatctctcagtgcacccccaaggtggactttccccaggaccagctgacagcactcactgggcggatccaggaggccggcacggaggtggtcaaggctaaagccggagcaggctctgccaccctctccatggcgtatgccggcgcccgctttgtcttctcccttgtggatgcaatgaatggaaaggaaggtgttgtggaatgttccttcgttaagtcacaggaaacggaatgtacctacttctccacaccgctgctgcttgggaaaaagggcatcgagaagaacctgggcatcggcaaagtctcctcttttgaggagaagatgatctcggatgccatccccgagctgaaggcctccatcaagaagggggaagatttcgtgaagaccctgaagtgagccgctgtgacgggtggccagtttccttaatttatgaaggcatcatgtcactgcaaagccgttgcagataaactttgtattttaatttgctttggtgatgattactgtattgacatcatcatgccttccaaattgtgggtggctctgtgggcgcatcaataaaagccgtccttgattttatttttcaaggtcccttctgtaaatgctgtgctttcttccctgtgagagccaactttagagtgtctgctacctcttcattaccaatcagaattagatgatgtttaactgttagactgaagcgtgacgctttcatcagtagcttcaagaaagtctaaattgttaatttatggaattggacacagtattcagtttacccgtacatgctcctcccgcccctcctgttggcacccttgcatcgcccaggcctgattcctcctgggggtagttcacccccacgggttcatagttcagcggcgaatgccaggcagctgttttctggctgagcaaacagcacctttctcattgagcttcctctactgacctctgtcccccttgggatttcatcttctgaccgaaccctgatgttcagtggcagagacagcccatagccagaactgtgggtagaccagggttggggtgtgcggtttgggacagcccaaaccccagccgctgtgtcaaggcctaggacgccatgctgccatcaaaagggggttccaggtttccatcagtggcctaaagaagggacttcttgttgtactgaggagtgcggaattaaagagatttgactccctttagtattgggggcagtccgttccccagacactgtggcctctgaagtggaaactgaaagctgcatacctgggaaagaactttctaggaataggcaatggccttcagtggaagagggagggctggaggtgtgcccagtacttggatgttcatctgtccacaacagctttttgtttttttaaaaaagctaaaatggaaatggattttatcataaaggatgacatcgttttcttctacaattaatacatgttcattgtataaaacccaaaaagcagctaaaaaataaagcgggaaaggaactactggtaaaaaaaaaac

SEQ ID NO: 451736 - DNA, 2316 bp, Homo sapiens
cgaccggaagtccggtcactctcgcgaggccccagagagcaggcgctgggcagtgtggaggtcgttggagtcacttccgcgtcaccagctcctgtgcctgccagtcggtgcccctcccgctccagccatgctctccgccctcgcccggcctgccagcgctgctctccgccgcagcttcagcacctcggcccagaacaatgctaaagtagctgtgctaggggcctctggaggcatcgggcagccactttcacttctcctgaagaacagccccttggtgagccgcctgaccctctatgatatcgcgcacacacccggagtggccgcagatctgagccacatcgagaccaaagccgctgtgaaaggtactgggcgcgctgaccctggagacttgcttcctgtccccagtaggccaggattcgagttttgagctacctcggacctgaacagctgcctgactgcctgaaaggttgtgatgtggtagttattccggctggagtccccagaaagccaggcatgacccgggacgacctgttcaacaccaatgccacgattgtggccaccctgaccgctgcctgtgcccagcactgcccggaagccatgatctgcgtcattgccaatccggttaattccaccatccccatcacagcagaagttttcaagaagcatggagtgtacaaccccaacaaaatcttcggcgtgacgaccctggacatcgtcagagccaacacctttgttgcagagctgaagggtttggatccagctcgagtcaacgtccctgtcattggtggccatgctgggaagaccatcatccccctgatctctcagtgcacccccaaggtggactttccccaggaccagctgacagcactcactgggcggatccaggaggccggcacggaggtggtcaaggctaaagccggagcaggctctgccaccctctccatggcgtatgccggcgcccgctttgtcttctcccttgtggatgcaatgaatggaaaggaaggtgttgtggaatgttccttcgttaagtcacaggaaacggaatgtacctacttctccacaccgctgctgcttgggaaaaagggcatcgagaagaacctgggcatcggcaaagtctcctcttttgaggagaagatgatctcggatgccatccccgagctgaaggcctccatcaagaagggggaagatttcgtgaagaccctgaagtgagccgctgtgacgggtggccagtttccttaatttatgaaggcatcatgtcactgcaaagccgttgcagataaactttgtattttaatttgctttggtgatgattactgtattgacatcatcatgccttccaaattgtgggtggctctgtgggcgcatcaataaaagccgtccttgattttatttttcaaggtcccttctgtaaatgctgtgctttcttccctgtgagagccaactttagagtgtctgctacctcttcattaccaatcagaattagatgatgtttaactgttagactgaagcgtgacgctttcatcagtagcttcaagaaagtctaaattgttaatttatggaattggacacagtattcagtttacccgtacatgctcctcccgcccctcctgttggcacccttgcatcgcccaggcctgattcctcctgggggtagttcacccccacgggttcatagttcagcggcgaatgccaggcagctgttttctggctgagcaaacagcacctttctcattgagcttcctctactgacctctgtcccccttgggatttcatcttctgaccgaaccctgatgttcagtggcagagacagcccatagccagaactgtgggtagaccagggttggggtgtgcggtttgggacagcccaaaccccagccgctgtgtcaaggcctaggacgccatgctgccatcaaaagggggttccaggtttccatcagtggcctaaagaagggacttcttgttgtactgaggagtgcggaattaaagagatttgactccctttagtattgggggcagtccgttccccagacactgtggcctctgaagtggaaactgaaagctgcatacctgggaaagaactttctaggaataggcaatggccttcagtggaagagggagggctggaggtgtgcccagtacttggatgttcatctgtccacaacagctttttgtttttttaaaaaagctaaaatggaaatggattttatcataaaggatgacatcgttttcttctacaattaatacatgttcattgtataaaacccaaaaagcagctaaaaaataaagcgggaaaggaactactggtaaaaaaaaaac

SEQ ID NO: 451737 - DNA, 2082 bp, Homo sapiens
cgaccggaagtccggtcactctcgcgaggccccagagagcaggcgctgggcagtgtggaggtcgttggagtcacttccgcgtcaccagctcctgtgcctgccagtcggtgcccctcccgctccagccatgctctccgccctcgcccggcctgccagcgctgctctccgccgcagcttcagcacctcggcccaggctacctcggacctgaacagctgcctgactgcctgaaaggttgtgatgtggtagttattccggctggagtccccagaaagccaggcatgacccgggacgacctgttcaacaccaatgccacgattgtggccaccctgaccgctgcctgtgcccagcactgcccggaagccatgatctgcgtcattgccaatccggttaattccaccatccccatcacagcagaagttttcaagaagcatggagtgtacaaccccaacaaaatcttcggcgtgacgaccctggacatcgtcagagccaacacctttgttgcagagctgaagggtttggatccagctcgagtcaacgtccctgtcattggtggccatgctgggaagaccatcatccccctgatctctcagtgcacccccaaggtggactttccccaggaccagctgacagcactcactgggcggatccaggaggccggcacggaggtggtcaaggctaaagccggagcaggctctgccaccctctccatggcgtatgccggcgcccgctttgtcttctcccttgtggatgcaatgaatggaaaggaaggtgttgtggaatgttccttcgttaagtcacaggaaacggaatgtacctacttctccacaccgctgctgcttgggaaaaagggcatcgagaagaacctgggcatcggcaaagtctcctcttttgaggagaagatgatctcggatgccatccccgagctgaaggcctccatcaagaagggggaagatttcgtgaagaccctgaagtgagccgctgtgacgggtggccagtttccttaatttatgaaggcatcatgtcactgcaaagccgttgcagataaactttgtattttaatttgctttggtgatgattactgtattgacatcatcatgccttccaaattgtgggtggctctgtgggcgcatcaataaaagccgtccttgattttatttttcaaggtcccttctgtaaatgctgtgctttcttccctgtgagagccaactttagagtgtctgctacctcttcattaccaatcagaattagatgatgtttaactgttagactgaagcgtgacgctttcatcagtagcttcaagaaagtctaaattgttaatttatggaattggacacagtattcagtttacccgtacatgctcctcccgcccctcctgttggcacccttgcatcgcccaggcctgattcctcctgggggtagttcacccccacgggttcatagttcagcggcgaatgccaggcagctgttttctggctgagcaaacagcacctttctcattgagcttcctctactgacctctgtcccccttgggatttcatcttctgaccgaaccctgatgttcagtggcagagacagcccatagccagaactgtgggtagaccagggttggggtgtgcggtttgggacagcccaaaccccagccgctgtgtcaaggcctaggacgccatgctgccatcaaaagggggttccaggtttccatcagtggcctaaagaagggacttcttgttgtactgaggagtgcggaattaaagagatttgactccctttagtattgggggcagtccgttccccagacactgtggcctctgaagtggaaactgaaagctgcatacctgggaaagaactttctaggaataggcaatggccttcagtggaagagggagggctggaggtgtgcccagtacttggatgttcatctgtccacaacagctttttgtttttttaaaaaagctaaaatggaaatggattttatcataaaggatgacatcgttttcttctacaattaatacatgttcattgtataaaacccaaaaagcagctaaaaaataaagcgggaaaggaactactggtaaaaaaaaaac

SEQ ID NO: 451738 - DNA, 2193 bp, Homo sapiens
cgaccggaagtccggtcactctcgcgaggccccagagagcaggcgctgggcagtgtggaggtcgttggagtcacttccgcgtcaccagctcctgtgcctgccagtcggtgcccctcccgctccagccatgctctccgccctcgcccggcctgccagcgctgctctccgccgcagcttcagcacctcggcccagaacaatgctaaagtagctgtgctaggggcctctggaggcatcgggcagccactttcacttctcctgaagaacagccccttggtgagccgcctgaccctctatgatatcgcgcacacacccggagtggccgcagatctgagccacatcgagaccaaagccgctgtgaaaggctacctcggacctgaacagctgcctgactgcctgaaaggttgtgatgtggtagttattccggctggagtccccagaaagccaggcatgacccgggacgacctgttcaacaccaatgccacgattgtggccaccctgaccgctgcctgtgcccagcactgcccggaagccatgatctgcgtcattgccaatccggttaattccaccatccccatcacagcagaagttttcaagaagcatggagtgtacaaccccaacaaaatggtttggatccagctcgagtcaacgtccctgtcattggtggccatgctgggaagaccatcatccccctgatctctcagtgcacccccaaggtggactttccccaggaccagctgacagcactcactgggcggatccaggaggccggcacggaggtggtcaaggctaaagccggagcaggctctgccaccctctccatggcgtatgccggcgcccgctttgtcttctcccttgtggatgcaatgaatggaaaggaaggtgttgtggaatgttccttcgttaagtcacaggaaacggaatgtacctacttctccacaccgctgctgcttgggaaaaagggcatcgagaagaacctgggcatcggcaaagtctcctcttttgaggagaagatgatctcggatgccatccccgagctgaaggcctccatcaagaagggggaagatttcgtgaagaccctgaagtgagccgctgtgacgggtggccagtttccttaatttatgaaggcatcatgtcactgcaaagccgttgcagataaactttgtattttaatttgctttggtgatgattactgtattgacatcatcatgccttccaaattgtgggtggctctgtgggcgcatcaataaaagccgtccttgattttatttttcaaggtcccttctgtaaatgctgtgctttcttccctgtgagagccaactttagagtgtctgctacctcttcattaccaatcagaattagatgatgtttaactgttagactgaagcgtgacgctttcatcagtagcttcaagaaagtctaaattgttaatttatggaattggacacagtattcagtttacccgtacatgctcctcccgcccctcctgttggcacccttgcatcgcccaggcctgattcctcctgggggtagttcacccccacgggttcatagttcagcggcgaatgccaggcagctgttttctggctgagcaaacagcacctttctcattgagcttcctctactgacctctgtcccccttgggatttcatcttctgaccgaaccctgatgttcagtggcagagacagcccatagccagaactgtgggtagaccagggttggggtgtgcggtttgggacagcccaaaccccagccgctgtgtcaaggcctaggacgccatgctgccatcaaaagggggttccaggtttccatcagtggcctaaagaagggacttcttgttgtactgaggagtgcggaattaaagagatttgactccctttagtattgggggcagtccgttccccagacactgtggcctctgaagtggaaactgaaagctgcatacctgggaaagaactttctaggaataggcaatggccttcagtggaagagggagggctggaggtgtgcccagtacttggatgttcatctgtccacaacagctttttgtttttttaaaaaagctaaaatggaaatggattttatcataaaggatgacatcgttttcttctacaattaatacatgttcattgtataaaacccaaaaagcagctaaaaaataaagcgggaaaggaactactggtaaaaaaaaaac

SEQ ID NO: 451739 - DNA, 1470 bp, Homo sapiens
tgtcttggctggcggggccggctcacctgggcgtcacgtttgtggcaccagccaggctgacctgtctgtgcccccctaggctctgccaccctctccatggcgtatgccggcgcccgctttgtcttctcccttgtggatgcaatgaatggaaaggaaggtgttgtggaatgttccttcgttaagtcacaggaaacggaatgtacctacttctccacaccgctgctgcttgggaaaaagggcatcgagaagaacctgggcatcggcaaagtctcctcttttgaggagaagatgatctcggatgccatccccgagctgaaggcctccatcaagaagggggaagatttcgtgaagaccctgaagtgagccgctgtgacgggtggccagtttccttaatttatgaaggcatcatgtcactgcaaagccgttgcagataaactttgtattttaatttgctttggtgatgattactgtattgacatcatcatgccttccaaattgtgggtggctctgtgggcgcatcaataaaagccgtccttgattttatttttcaaggtcccttctgtaaatgctgtgctttcttccctgtgagagccaactttagagtgtctgctacctcttcattaccaatcagaattagatgatgtttaactgttagactgaagcgtgacgctttcatcagtagcttcaagaaagtctaaattgttaatttatggaattggacacagtattcagtttacccgtacatgctcctcccgcccctcctgttggcacccttgcatcgcccaggcctgattcctcctgggggtagttcacccccacgggttcatagttcagcggcgaatgccaggcagctgttttctggctgagcaaacagcacctttctcattgagcttcctctactgacctctgtcccccttgggatttcatcttctgaccgaaccctgatgttcagtggcagagacagcccatagccagaactgtgggtagaccagggttggggtgtgcggtttgggacagcccaaaccccagccgctgtgtcaaggcctaggacgccatgctgccatcaaaagggggttccaggtttccatcagtggcctaaagaagggacttcttgttgtactgaggagtgcggaattaaagagatttgactccctttagtattgggggcagtccgttccccagacactgtggcctctgaagtggaaactgaaagctgcatacctgggaaagaactttctaggaataggcaatggccttcagtggaagagggagggctggaggtgtgcccagtacttggatgttcatctgtccacaacagctttttgtttttttaaaaaagctaaaatggaaatggattttatcataaaggatgacatcgttttcttctacaattaatacatgttcattgtataaaacccaaaaagcagctaaaaaataaagcgggaaaggaactactggtaaaaaaaaaac

SEQ ID NO: 451740 - DNA, 613 bp, Homo sapiens
cgaccggaagtccggtcactctcgcgaggccccagagagcaggcgctgggcagtgtggaggtcgttggagtcacttccgcgtcaccagctcctgtgcctgccagtcggtgcccctcccgctccagccatgctctccgccctcgcccggcctgccagcgctgctctccgccgcagcttcagcacctcggcccagaacaatgctaaagtagctgtgctaggggcctctggaggcatcgggcagccactttcacttctcctgaagaacagccccttggtgagccgcctgaccctctatgatatcgcgcacacacccggagtggccgcagatctgagccacatcgagaccaaagccgctgtgaaaggctacctcggacctgaacagctgcctgactgcctgaaaggttgtgatgtggtagttattccggctggagtccccagaaagccaggcatgacccgggacgacctgttcaacaccaatgccacgattgtggccaccctgaccgctgcctgtgcccagcactgcccggaagccatgatctgcgtcattgccaatccggttaattccaccatccccattccccacatcataggcgaaaaccatgtcccggatatg

SEQ ID NO: 451741 - DNA, 1252 bp, Homo sapiens
aaagaatatggaggttccaggctaggggtcaaatcggagctgcagctgccagcctaagtcagagccacagcaacgcgggacccgagccacgtctgcaacctacaccacagctcatggcaatgccggatcacacgggctcccggagcccgctgtgacgggtggccagtttccttaatttatgaaggcatcatgtcactgcaaagccgttgcagataaactttgtattttaatttgctttggtgatgattactgtattgacatcatcatgccttccaaattgtgggtggctctgtgggcgcatcaataaaagccgtccttgattttatttttcaaggtcccttctgtaaatgctgtgctttcttccctgtgagagccaactttagagtgtctgctacctcttcattaccaatcagaattagatgatgtttaactgttagactgaagcgtgacgctttcatcagtagcttcaagaaagtctaaattgttaatttatggaattggacacagtattcagtttacccgtacatgctcctcccgcccctcctgttggcacccttgcatcgcccaggcctgattcctcctgggggtagttcacccccacgggttcatagttcagcggcgaatgccaggcagctgttttctggctgagcaaacagcacctttctcattgagcttcctctactgacctctgtcccccttgggatttcatcttctgaccgaaccctgatgttcagtggcagagacagcccatagccagaactgtgggtagaccagggttggggtgtgcggtttgggacagcccaaaccccagccgctgtgtcaaggcctaggacgccatgctgccatcaaaagggggttccaggtttccatcagtggcctaaagaagggacttcttgttgtactgaggagtgcggaattaaagagatttgactccctttagtattgggggcagtccgttccccagacactgtggcctctgaagtggaaactgaaagctgcatacctgggaaagaactttctaggaataggcaatggccttcagtggaagagggagggctggaggtgtgcccagtacttggatgttcatctgtccacaacagctttttgtttttttaaaaaagctaaaatggaaatggattttatcataaaggatgacatcgttttcttctacaattaatacatgttcattgtataaaacccaaaaagcagctaaaaaataaagcgggaaaggaactactggtaaaaaaaaaac

SEQ ID NO: 451742 - DNA, 1379 bp, Homo sapiens
tgtcttggctggcggggccggctcacctgggcgtcacgtttgtggcaccagccaggctgacctgtctgtgcccccctaggctctgccaccctctccatggcgtatgccggcgcccgctttgtcttctcccttgtggatgcaatgaatggaaaggaaggtgttgtggaatgttccttcgttaagtcacaggaaacggaatgtacctacttctccacaccgctgctgcttgggaaaaagggcatcgagaagaacctgggcatcggcaaagtctcctcttttgaggagaagatgatctcggatgccatccccgagctgaaggcctccatcaagaagggggaagatttcgtgaagaccctgaagtgagccgctgtgacgggtggccagtttccttaatttatgaaggcatcatgtcactgcaaagccgttgcagataaactttgtattttaatttgctttggtgatgattactgtattgagctgtgctttcttccctgtgagagccaactttagagtgtctgctacctcttcattaccaatcagaattagatgatgtttaactgttagactgaagcgtgacgctttcatcagtagcttcaagaaagtctaaattgttaatttatggaattggacacagtattcagtttacccgtacatgctcctcccgcccctcctgttggcacccttgcatcgcccaggcctgattcctcctgggggtagttcacccccacgggttcatagttcagcggcgaatgccaggcagctgttttctggctgagcaaacagcacctttctcattgagcttcctctactgacctctgtcccccttgggatttcatcttctgaccgaaccctgatgttcagtggcagagacagcccatagccagaactgtgggtagaccagggttggggtgtgcggtttgggacagcccaaaccccagccgctgtgtcaaggcctaggacgccatgctgccatcaaaagggggttccaggtttccatcagtggcctaaagaagggacttcttgttgtactgaggagtgcggaattaaagagatttgactccctttagtattgggggcagtccgttccccagacactgtggcctctgaagtggaaactgaaagctgcatacctgggaaagaactttctaggaataggcaatggccttcagtggaagagggagggctggaggtgtgcccagtacttggatgttcatctgtccacaacagctttttgtttttttaaaaaagctaaaatggaaatggattttatcataaaggatgacatcgttttcttctacaattaatacatgttcattgtataaaacccaaaaagcagctaaaaaataaagcgggaaaggaactactggtaaaaaaaaaac

SEQ ID NO: 451743 - DNA, 641 bp, Homo sapiens
  misc_feature (14)..(14): n is a, c, g, or t
aaggctaggtacgngcgggtgtgaatcggccgaggtgtggaggtcgttggagtcacttccgcgtcaccagctcctgtgcctgccagtcggtgcccctcccgctccagccatgctctccgccctcgcccggcctgccagcgctgctctccgccgcagcttcagcacctcggcccagcgttccattgctttgacgtagctaatctccttgcagcatccgtgtgagttgtgcgtgaataaaagaaatcgtatacttcctaattccatagtatggacaaaccgaggctagagaactgggccagggttacagtcatttggccagaggattagaattcagcgcttctgacctgaagacggcttcctcttaacctttttggaggatctctcctgctgtgggcggactgagcctgccgccaggtgtcttaacagtgcttgacttggcccgcgaccacttaagcctaggagcctaggctatttttagccatcttctagaatggtggttcttaaactctgcagtgtgtcagaatcaccagaaagctaataaaaaacagacgtctgggttcattgaagaagcttaagactgcgggggggggggtccgcatttttaccaggtgaatctaattaaacctaattttgagaaccca

SEQ ID NO: 451744 - DNA, 927 bp, Homo sapiens
  misc_feature (14)..(14): n is a, c, g, or t
aaggctaggtacgngcgggtgtgaatcggccgaggtgtggaggtcgttggagtcacttccgcgtcaccagctcctgtgcctgccagtcggtgcccctcccgctccagccatgctctccgccctcgcccggcctgccagcgctgctctccgccgcagcttcagcacctcggcccagcgttccattgctttgacgtagctaatctccttgcagcatccgtgtgagttgtgcgtgaataaaagaaatcgtatacttcctaattccatagtatggacaaaccgaggctagagaactgggccagggttacagtcatttggccagaggattagaattcagcgcttctgacctgaagacggcttcctcttaacctttttggaggatctctcctgctgtgggcggactgagcctgccgccaggtgtcttaacagtgcttgacttggcccgcgaccacttaagcctaggagcctaggctatttttagccatcttctagaatggtggttcttaaactctgcagtgtgtcagaatcaccagaaagctaataaaaaacagacgtctgggttcattgaagaagcttaagactgcgggggggggggtccgcatttttaccaggtgaatctaattaaacctaattttgagaacccaagaggtgctcgcatgccttttaattacgacgcccaagagggaggtaattttaaaggggaatccaaatttatcatcgaagttctcgagtttcctgtacatccagttcatttgaaaaataaatacaaatgctcctggattgatggctacttcccatacccatcgcaagttgttaatatcctgagtcaaaaggcgagtttaactttgtgtattttcaacttgcaatgggttcccacaggcaaccccattgtaagttgaatgtaccaaatgcttttgcgcaggtgaaatg

SEQ ID NO: 451745 - DNA, 272 bp, Homo sapiens
  misc_feature (14)..(14): n is a, c, g, or t
aaggctaggtacgngcgggtgtgaatcggccgaggtgtggaggtcgttggagtcacttccgcgtcaccagctcctgtgcctgccagtcggtgcccctcccgctccagccatgctctccgccctcgcccggcctgccagcgctgctctccgccgcagcttcagcacctcggcccaggtggaggttgcagtgagccaagatcacaccactgcactccagcctgggtgacagagcaagactccctctcaaaaaaaaaaaaaaggagttttcatca

SEQ ID NO: 451746 - DNA, 345 bp, Homo sapiens
cggacgcgtgggtcgagaagatgagctcggggatggcatccgagatcatcttctcctcaaaagaggagactttgccgatgcccaggttctggagaagatgatctcggatgccatccccgagctgaaggcctccatcaagaagggggaagatttcgtgaagaccctgaagtgagccgctgtgacgggtggccagtttccttaatttatgaaggcatcatgtcactgcaaagccgttgcagataaactttgtattttaatttgctttggtgatgattactgtattgacatcatcatgccttccaaattgtgggtggctctgtgggcgcatcaataaaagccgtcctt

SEQ ID NO: 451747 - DNA, 2251 bp, Homo sapiens
cgaccggaagtccggtcactctcgcgaggccccagagagcaggcgctgggcagtgtggaggtcgttggagtcacttccgcgtcaccagctcctgtgcctgccagtcggtgcccctcccgctccagccatgctctccgccctcgcccggcctgccagcgctgctctccgccgcagcttcagcacctcggcccagaacaatgctaaagtagctgtgctaggggcctctggaggcatcgggcagccactttcacttctcctgaagaacagccccttggtgagccgcctgaccctctatgatatcgcgcacacacccggagtggccgcagatctgagccacatcgagaccaaagccgctgtgaaaggctacctcggacctgaacagctgcctgactgcctgaaaggttgtgatgtggtagttattccggctggagtccccagaaagccaggcatgacccgggacgacctgttcaacaccaatgccacgattgtggccaccctgaccgctgcctgtgcccagcactgcccggaagccatgatctgcgtcattgccaatccggttaattccaccatccccatcacagcagaagttttcaagaagcatggagtgtacaaccccaacaaaatcttcggcgtgacgaccctggacatcgtcagagccaacacctttgttgcagagctgaagggtttggatccagctcgagtcaacgtccctgtcattggtggccatgctgggaagaccatcatccccctgatctctcagtgcacccccaaggtggactttccccaggaccagctgacagcactcactgggcggatccaggaggccggcacggaggtggtcaaggctaaagccggagcaggctctgccaccctctccatggcgtatgccggcgcccgctttgtcttctcccttgtggatgcaatgaatggaaaggaaggtgttgtggaatgttccttcgttaagtcacaggaaacggaatgtacctacttctccacaccgctgctgcttgggaaaaagggcatcgagaagaacctgggcatcggcaaagtctcctcttttgaggagaagatgatctcggatgccatccccgagctgaaggcctccatcaagaagggggaagatttcgtgaagaccctgaagtgagccgctgtgacgggtggccagtttccttaatttatgaaggcatcatgtcactgcaaagccgttgcagataaactttgtattttaatttgctttggtgatgattactgtattgacatcatcatgccttccaaattgtgggtggctctgtgggcgcatcaataaaagccgtccttgattttatttttcaaggtcccttctgtaaatgctgtgctttcttccctgtgagagccaactttagagtgtctgctacctcttcattaccaatcagaattagatgatgtttaactgttagactgaagcgtgacgctttcatcagtagcttcaagaaagtctaaattgttaatttatggaattggacacagtattcagtttacccgtacatgctcctcccgcccctcctgttggcacccttgcatcgcccaggcctgattcctcctgggggtagttcacccccacgggttcatagttcagcggcgaatgccaggcagctgttttctggctgagcaaacagcacctttctcattgagcttcctctactgacctctgtcccccttgggatttcatcttctgaccgaaccctgatgttcagtggcagagacagcccatagccagaactgtgggtagaccagggttggggtgtgcggtttgggacagcccaaaccccagccgctgtgtcaaggcctaggacgccatgctgccatcaaaagggggttccaggtttccatcagtggcctaaagaagggacttcttgttgtactgaggagtgcggaattaaagagatttgactccctttagtattgggggcagtccgttccccagacactgtggcctctgaagtggaaactgaaagctgcatacctgggaaagaactttctaggaataggcaatggccttcagtggaagagggagggctggaggtgtgcccagtacttggatgttcatctgtccacaacagctttttgtttttttaaaaaagctaaaatggaaatggattttatcataaaggatgacatcgttttcttctacaattaatacatgttcattgtataaaacccaaaaagcagctaaaaaataaagcgggaaaggaactactggtaaaaaaaaaac

SEQ ID NO: 451748 - DNA, 1563 bp, Homo sapiens
  misc_feature (1454)..(1454): n is a, c, g, or t
cgaccggaagtccggtcactctcgcgaggccccagagagcaggcgctgggcagtgtggaggtcgttggagtcacttccgcgtcaccagctcctgtgcctgccagtcggtgcccctcccgctccagccatgctctccgccctcgcccggcctgccagcgctgctctccgccgcagcttcagcacctcggcccagaacaatgctaaagtagctgtgctaggggcctctggaggcatcgggcagccactttcacttctcctgaagaacagccccttggtgagccgcctgaccctctatgatatcgcgcacacacccggagtggccgcagatctgagccacatcgagaccaaagccgctgtgaaaggctacctcggacctgaacagctgcctgactgcctgaaaggttgtgatgtggtagttattccggctggagtccccagaaagccaggcatgacccgggacgacctgttcaacaccaatgccacgattgtggccaccctgaccgctgcctgtgcccagcactgcccggaagccatgatctgcgtcattgccaatccggttaattccaccatccccatcacagcagaagttttcaagaagcatggagtgtacaaccccaacaaaatcttcggcgtgacgaccctggacatcgtcagagccaacacctttgttgcagagctgaagggtttggatccagctcgagtcaacgtccctgtcattggtggccatgctgggaagaccatcatccccctgatctctcagtgcacccccaaggtggactttccccaggaccagctgacagcactcactgggcggatccaggaggccggcacggaggtggtcaaggctaaagccggagcaggctctgccaccctctccatggcgtatgccggcgcccgctttgtcttctcccttgtggatgcaatgaatggaaaggaaggtgttgtggaatgttccttcgttaagtcacaggaaacggaatgtacctacttctccacaccgctgctgcttgggaaaaagggcatcgagaagaacctgggcatcggcaaagtctcctcttttgaggagaagatgatctcggatgccatccccgagctgaaggcctccatcaagaagggggaagatttcgtgaagaccctgaagtgagccgctgtgacgggtggccagtttccttaatttatgaaggcatcatgtcactgcaaagccgttgcagataaactttgtattttaatttgctttggtgatgattactgtattgacatcatcatgccttccaaattgtgggtggctctgtgggcgcatcaataaaagccgtccttgattttatttttcaaggtcccttctgtaaataaaaaaaaaaaaaaaaaaaaaaaaaaaaaaaaaaaaaaaaaaaaaaaaaaaaaaaaacaaaaaaaaaaaaaaaaacaaaaaaaaaaaaaaaaaaaaaaacaaaaanaaaagaaaacaaagcgagacgagggcacggcgcacgcacatagcaacccccgcgagcggcgacgaaaaaatacgcccaccccaccacattcgaagcacggggcaacgaa

SEQ ID NO: 451749 - DNA, 2220 bp, Homo sapiens
cgaccggaagtccggtcactctcgcgaggccccagagagcaggcgctgggcagtgtggaggtcgttggagtcacttccgcgtcaccagctcctgtgcctgccagtcggtgcccctcccgctccagccatgctctccgccctcgcccggcctgccagcgctgctctccgccgcagcttcagcacctcggcccagaacaatgctaaagtagctgtgctaggggcctctggaggcatcgggcagccactttcacttctcctgaagaacagccccttggtgagccgcctgaccctctatgatatcgcgcacacacccggagtggccgcagatctgagccacatcgagaccaaagccgctgtgaaaggctacctcggacctgaacagctgcctgactgcctgaaaggttgtgatgtggtagttattccggctggagtccccagaaagccaggcatgacccgggacgacctgttcaacaccaatgccacgattgtggccaccctgaccgctgcctgtgcccagcactgcccggaagccatgatctgcgtcattgccaatccggttaattccaccatccccatcacagcagaagttttcaagaagcatggagtgtacaaccccaacaaaatcttcggcgtgacgaccctggacatcgtcagagccaacacctttgttgcagagctgaagggtttggatccagctcgagtcaacgtccctgtcattggtggccatgctgggaagaccatcatccccctgatctctcagtgcacccccaaggtggactttccccaggaccagctgacagcactcactgggcggatccaggaggccggcacggaggtggtcaaggctaaagccggagcaggctctgccaccctctccatggcgtatgccggcgcccgctttgtcttctcccttgtggatgcaatgaatggaaaggaaggtgttgtggaatgttccttcgttaagtcacaggaaacggaatgtacctacttctccacaccgctgctgcttgggaaaaagggcatcgagaagaacctgggcatcggcaaagtctcctcttttgaggagaagatgatctcggatgccatccccgagctgaaggcctccatcaagaagggggaagatttcgtgaagaccctgaagtgagccgctgtgacgggtggccagtttccttaatttatgaaggcatcatgtcactgcaaagccgttgcagataaactttgtattttaatttgctttggtgatgattactgtattgacatcatcatgccttccaaattgtgggtggctctgtgggcgcatcaataaaagccgtccttgctgtgctttcttccctgtgagagccaactttagagtgtctgctacctcttcattaccaatcagaattagatgatgtttaactgttagactgaagcgtgacgctttcatcagtagcttcaagaaagtctaaattgttaatttatggaattggacacagtattcagtttacccgtacatgctcctcccgcccctcctgttggcacccttgcatcgcccaggcctgattcctcctgggggtagttcacccccacgggttcatagttcagcggcgaatgccaggcagctgttttctggctgagcaaacagcacctttctcattgagcttcctctactgacctctgtcccccttgggatttcatcttctgaccgaaccctgatgttcagtggcagagacagcccatagccagaactgtgggtagaccagggttggggtgtgcggtttgggacagcccaaaccccagccgctgtgtcaaggcctaggacgccatgctgccatcaaaagggggttccaggtttccatcagtggcctaaagaagggacttcttgttgtactgaggagtgcggaattaaagagatttgactccctttagtattgggggcagtccgttccccagacactgtggcctctgaagtggaaactgaaagctgcatacctgggaaagaactttctaggaataggcaatggccttcagtggaagagggagggctggaggtgtgcccagtacttggatgttcatctgtccacaacagctttttgtttttttaaaaaagctaaaatggaaatggattttatcataaaggatgacatcgttttcttctacaattaatacatgttcattgtataaaacccaaaaagcagctaaaaaataaagcgggaaaggaactactggtaaaaaaaaaac

SEQ ID NO: 451750 - DNA, 1678 bp, Homo sapiens
cgaccggaagtccggtcactctcgcgaggccccagagagcaggcgctgggcagtgtggaggtcgttggagtcacttccgcgtcaccagctcctgtgcctgccagtcggtgcccctcccgctccagccatgctctccgccctcgcccggcctgccagcgctgctctccgccgcagcttcagcacctcggcccagaacaatgctaaagtagctgtgctaggggcctctggaggcatcgggcagccactttcacttctcctgaagaacagccccttggtgagccgcctgaccctctatgatatcgcgcacacacccggagtggccgcagatctgagccacatcgagaccaaagccgctgtgaaaggctacctcggacctgaacagctgcctgactgcctgaaaggttgtgatgtggtagttattccggctggagtccccagaaagccaggcatgacccgggacgacctgttcaacaccaatgccacgattgtggccaccctgaccgctgcctgtgcccagcactgcccggaagccatgatctgcgtcattgccaatccggttaattccaccatccccatcacagcagaagttttcaagaagcatggagtgtacaaccccaacaaaatcttcggcgtgacgaccctggacatcgtcagagccaacacctttgttgcagagctgaagggtttggatccagctcgagtcaacgtccctgtcattggtggccatgctgggaagaccatcatccccctgatctctcagtgcacccccaaggtggactttccccaggaccagctgacagcactcactgggcggatccaggaggccggcacggaggtggtcaaggctaaagccggagcaggctctgccaccctctccatggcgtatgccggcgcccgctttgtcttctcccttgtggatgcaatgaatggaaaggaaggtgttgtggaatgttccttcgttaagtcacaggaaacggaatgtacctacttctccacaccgctgctgcttgggaaaaagggcatcgagaagaacctgggcatcggcaaagtctcctcttttgaggagaagatgatctcggatgccatccccgagctgaaggcctccatcaagaagggggaagatttcgtgaagaccctgaagtgagccgctgtgacgggtggccagtttccttaatttatgaaggcatcatgtcactgcaaagccgttgcagataaactttgtattttaatttgctttggtgatgattactgtattgacatcatcatgccttccaaattgtgggtggctctgtgggcgcatcaataaaagccgtccttaaaaaaaaaaaaaaaaaaaaaaaaaaaaaaaaaaaaaaaaaaaaaaaaaaaaaggggggggggcgagaaaattcccccgggggggccaaattaggggcccagttgtgtggaccacaaagggggcccccataaggagaggaccgatcataaacagaacgtcgggcacggggggcggcacggttaaaaaaaaaagcctgccgaacggggacaaaaccagcgccatcgccgagggacacattggagagaaaagaaaccccaaacctggcggcgacgagccacatcctgggggcccaaaccatccccgcacagaagttacagagcccacggaacaatagacaacttcagggcacaacggggaacc

SEQ ID NO: 451751 - DNA, 2191 bp, Homo sapiens
  misc_feature (31)..(32): n is a, c, g, or t
ggcaattactccgattcagaacccacgcgtnnggtgcctgccagtcggtgcccctcccgctccagccatgctctccgccctcgcccggcctgccagcgctgctctccgccgcagcttcagcacctcggcccagaacaatgctaaagtagctgtgctaggggcctctggaggcatcgggcagccactttcacttctcctgaagaacagccccttggtgagccgcctgaccctctatgatatcgcgcacacacccggagtggccgcagatctgagccacatcgagaccaaagccgctgtgaaaggctacctcggacctgaacagctgcctgactgcctgaaaggttgtgatgtggtagttattccggctggagtccccagaaagccaggcatgacccgggacgacctgttcaacaccaatgccacgattgtggccaccctgaccgctgcctgtgcccagcactgcccggaagccatgatctgcgtcattgccaatccggttaattccaccatccccatcacagcagaagttttcaagaagcatggagtgtacaaccccaacaaaatcttcggcgtgacgaccctggacatcgtcagagccaacacctttgttgcagagctgaagggtttggatccagctcgagtcaacgtccctgtcattggtggccatgctgggaagaccatcatccccctgatctctcagtgcacccccaaggtggactttccccaggaccagctgacagcactcactgggcggatccaggaggccggcacggaggtggtcaaggctaaagccggagcaggctctgccaccctctccatggcgtatgccggcgcccgctttgtcttctcccttgtggatgcaatgaatggaaaggaaggtgttgtggaatgttccttcgttaagtcacaggaaacggaatgtacctacttctccacaccgctgctgcttgggaaaaagggcatcgagaagaacctgggcatcggcaaagtctcctcttttgaggagaagatgatctcggatgccatccccgagctgaaggcctccatcaagaagggggaagatttcgtgaagaccctgaagtgagccgctgtgacgggtggccagtttccttaatttatgaaggcatcatgtcactgcaaagccgttgcagataaactttgtattttaatttgctttggtgatgattactgtattgacatcatcatgccttccaaattgtgggtggctctgtgggcgcatcaataaaagccgtccttgattttatttttcaaggtcccttctgtaaatgctgtgctttcttccctgtgagagccaactttagagtgtctgctacctcttcattaccaatcagaattagatgatgtttaactgttagactgaagcgtgacgctttcatcagtagcttcaagaaagtctaaattgttaatttatggaattggacacagtattcagtttacccgtacatgctcctcccgcccctcctgttggcacccttgcatcgcccaggcctgattcctcctgggggtagttcacccccacgggttcatagttcagcggcgaatgccaggcagctgttttctggctgagcaaacagcacctttctcattgagcttcctctactgacctctgtcccccttgggatttcatcttctgaccgaaccctgatgttcagtggcagagacagcccatagccagaactgtgggtagaccagggttggggtgtgcggtttgggacagcccaaaccccagccgctgtgtcaaggcctaggacgccatgctgccatcaaaagggggttccaggtttccatcagtggcctaaagaagggacttcttgttgtactgaggagtgcggaattaaagagatttgactccctttagtattgggggcagtccgttccccagacactgtggcctctgaagtggaaactgaaagctgcatacctgggaaagaactttctaggaataggcaatggccttcagtggaagagggagggctggaggtgtgcccagtacttggatgttcatctgtccacaacagctttttgtttttttaaaaaagctaaaatggaaatggattttatcataaaggatgacatcgttttcttctacaattaatacatgttcattgtataaaacccaaaaagcagctaaaaaataaagcgggaaaggaactactggtaaaaaaaaaac

SEQ ID NO: 451752 - DNA, 1270 bp, Homo sapiens
cgaccggaagtccggtcactctcgcgaggccccagagagcaggcgctgggcagtgtggaggtcgttggagtcacttccgcgtcaccagctcctgtgcctgccagtcggtgcccctcccgctccagccatgctctccgccctcgcccggcctgccagcgctgctctccgccgcagcttcagcacctcggcccagaacaatgctaaagtagctgtgctaggggcctctggaggcatcgggcagccactttcacttctcctgaagaacagccccttggtgagccgcctgaccctctatgatatcgcgcacacacccggagtggccgcagatctgagccacatcgagaccaaagccgctgtgaaaggctacctcggacctgaacagctgcctgactgcctgaaaggttgtgatgtggtagttattccggctggagtccccagaaagccaggcatgacccgggacgacctgttcaacaccaatgccacgattgtggccaccctgaccgctgcctgtgcccagcactgcccggaagccatgatctgcgtcattgccaatccggttaattccaccatccccatcacagcagaagttttcaagaagcatggagtgtacaaccccaacaaaatcttcggcgtgacgaccctggacatcgtcagagccaacacctttgttgcagagctgaagggtttggatccagctcgagtcaacgtccctgtcattggtggccatgctgggaagaccatcatccccctgatctctcagtgcacccccaaggtggactttccccaggaccagctgacagcactcactgggcggatccaggaggccggcacggaggtggtcaaggctaaagccggagcaggctctgccaccctctccatggcgtatgccggcgcccgctttgtcttctcccttgtggatgcaatgaatggaaaggaaggtgttgtggaatgttccttcgttaagtcacaggaaacggaatgtacctacttctccacaccgctgctgcttgggaaaaagggcatcgagaagaacctgggcatcggcaaagtctcctcttttgaggagaagatgatctcggatgccatccccgagctgaaggcctccatcaagaagggggaagatttcgtgaagaccctgaagtgagccgctgtgacgggtggccagtttccttaatttatgaaggcatcatgtcactgcaaagccgttgcacatcatcatgccttccaaattgtgggtggctctgtgggcgcatcaataaaagccgtcctt

SEQ ID NO: 451753 - DNA, 2108 bp, Homo sapiens
cgaccggaagtccggtcactctcgcgaggccccagagagcaggcgctgggcagtgtggaggtcgttggagtcacttccgcgtcaccagctcctgtgcctgccagtcggtgcccctcccgctccagccatgctctccgccctcgcccggcctgccagcgctgctctccgccgcagcttcagcacctcggcccagaacaatgctaaagtagctgtgctaggggcctctggaggcatcgggcagccactttcacttctcctgaagaacagccccttggtgagccgcctgaccctctatgatatcgcgcacacacccggagtggccgcagatctgagccacatcgagaccaaagccgctgtgaaaggctacctcggacctgaacagctgcctgactgcctgaaaggttgtgatgtggtagttattccggctggagtccccagaaagccaggcatgacccgggacgacctgttcaacaccaatgccacgattgtggccaccctgaccgctgcctgtgcccagcactgcccggaagccatgatctgcgtcattgccaatccggttaattccaccatccccatcacagcagaagttttcaagaagcatggagtgtacaaccccaacaaaatcttcggcgtgacgaccctggacatcgtcagagccaacacctttgttgcagagctgaagggtttggatccagctcgagtcaacgtccctgtcattggtggccatgctgggaagaccatcatccccctgatctctcagtgcacccccaaggtggactttccccaggaccagctgacagcactcactgggcggatccaggaggccggcacggaggtggtcaaggctaaagccggagcaggctctgccaccctctccatggcgtatgccggcgcccgctttgtcttctcccttgtggatgcaatgaatggaaaggaaggtgttgtggaatgttccttcgttaagtcacaggaaacggaatgtacctacttctccacaccgctgctgcttggggtacgtatccaggcgtgggtccttctgactgtggaataagggggcgttccctttgcttaagcctcaggagctctccctggccctttatgcagtaagctcatgtgcctgcctggcgagtgctgttgttttcaagggtggacgcacacccgagaaaaaagagctgggaggatcacagactgtgaagggtgaacctcccagcaagtgggtctccttccctgcagtttgacagcgggtgcccagcagctgcaggagtattgactgataagacactccatctccaggcagcccagggaggcctccctaccccgcctgaacacctccctgtcgctccttgttcatcttgttctgactgcggggggcggccaggcccaattcctcttcgagagtgtgccccatccagacagcctgagtcttcagcaaacagaaacccttaggtcttactcataccccctcaagccgagtttccatttctcacctgtgggcagaaatgaggcagatgtgtggttgccttcatcacgtggccagaaagtaatatggctcactgggccaccccaggacctttctcagagatgctccgatacagaaagatccttcagctatggccccaggccttggtgagagacaggcactcgatggtatagttctgtccccatgtcggtgcaggtgtatggaatggcagggcctgcaggtgagacgcacccggttctcataggcccttgagccaggggaagcagtaggagggaattgagttgaggtgaggactgaggctgttgccacacaaactgtgctcagtttctgcaggtgagacggtggcagagatgcctgtttttgccaatgtcagacatttacctacttagtgacacctgattcaggtgactgtgacaatgttttcagtcctttaccaacctgcggggagagacaagaacccagaaacaggctctgttggggagaatacggtgaagtgttcctgatgattgagttcctggcgtccaggtgcttgtcgcattgtcctcgtgttcacgaaggtggatggtgcttgttttatagctaaggaaacacatttggaaggtcagtcattgtccagggtacctgccta

SEQ ID NO: 451754 - DNA, 2247 bp, Homo sapiens
  misc_feature (872)..(872): n is a, c, g, or t
  misc_feature (874)..(874): n is a, c, g, or t
  misc_feature (877)..(877): n is a, c, g, or t
  misc_feature (882)..(882): n is a, c, g, or t
  misc_feature (898)..(900): n is a, c, g, or t
  misc_feature (905)..(905): n is a, c, g, or t
  misc_feature (907)..(909): n is a, c, g, or t
  misc_feature (912)..(912): n is a, c, g, or t
  misc_feature (920)..(920): n is a, c, g, or t
  misc_feature (925)..(925): n is a, c, g, or t
  misc_feature (935)..(935): n is a, c, g, or t
  misc_feature (937)..(937): n is a, c, g, or t
  misc_feature (940)..(940): n is a, c, g, or t
  misc_feature (948)..(949): n is a, c, g, or t
  misc_feature (953)..(953): n is a, c, g, or t
  misc_feature (958)..(958): n is a, c, g, or t
  misc_feature (962)..(962): n is a, c, g, or t
  misc_feature (965)..(965): n is a, c, g, or t
  misc_feature (985)..(985): n is a, c, g, or t
  misc_feature (1007)..(1008): n is a, c, g, or t
cgaccggaagtccggtcactctcgcgaggccccagagagcaggcgctgggcagtgtggaggtcgttggagtcacttccgcgtcaccagctcctgtgcctgccagtcggtgcccctcccgctccagccatgctctccgccctcgcccggcctgccagcgctgctctccgccgcagcttcagcacctcggcccagaacaatgctaaagtagctgtgctaggggcctctggaggcatcgggcagccactttcacttctcctgaagaacagccccttggtgagccgcctgaccctctatgatatcgcgcacacacccggagtggccgcagatctgagccacatcgagaccaaagccgctgtgaaaggctacctcggacctgaacagctgcctgactgcctgaaaggttgtgatgtggtagttattccggctggagtccccagaaagccaggcatgacccgggacgacctgttcaacaccaatgccacgattgtggccaccctgaccgctgcctgtgcccagcactgcccggaagccatgatctgcgtcattgccaatccggttaattccaccatccccatcacagcagaagttttcaagaagcatggagtgtacaaccccaacaaaatcttcggcgtgacgaccctggacatcgtcagagccaacacctttgttgcagagctgaagggtttggatccagctcgagtcaacgtccctgtcattggtggccatgctgggaagaccatcatccccctgatctctcagtgcacccccaaggtggactttccccaggaccagctgacagcactcactgggcggatccaggaggccggcacggaggtggtcaaggctaaagccggagcagaaacaaccaacnanaanaaagnaaaaccaacccccccnnncaccncnnnacngaaccaancaaangaaaggaagncnccncggaacgnnccgncgggnaganacnggaaacggaagggaccgacngccccacaccgctgcagcttgnnaaaaagggcatcgagaagaacctgggcatcggcaaagtctcctcttttgaggagaagatgatctcggatgccatccccgagctgaaggcctccatcaagaagggggaagatttcgtgaagaccctgaagtgagccgctgtgacgggtggccagtttccttaatttatgaaggcatcatgtcactgcaaagccgttgcagataaactttgtattttaatttgctttggtgatgattactgtattgacatcatcatgccttccaaattgtgggtggctctgtgggcgcatcaataaaagccgtccttgattttatttttcaaggtcccttctgtaaatgctgtgctttcttccctgtgagagccaactttagagtgtctgctacctcttcattaccaatcagaattagatgatgtttaactgttagactgaagcgtgacgctttcatcagtagcttcaagaaagtctaaattgttaatttatggaattggacacagtattcagtttacccgtacatgctcctcccgcccctcctgttggcacccttgcatcgcccaggcctgattcctcctgggggtagttcacccccacgggttcatagttcagcggcgaatgccaggcagctgttttctggctgagcaaacagcacctttctcattgagcttcctctactgacctctgtcccccttgggatttcatcttctgaccgaaccctgatgttcagtggcagagacagcccatagccagaactgtgggtagaccagggttggggtgtgcggtttgggacagcccaaaccccagccgctgtgtcaaggcctaggacgccatgctgccatcaaaagggggttccaggtttccatcagtggcctaaagaagggacttcttgttgtactgaggagtgcggaattaaagagatttgactccctttagtattgggggcagtccgttccccagacactgtggcctctgaagtggaaactgaaagctgcatacctgggaaagaactttctaggaataggcaatggccttcagtggaagagggagggctggaggtgtgcccagtacttggatgttcatctgtccacaacagctttttgtttttttaaaaaagctaaaatggaaatggattttatcataaaggatgacatcgttttcttctacaattaatacatgttcattgtataaaacccaaaaagcagctaaaaaataaagcgggaaaggaactactggtaaaaaaaaaac

SEQ ID NO: 451755 - DNA, 1256 bp, Homo sapiens
  misc_feature (863)..(863): n is a, c, g, or t
  misc_feature (874)..(874): n is a, c, g, or t
  misc_feature (876)..(876): n is a, c, g, or t
  misc_feature (895)..(895): n is a, c, g, or t
  misc_feature (899)..(900): n is a, c, g, or t
  misc_feature (925)..(925): n is a, c, g, or t
  misc_feature (929)..(929): n is a, c, g, or t
  misc_feature (936)..(936): n is a, c, g, or t
  misc_feature (969)..(969): n is a, c, g, or t
  misc_feature (993)..(993): n is a, c, g, or t
  misc_feature (995)..(995): n is a, c, g, or t
  misc_feature (1191)..(1191): n is a, c, g, or t
cgaccggaagtccggtcactctcgcgaggccccagagagcaggcgctgggcagtgtggaggtcgttggagtcacttccgcgtcaccagctcctgtgcctgccagtcggtgcccctcccgctccagccatgctctccgccctcgcccggcctgccagcgctgctctccgccgcagcttcagcacctcggcccagaacaatgctaaagtagctgtgctaggggcctctggaggcatcgggcagccactttcacttctcctgaagaacagccccttggtgagccgcctgaccctctatgatatcgcgcacacacccggagtggccgcagatctgagccacatcgagaccaaagccgctgtgaaaggctacctcggacctgaacagctgcctgactgcctgaaaggttgtgatgtggtagttattccggctggagtccccagaaagccaggcatgacccgggacgacctgttcaacaccaatgccacgattgtggccaccctgaccgctgcctgtgcccagcactgcccggaagccatgatctgcgtcattgccaatccggttaattccaccatccccatcacagcagaagttttcaagaagcatggagtgtacaaccccaacaaaatcttcggcgtgacgaccctggacatcgtcagagccaacacctttgttgcagagctgaagggtttggatccagctcgagtcaacgtccctgtcattggtggccatgctgggaagaccatcatccccctgatctctcagtgcacccccaaggtggactttccccaggaccagctgacagcactcactgggcggatccaggaggccggcacggaggtggtcaaggctaaagccggagcagcangctctgcaccntntcatggcgatgccgcgccngttnngctctccctgggatgcatgatgaanagangtgttgngatgtcctcgtagtcacagaacgatgtctactntcacacgtgtgctggaaaggctcnangactgcattgaaagtctcttgaggaataatcgatcatccactaagctatagaagggagatcgagactatgagcctacgtgcagtctatataagtatgcttgacctggtaactgttattgttgaagtacgtgaaagctcaagggggctggccatacgctaaaaaaaaacagggcgcatcctctggtatatacgtacntgaaaggctacttaacttcgtagaacgagccctccccgcgggggttgtttatttttattacgcaa

SEQ ID NO: 451756 - DNA, 625 bp, Homo sapiens
cgaccggaagtccggtcactctcgcgaggccccagagagcaggcgctgggcagtgtggaggtcgttggagtcacttccgcgtcaccagctcctgtgcctgccagtcggtgcccctcccgctccagccatgctctccgccctcgcccggcctgccagcgctgctctccgccgcagcttcagcacctcggcccagaacaatgctaaagtagctgtgctaggggcctctggaggcatcgggcagccactttcacttctcctgaagaacagccccttggtgagccgcctgaccctctatgatatcgcgcacacacccggagtggccgcagatctgagccacatcgagaccaaagccgctgtgaaaggctacctcggacctgaacagctgcctgactgcctgaaaggttgtgatgtggtagttattccggctggagtccccagaaagccaggcatgacccgggacgacctgttcaacaccaatgccacgattgtggccaccctgaccgctgcctgtgcccagcactgcccggaagccatgatctgcgtcattgccaatccggtaattcaccatccccataaaagagaggtttaagaggatgggggtcacccacaaaatttggggggaggg

SEQ ID NO: 451757 - DNA, 1418 bp, Homo sapiens
cgcccccgcgcgcccggcgcctccctcacgcccgccctccttgccgcccagccggtccaggcctctggcgaacatggcgcttgtcccctgccaggtgctgcggatggcaatcctgctgtcttactgctctatcctgtgtaactacaaggccatcgaaatgccctcacaccagacctacggagggagctggaaattcctgacgttcattgatctggttatccaggctgtcttttttggcatctgtgtgctgactgatctttccagtcttctgactcgaggaagtgggaaccaggagcaagagaggcagctcaagaagctcatctctctccgggactggatgttagctgtgttggcctttcctgttggggtttttgttgtagcagtgttctggatcatttatgcctatgacagagagatgatatacccgaagctgctggataattttatcccagggtggctgaatcacggaatgcacacgacggttctgccctttatattaatcgagatgaggacatcgcaccatcagtatcccagcaggagcagcggacttaccgccatatgtaccttctctgttggctatatattatgggtgtgctgggtgcatcatgtaactggcatgtgggtgtaccctttcctggaacacattggcccaggagccagaatcatcttctttgggtctacaaccatcttaatgaacttcctgtacctgctgggagaagttctgaacaactatatctgggatacacagaaaagtatggaagaagagaaagaaaagcctaaattggaatgagatccaagtctaaacgcaagagctagattgagccgccattgaagactccttcccctcgggcattggcagtgggggagaaaaggcttcaaaggaacttggtggcatcagcacccccctcccccaatgaggacaccttttatatataaatatgtataaacatagaatacagttgtttccaaaagaactcaccctcactgtgtgttaaagaattcttcccaaagtcattactgataataacattttttccttttctagttttaaaaccagaattggaccttggatttttattttggcaattgtaactccatctaatcaagaaagaataaaagtttattgcacttctttttgagaaatatgttaaagtcaaaggggcatatatagagtaaggcttttgtgtatttaatcctaaaggtggctgtaatcatgaacctaggccaccatggggacctgagagggaaggggacagatgtttctcattgcataatgtcacagttgcctcaaatgagcaccatttgtaataatgatgtcaatttcatgaaaagcctgagtgtattgcatctcttgatttaatcatgtgaaacttttcctagatgcaaatgctgactaataaagacaaagccaccctgaa

SEQ ID NO: 451758 - DNA, 723 bp, Homo sapiens
  misc_feature (32)..(32): n is a, c, g, or t
  misc_feature (66)..(66): n is a, c, g, or t
  misc_feature (71)..(71): n is a, c, g, or t
gtcatgttactattggtcttcaagtaatgagnccacacaaaaaagcttctcctaggtctaggcaanagaanaagcatttgcctaaattggaatgagatccaagtctaaacgcaagagctagattgagccgccattgaagactccttcccctcgggcattggcagtgggggagaaaaggcttcaaaggaacttggtggcatcagcacccccctcccccaatgaggacaccttttatatataaatatgtataaacatagaatacagttgtttccaaaagaactcaccctcactgtgtgttaaagaattcttcccaaagtcattactgataataacattttttccttttctagttttaaaaccagaattggaccttggatttttattttggcaattgtaactccatctaatcaagaaagaataaaagtttattgcacttctttttgagaaatatgttaaagtcaaaggggcatatatagagtaaggcttttgtgtatttaatcctaaaggtggctgtaatcatgaacctaggccaccatggggacctgagagggaaggggacagatgtttctcattgcataatgtcacagttgcctcaaatgagcaccatttgtaataatgatgtcaatttcatgaaaagcctgagtgtattgcatctcttgatttaatcatgtgaaacttttcctagatgcaaatgctgactaataaagacaaagccaccctgaa

SEQ ID NO: 451759 - DNA, 1602 bp, Homo sapiens
gcacatacccttaggcccacaagacttcacagggtatagaatgttgcaagggttttaattttcagatcctcatcttccaactctgcttgaaactaatttccctctgaacatgcgtgatgcctgccagttctcctttcattctccccattcatccaagtgaggagcccgtgacaagactctgagtttgttgtagcagtgttctggatcatttatgcctatgacagagagatgatatacccgaagctgctggataattttatcccagggtggctgaatcacggaatgcacacgacggttctgccctttatattaatcgagatgaggacatcgcaccatcagtatcccagcaggagcagcggacttaccgccatatgtaccttctctgttggctatatattatgggtgtgctgggtgcatcatgtaactggcatgtgggtgtaccctttcctggaacacattggcccaggagccagaatcatcttctttgggtctacaaccatcttaatgaacttcctgtacctgctgggagaagttctgaacaactatatctgggatacacagaaaagctgtgcatttggatcagctgctatttggcaatacgaatcactgaaatccaggggtccagagttattttgatggcataaaagctgattggttggatagcataagaccacaaaaagaaggagacttcagaaaggagattaacaagcggtggaataacctaagtgatggccagcggactcaggtatcatagctgcaaacgtccttgtattctgtttgtggagagtaccttctctgcagtggacagtgatctgatatttcaaatctaatccagcctcaaaagtccgttgttctccaatgttgctgtcaacattcaatcatttctccttatttcacatggcagcaaatatgtatgttttgtggagcttctccttcagtatagtgaacattctgggtcaagagcagttcatggcagtgtacctatctgcaggtgttatttccaattttgtcagttatgtgtgtaaagttgccacacgaagatatggaccatcacttggtgcatctcgcgccatcatgatgatcctcgcagctgtccgcactaagatcccagaagggaggcttgccattatttacttccaatgttcacattcacagcaggaaatgccctacaatccattaacgccacggatatggcaggaatgatcctgggacggaaattttttgattatgcagcacatcttgggggagctctctttggaatatggtatgttacttaccctcatgaactgatttggaagaacagggagcctctagtgaaaatctggcatgaaatgaggactaatgcccccccaaacaagaggtggctctaagtaaaactgggattgcacagtaccggtgcacctgtcttgtcctgccggagagccccaggagacatcggccctagagtgatcatggctacgttcccgcctggaagacgccagcatctggcctcccactgttttcagctgtgtccccgggtccgtgtcttttcagaaagtgaaaatgacatagttgtgacgtaaaggtttacatctagttcgtaaaaaataaaaaaataaaaat

SEQ ID NO: 451760 - DNA, 771 bp, Homo sapiens
gatcattagctggtttactgagctgtctttcatcatagattccaaattctgttggattctttcaactattgttaaccaataaattgtatgttgtggatagtcgatgaacttgaaataaaagatttctttttccttccagtttgttgtagcagtgttctggatcatttatgcctatgacagagagatgatatacccgaagctgctggataattttatcccagggtggctgaatcacggaatgtttaacctaaaaagggccacttcatttccttaggctgcacttctaatgaatgcagacatttgaaagggtcctgaaccggataacctttcgagttttctccagttttattattctgtgaagacagtttggtgtaaatgatttaagagcatttcaaagcttaaagttttcttggcacgcttttcaaacgcccatctgactttgaagcaggctgcctctccacagaaagcttgctccagcaatgactaaaggattgacctggtgccatgcatgctgctctgcacaagaaggacatttggaaatgaccttgaagcgaagttttgccaagttgatgaaatacgggccttcaagaagtgccatttctcaagcgatgtacagaagggtatccgcagcattgtcaaaaattaccccttaatttggtgttggatgaacatgaatttttaacctccataaggaatgatacttgctcttgattttattagttgcattttgtaacaggttggaaaaattaggtaatggagaactttggcata

SEQ ID NO: 451761 - DNA, 592 bp, Homo sapiens
ttagccctgaaacggagctgtacacgaaaacaggcctcttctctctccctcagaaaccaatccctttgcctgaaagaacaccattcggagatcagagagagaggagtttgttgtagcagtgttctggatcatttatgcctatgacagagagatgatatacccgaagctgctggataattttatcccagggtggctgaatcacggaatgcatttcaaagcttaaagttttcttggcacgcttttcaaacgcccatctgactttgaagcaggctgcctctccacagaaagcttgctccagcaatgactaaaggattgacctggtgccatgcatgctgctctgcacaagaaggacatttggaaatgaccttgaagcgaagttttgccaagttgatgaaatacgggccttcaagaagtgccatttctcaagcgatgtacagaagggtatccgcagcattgtcaaaaattaccccttaatttggtgttggatgaacatgaatttttaacctccataaggaatgatacttgctcttgattttattagttgcattttgtaacaggttggaaaaattaggtaatggagaactttggcata

SEQ ID NO: 451762 - DNA, 1570 bp, Homo sapiens
cgcccccgcgcgcccggcgcctccctcacgcccgccctccttgccgcccagccggtccaggcctctggcgaacatggcgcttgtcccctgccaggtgctgcggatggcaatcctgctgtcttactgctctatcctgtgtaactacaaggccatcgaaatgccctcacaccagacctacggagggagctggaaattcctgacgttcattgatctggttatccaggctgtcttttttggcatctgtgtgctgactgatctttccagtcttctgactcgaggaagtgggaaccaggagcaagagaggcagctcaagaagctcatctctctccgggactggatgttagctgtgttggcctttcctgttggggtttttgttgtagcagtgttctggatcatttatgcctatgacagagagatgatatacccgaagctgctggataattttatcccagggtggctgaatcacggaatgcacacgacggttctgccctttatattaatcgagatgaggacatcgcaccatcagtatcccagcaggagcagcggacttaccgccatatgtaccttctctgttggctatatattatgggtgtgctgggtgcatcatgtaactggcatgtgggtgtaccctttcctggaacacattggcccaggagccagaatcatcttctttgggtctacaaccatcttaatgaacttcctgtacctgctgggagaagttctgaacaactatatctgggatacacagaaaagtatggaagaagagaaagaaaagcctaaattggaatgagatccaagtctaaacgcaagagctagattgagccgccattgaagactccttcccctcgggcattggcagtgggggagaaaaggcttcaaaggaacttggtggcatcagcacccccctcccccaatgaggacaccttttatatataaatatgtataaacatagaatacagttgtttccaaaagaactcaccctcactgtgtgttaaagaattcttcccaaagtcattactgataataacattttttccttttctagttttaaaaccagaattggaccttggatttttattttggcaattgtaactccatctaatcaagaaagaataaaagtttattgcacttctttttgagaaatatgttaaagtcaaaggggcatatatagagtaaggcttttgtgtatttaatcctaaaggtggctgtaatcatgaacctaggccaccatggggacctgagagggaaggggacagatgtttctcattgcataatgtcacagttgcctcaaatgagcaccatttgtaataatgatgtcaatttcatgaaaagcctgagtgtattgcatctcttgatttaatcatgtgaaacttttcctagatgcaaatgctgactaataaagacaaagccaccctgaaacaataaaaaaaatcggcctcgtttggcctccaccggggaacctctgcaggcggtttccctttagggaggggtatatcatgaaccttggtacattgtttggtgaacctcggtctttcgggtgggacaacggattcagccactccaagggcgc

SEQ ID NO: 451763 - DNA, 1566 bp, Homo sapiens
cgcccccgcgcgcccggcgcctccctcacgcccgccctccttgccgcccagccggtccaggcctctggcgaacatggcgcttgtcccctgccaggtgctgcggatggcaatcctgctgtcttactgctctatcctgtgtaactacaaggccatcgaaatgccctcacaccagacctacggagggagctggaaattcctgacgttcattgatctggttatccaggctgtcttttttggcatctgtgtgctgactgatctttccagtcttctgactcgaggaagtgggaaccaggagcaagagaggcagctcaagaagctcatctctctccgggactggatgttagctgtgttggcctttcctgttggggtttttgttgtagcagtgttctggatcatttatgcctatgacagagagatgatatacccgaagctgctggataattttatcccagggtggctgaatcacggaatgcacacgacggttctgccctttatattaatcgagatgaggacatcgcaccatcagtatcccagcaggagcagcggacttaccgccatatgtaccttctctgttggctatatattatgggtgtgctgggtgcatcatgtaactggcatgtgggtgtaccctttcctggaacacattggcccaggagccagaatcatcttctttgggtctacaaccatcttaatgaacttcctgtacctgctgggagaagttctgaacaactatatctgggatacacagaaaagtatggaagaagagaaagaaaagcctaaattggaatgagatccaagtctaaacgcaagagctagattgagccgccattgaagactccttcccctcgggcattggcagtgggggagaaaaggcttcaaaggaacttggtggcatcagcacccccctcccccaatgaggacaccttttatatataaatatgtataaacatagaatacagttgtttccaaaagaactcaccctcactgtgtgttaaagaattcttcccaaagtcattactgataataacattttttccttttctagttttaaaaccagaattggaccttggatttttattttggcaattgtaactccatctaatcaagaaagaataaaagtttattgcacttctttttgagaaatatgttaaagtcaaaggggcatatatagagtaaggcttttgtgtatttaatcctaaaggtggctgtaatcatgaacctaggccaccatggggacctgagagggaaggggacagatgtttctcattgcataatgtcacagttgcctcaaatgagcaccatttgtaataatgatgtcaatttcatgaaaagcctgagtgtattgcatctcttgatttaatcatgtgaaacttttcctagatgcaaatgctgactaataaagacaaagccaccctgaaaaaaaaaataaattggcctcgttgggctaagcgggtgaactttgcggccctttcctttaagggagggtaattcctgatactcgcctatggacttcttggcctcgggtgttcggttgggagcagcgttttaacttactcaaggggggat

SEQ ID NO: 451764 - DNA, 1458 bp, Homo sapiens
cgcccccgcgcgcccggcgcctccctcacgcccgccctccttgccgcccagccggtccaggcctctggcgaacatggcgcttgtcccctgccaggtgctgcggatggcaatcctgctgtcttactgctctatcctgtgtaactacaaggccatcgaaatgccctcacaccagacctacggagggagctggaaattcctgacgttcattgatctggttatccaggctgtcttttttggcatctgtgtgctgactgatctttccagtcttctgactcgaggaagtgggaaccaggagcaagagaggcagctcaagaagctcatctctctccgggactggatgttagctgtgttggcctttcctgttggggtttttgttgtagcagtgttctggatcatttatgcctatgacagagagatgatatacccgaagctgctggataattttatcccagggtggctgaatcacggaatgcacacgacggttctgccctttatattaatcgagatgaggacatcgcaccatcagtatcccagcaggagcagcggacttaccgccatatgtaccttctctgttggctatatattatgggtgtgctgggtgcatcatgtaactggcatgtgggtgtaccctttcctggaacacattggcccaggagccagaatcatcttctttgggtctacaaccatcttaatgaacttcctgtacctgctgggagaagttctgaacaactatatctgggatacacagaaaagtatggaagaagagaaagaaaagcctaaattggaatgagatccaagtctaaacgcaagagctagattgagccgccattgaagactccttcccctcgggcattggcagtgggggagaaaaggcttcaaaggaacttggtggcatcagcacccccctcccccaatgaggacaccttttatatataaatatgtataaacatagaatacagttgtttccaaaagaactcaccctcactgtgtgttaaagaattcttcccaaagtcattactgataataacattttttccttttctagttttaaaaccagaattggaccttggatttttattttggcaattgtaactccatctaatcaagaaagaataaaagtttattgcacttctttttgagaaatatgttaaagtcaaaggggcatatatagagtaaggcttttgtgtatttaatcctaaaggtggctgtaatcatgaacctaggccaccatggggacctgagagggaaggggacagatgtttctcattgcataatgtcacagttgcctcaaatgagcaccatttgtaataatgatgtcaatttcatgaaaagcctgagtgtattgcatctcttgatttaatcatgtgaaacttttcctagatgcaaatgctgactaataaagacaaagccaccctgaacctgacgtctgcattgtggcatctcaaaatcctaacagca

SEQ ID NO: 451765 - DNA, 1259 bp, Homo sapiens
gcattgatttctctacggagtagcattcaaatatgtaactgatcatggactccaggttatccaggctgtcttttttggcatctgtgtgctgactgatctttccagtcttctgactcgaggaagtgggaaccaggagcaagagaggcagctcaagaagctcatctctctccgggactggatgttagctgtgttggcctttcctgttggggtttttgttgtagcagtgttctggatcatttatgcctatgacagagagatgatatacccgaagctgctggataattttatcccagggtggctgaatcacggaatgcacacgacggttctgccctttatattaatcgagatgaggacatcgcaccatcagtatcccagcaggagcagcggacttaccgccatatgtaccttctctgttggctatatattatgggtgtgctgggtgcatcatgtaactggcatgtgggtgtaccctttcctggaacacattggcccaggagccagaatcatcttctttgggtctacaaccatcttaatgaacttcctgtacctgctgggagaagttctgaacaactatatctgggatacacagaaaagtatggaagaagagaaagaaaagcctaaattggaatgagatccaagtctaaacgcaagagctagattgagccgccattgaagactccttcccctcgggcattggcagtgggggagaaaaggcttcaaaggaacttggtggcatcagcacccccctcccccaatgaggacaccttttatatataaatatgtataaacatagaatacagttgtttccaaaagaactcaccctcactgtgtgttaaagaattcttcccaaagtcattactgataataacattttttccttttctagttttaaaaccagaattggaccttggatttttattttggcaattgtaactccatctaatcaagaaagaataaaagtttattgcacttctttttgagaaatatgttaaagtcaaaggggcatatatagagtaaggcttttgtgtatttaatcctaaaggtggctgtaatcatgaacctaggccaccatggggacctgagagggaaggggacagatgtttctcattgcataatgtcacagttgcctcaaatgagcaccatttgtaataatgatgtcaatttcatgaaaagcctgagtgtattgcatctcttgatttaatcatgtgaaacttttcctagatgcaaatgctgactaataaagacaaagccaccctgaa

SEQ ID NO: 451766 - DNA, 1487 bp, Homo sapiens
cgcccccgcgcgcccggcgcctccctcacgcccgccctccttgccgcccagccggtccaggcctctggcgaacatggcgcttgtcccctgccaggtgctgcggatggcaatcctgctgtcttactgctctatcctgtgtaactacaaggccatcgaaatgccctcacaccagacctacggagggagctggaaattcctgacgttcattgatctggttatccaggctgtcttttttggcatctgtgtgctgactgatctttccagtcttctgactcgaggaagtgggaaccaggagcaagagaggcagctcaagaagctcatctctctccgggactggatgttagctgtgttggcctttcctgttggggtttttgttgtagcagtgttctggatcatttatgcctatgacagagagatgatatacccgaagctgctggataattttatcccagggtggctgaatcacggaatgcacacgacggttctgccctttatattaatcgagatgaggacatcgcaccatcagtatcccagcaggagcagcggacttaccgccatatgtaccttctctgttggctatatattatgggtgtgctgggtgcatcatgtaactggcatgtgggtgtaccctttcctggaacacattggcccaggagccagaatcatcttctttgggtctacaaccatcttaatgaacttcctgtacctgctgggagaagttctgaacaactatatctgggatacacagaaaaatatgaaaattaagtttatgtacctaggaccatctagttagttccacaaagacagatgttttgtgccaagtatggaagaagagaaagaaaagcctaaattggaatgagatccaagtctaaacgcaagagctagattgagccgccattgaagactccttcccctcgggcattggcagtgggggagaaaaggcttcaaaggaacttggtggcatcagcacccccctcccccaatgaggacaccttttatatataaatatgtataaacatagaatacagttgtttccaaaagaactcaccctcactgtgtgttaaagaattcttcccaaagtcattactgataataacattttttccttttctagttttaaaaccagaattggaccttggatttttattttggcaattgtaactccatctaatcaagaaagaataaaagtttattgcacttctttttgagaaatatgttaaagtcaaaggggcatatatagagtaaggcttttgtgtatttaatcctaaaggtggctgtaatcatgaacctaggccaccatggggacctgagagggaaggggacagatgtttctcattgcataatgtcacagttgcctcaaatgagcaccatttgtaataatgatgtcaatttcatgaaaagcctgagtgtattgcatctcttgatttaatcatgtgaaacttttcctagatgcaaatgctgactaataaagacaaagccaccctgaa

SEQ ID NO: 451767 - DNA, 1302 bp, Homo sapiens
cgcccccgcgcgcccggcgcctccctcacgcccgccctccttgccgcccagccggtccaggcctctggcgaacatggcgcttgtcccctgccaggtgctgcggatggcaatcctgctgtcttactgctctatcctgtgtaactacaaggccatcgaaatgccctcacaccagacctacggagggagctggaaattcctgacgttcattgatctggttatccaggctgtcttttttggcatctgtgtgctgactgatctttccagtcttctgactcgaggaagtgggaaccaggagcaagagaggcagctcaagaagctcatctctctccgggactggatgttagctgtgttggcctttcctgttggggtttttgttgtagcagtgttctggatcatttatgcctatgacagagagatgatatacccgaagctgctggataattttatcccagggtggctgaatcacggaatgggtgtgctgggtgcatcatgtaactggcatgtgggtgtaccctttcctggaacacattggcccaggagccagaatcatcttctttgggtctacaaccatcttaatgaacttcctgtacctgctgggagaagttctgaacaactatatctgggatacacagaaaagtatggaagaagagaaagaaaagcctaaattggaatgagatccaagtctaaacgcaagagctagattgagccgccattgaagactccttcccctcgggcattggcagtgggggagaaaaggcttcaaaggaacttggtggcatcagcacccccctcccccaatgaggacaccttttatatataaatatgtataaacatagaatacagttgtttccaaaagaactcaccctcactgtgtgttaaagaattcttcccaaagtcattactgataataacattttttccttttctagttttaaaaccagaattggaccttggatttttattttggcaattgtaactccatctaatcaagaaagaataaaagtttattgcacttctttttgagaaatatgttaaagtcaaaggggcatatatagagtaaggcttttgtgtatttaatcctaaaggtggctgtaatcatgaacctaggccaccatggggacctgagagggaaggggacagatgtttctcattgcataatgtcacagttgcctcaaatgagcaccatttgtaataatgatgtcaatttcatgaaaagcctgagtgtattgcatctcttgatttaatcatgtgaaacttttcctagatgcaaatgctgactaataaagacaaagccaccctgaa

SEQ ID NO: 451768 - DNA, 1351 bp, Homo sapiens
cgcccccgcgcgcccggcgcctccctcacgcccgccctccttgccgcccagccggtccaggcctctggcgaacatggcgcttgtcccctgccaggtgctgcggatggcaatcctgctgtcttactgctctatcctgtgtaactacaaggccatcgaaatgccctcacaccagacctacggagggagctggaaattcctgacgttcattgatctggttatccaggctgtcttttttggcatctgtgtgctgactgatctttccagtcttctgactcgaggaagtgggaaccaggagcaagagaggcagctcaagaagctcatctctctccgggactggatgttagctgtgttggcctttcctgttggggtttttgttgtagcagtgttctggatcatttatgcctatgacagagagatgatatacccgaagctgctggataattttatcccagggtggctgaatcacggaatgcacacgacggttctgccctttatattaatcgagatgaggacatcgcaccatcagtatcccagcaggagcagcggacttaccgccatatgtaccttctctgttggctatatattatgggtgtgctgggtgcatcatgtaactggcatgtgggtgtaccctttcctggaacacattggcccaggagccagaatcatcttctttgggtctacaaccatcttaatgaacttcctgtacctgctgggagaagttctgaacaactatatctgggatacacagaaaagtatggaagaagagaaagaaaagcctaaattggaatgagatccaagtctaaacgcaagagctagattgagccgccattgaagactcctcccccaatgaggacaccttttatatataaatatgtataaacatagaatacagttgtttccaaaagaactcaccctcactgtgtgttaaagaattcttcccaaagtcattactgataataacattttttccttttctagttttaaaaccagaattggaccttggatttttattttggcaattgtaactccatctaatcaagaaagaataaaagtttattgcacttctttttgagaaatatgttaaagtcaaaggggcatatatagagtaaggcttttgtgtatttaatcctaaaggtggctgtaatcatgaacctaggccaccatggggacctgagagggaaggggacagatgtttctcattgcataatgtcacagttgcctcaaatgagcaccatttgtaataatgatgtcaatttcatgaaaagcctgagtgtattgcatctcttgatttaatcatgtgaaacttttcctagatgcaaatgctgactaataaagacaaagccaccctgaa

SEQ ID NO: 451769 - DNA, 1527 bp, Homo sapiens
cgcccccgcgcgcccggcgcctccctcacgcccgccctccttgccgcccagccggtccaggcctctggcgaacatggcgcttgtcccctgccaggtgctgcggatggcaatcctgctgtcttactgctctatcctgtgtaactacaaggccatcgaaatgccctcacaccagacctacggagggagctggaaattcctgacgttcattgatctggttatccaggctgtcttttttggcatctgtgtgctgactgatctttccagtcttctgactcgaggaagtgggaaccaggagcaagagaggcagctcaagaagctcatctctctccgggactggatgttagctgtgttggcctttcctgttggggtttttgttgtagcagtgttctggatcatttatgcctatgacagagagatgatatacccgaagctgctggataattttatcccagggtggctgaatcacggaatgcacacgacggttctgccctttatattaatcgagatgaggacatcgcaccatcagtatcccagcaggagcagcggacttaccgccatatgtaccttctctgttggctatatattatgggtgtgctgggtgcatcatgtaactggcatgtgggtgtaccctttcctggaacacattggcccaggagccagaatcatcttctttgggtctacaaccatcttaatgaacttcctgtacctgctgggagaagttctgaacaactatatctgggatacacagaaaaatatgaaaattaagtttatgtacctaggaccatctagttagttccacaaagacagatgttttgtgccaagtatggaagaagagaaagaaaagcctaaattggaatgagatccaagtctaaacgcaagagctagattgagccgccattgaagactccttcccctcgggcattggcagtgggggagaaaaggcttcaaaggaacttggtggcatcagcacccccctcccccaatgaggacaccttttatatataaatatgtataaacatagaatacagttgtttccaaaagaactcaccctcactgtgtgttaaagaattcttcccaaagtcattactgataataacattttttccttttctagttttaaaaccagaattggaccttggatttttattttggcaattgtaactccatctaatcaagaaagaataaaagtttattgcacttctttttgagaaatatgttaaagtcaaaggggcatatatagagtaaggcttttgtgtatttaatcctaaaggtggctgtaatcatgaacctaggccaccatggggacctgagagggaaggggacagatgtttctcattgcataatgtcacagttgcctcaaatgagcaccatttgtaataatgatgtcaatttcatgaaaagcctgagtgtattgcatctcttgatttaatcatgtgaaacttttcctagatgcaaatgctgactaataaagacaaagccaccctgaacctgacgtctgcattgtggcatctcaaaatcctaacagca

SEQ ID NO: 451770 - DNA, 728 bp, Homo sapiens
ttaaacaaactgcttgtggtttaatctgatgctcaaataaaacactttgcctgtatttctaggtatggaagaagagaaagaaaagcctaaattggaatgagatccaagtctaaacgcaagagctagattgagccgccattgaagactccttcccctcgggcattggcagtgggggagaaaaggcttcaaaggaacttggtggcatcagcacccccctcccccaatgaggacaccttttatatataaatatgtataaacatagaatacagttgtttccaaaagaactcaccctcactgtgtgttaaagaattcttcccaaagtcattactgataataacattttttccttttctagttttaaaaccagaattggaccttggatttttattttggcaattgtaactccatctaatcaagaaagaataaaagtttattgcacttctttttgagaaatatgttaaagtcaaaggggcatatatagagtaaggcttttgtgtatttaatcctaaaggtggctgtaatcatgaacctaggccaccatggggacctgagagggaaggggacagatgtttctcattgcataatgtcacagttgcctcaaatgagcaccatttgtaataatgatgtcaatttcatgaaaagcctgagtgtattgcatctcttgatttaatcatgtgaaacttttcctagatgcaaatgctgactaataaagacaaagccaccctgaa

SEQ ID NO: 451771 - DNA, 1789 bp, Homo sapiens
cgcccccgcgcgcccggcgcctccctcacgcccgccctccttgccgcccagccggtccaggcctctggcgaacatggcgcttgtcccctgccaggtgctgcggatggcaatcctgctgtcttactgctctatcctgtgtaactacaaggccatcgaaatgccctcacaccagacctacggagggagctggaaattcctgacgttcattgatctggttatccaggctgtcttttttggcatctgtgtgctgactgatctttccagtcttctgactcgaggaagtgggaaccaggagcaagagaggcagctcaagaagctcatctctctccgggactggatgttagctgtgttggcctttcctgttggggtttttgttgtagcagtgttctggatcatttatgcctatgacagagagatgatatacccgaagctgctggataattttatcccagggtggctgaatcacggaatgcacacgacggttctgccctttatattaatcgagatgaggacatcgcaccatcagtatcccagcaggagcagcggacttaccgccatatgtaccttctctgttggctatatattatgggtgtgctgggtgcatcatgtaactggcatgtgggtgtaccctttcctggaacacattggcccaggagccagaatcatcttctttgggtctacaaccatcttaatgaacttcctgtacctgctgggagaagttctgaacaactatatctgggatacacagaaaagctgtgcatttggatcagctgctatttggcaatacgaatcactgaaatccaggggtccagagttattttgatggcataaaagctgattggttggatagcataagaccacaaaaagaaggagacttcagaaaggagattaacaagcggtggaataacctaagtgatggccagcggactcaggtatcatagctgcaaacgtccttgtattctgtttgtggagagtaccttctctgcagtggacagtgatctgatatttcaaatctaatccagcctcaaaagtccgttgttctccaatgttgctgtcaacattcaatcatttctccttatttcacatggcagcaaatatgtatgttttgtggagcttctccttcagtatagtgaacattctgggtcaagagcagttcatggcagtgtacctatctgcaggtgttatttccaattttgtcagttatgtgtgtaaagttgccacacgaagatatggaccatcacttggtgcatctcgcgccatcatgatgatcctcgcagctgtccgcactaagatcccagaagggaggcttgccattatttacttccaatgttcacattcacagcaggaaatgccctacaatccattaacgccacggatatggcaggaatgatcctgggacggaaattttttgattatgcagcacatcttgggggagctctctttggaatatggtatgttacttaccctcatgaactgatttggaagaacagggagcctctagtgaaaatctggcatgaaatgaggactaatgcccccccaaacaagaggtggctctaagtaaaactgggattgcacagtaccggtgcacctgtcttgtcctgccggagagccccaggagacatcggccctagagtgatcatggctacgttcccgcctggaagacgccagcatctggcctcccactgttttcagctgtgtccccgggtccgtgtcttttcagaaagtgaaaatgacatagttgtgacgtaaaggtttacatctagttcgtaaaaaataaaaaaataaaaat

SEQ ID NO: 451772 - DNA, 845 bp, Homo sapiens
cgcccccgcgcgcccggcgcctccctcacgcccgccctccttgccgcccagccggtccaggcctctggcgaacatggcgcttgtcccctgccaggtgctgcggatggcaatcctgctgtcttactgctctatcctgtgtaactacaaggccatcgaaatgccctcacaccagacctacggagggagctggaaattcctgacgttcattgatctggttatccaggctgtcttttttggcatctgtgtgctgactgatctttccagtcttctgactcgaggaagtgggaaccaggagcaagagaggcagctcaagaagctcatctctctccgggactggatgttagctgtgttggcctttcctgttggggtttttgttgtagcagtgttctggatcatttatgcctatgacagagagatgatatacccgaagctgctggataattttatcccagggtggctgaatcacggaatgcacacgacggttctgccctttatattaatcgagatgaggacatcgcaccatcagtatcccagcaggagcagcggacttaccgccatatgtaccttctctgttggctatatattatgggtgtgctgggtgcatcatgtaactggcatgtgggtgtaccctttcctggaacacattggcccaggagccagaatcatcttctttgggtctacaaccatcttaatgaacttcctgtacctgctgggagaagaccctcttgctcccatcagacatggcaaggctattccatattcttttcttttcaggaaagctctgcccttctcatgatatcgccatagctaacataaggcttttctttctgagggacgaagtcgcg

SEQ ID NO: 451773 - DNA, 856 bp, Homo sapiens
cgcccccgcgcgcccggcgcctccctcacgcccgccctccttgccgcccagccggtccaggcctctggcgaacatggcgcttgtcccctgccaggtgctgcggatggcaatcctgctgtcttactgctctatcctgtgtaactacaaggccatcgaaatgccctcacaccagacctacggagggagctggaaattcctgacgttcattgatctggttatccaggctgtcttttttggcatctgtgtgctgactgatctttccagtcttctgactcgaggaagtgggaaccaggagcaagagaggcagctcaagaagctcatctctctccgggactggatgttagctgtgttggcctttcctgttggggtttttgttgtagcagtgttctggatcatttatgcctatgacagagagatgatatacccgaagctgctggataattttatcccagggtggctgaatcacggaatgcatttcaaagcttaaagttttcttggcacgcttttcaaacgcccatctgactttgaagcaggctgcctctccacagaaagcttgctccagcaatgactaaaggattgacctggtgccatgcatgctgctctgcacaagaaggacatttggaaatgaccttgaagcgaagttttgccaagttgatgaaatacgggccttcaagaagtgccatttctcaagcgatgtacagaagggtatccgcagcattgtcaaaaattaccccttaatttggtgttggatgaacatgaatttttaacctccataaggaatgatacttgctcttgattttattagttgcattttgtaacaggttggaaaaattaggtaatggagaactttggcata

SEQ ID NO: 451774 - DNA, 204 bp, Homo sapiens
cttatcaagtacattaattcattggctctggtaatatagctaattaccctgtatattcaggtgctgctgctgatattgctgctatctccatgtgctgggataaacagactgttgttagtaaacattccttctgatacctaccttccgccatcactacgcacgtactaatatgtcttttttgctctgttctttttcccacaacag

SEQ ID NO: 451775 - DNA, 1447 bp, Homo sapiens
  misc_feature (71)..(72): n is a, c, g, or t
actctgggtctgtgccatctttaagagctgtaacacttaccaccaaggtctgccgcttcattcttgaagtnnctgagaccactaatctaccggcaggacaccaattccagacacattattaaggtgctgcggatggcaatcctgctgtcttactgctctatcctgtgtaactacaaggccatcgaaatgccctcacaccagacctacggagggagctggaaattcctgacgttcattgatctggttatccaggctgtcttttttggcatctgtgtgctgactgatctttccagtcttctgactcgaggaagtgggaaccaggagcaagagaggcagctcaagaagctcatctctctccgggactggatgttagctgtgttggcctttcctgttggggtttttgttgtagcagtgttctggatcatttatgcctatgacagagagatgatatacccgaagctgctggataattttatcccagggtggctgaatcacggaatgcacacgacggttctgccctttatattaatcgagatgaggacatcgcaccatcagtatcccagcaggagcagcggacttaccgccatatgtaccttctctgttggctatatattatgggtgtgctgggtgcatcatgtaactggcatgtgggtgtaccctttcctggaacacattggcccaggagccagaatcatcttctttgggtctacaaccatcttaatgaacttcctgtacctgctgggagaagttctgaacaactatatctgggatacacagaaaagtatggaagaagagaaagaaaagcctaaattggaatgagatccaagtctaaacgcaagagctagattgagccgccattgaagactccttcccctcgggcattggcagtgggggagaaaaggcttcaaaggaacttggtggcatcagcacccccctcccccaatgaggacaccttttatatataaatatgtataaacatagaatacagttgtttccaaaagaactcaccctcactgtgtgttaaagaattcttcccaaagtcattactgataataacattttttccttttctagttttaaaaccagaattggaccttggatttttattttggcaattgtaactccatctaatcaagaaagaataaaagtttattgcacttctttttgagaaatatgttaaagtcaaaggggcatatatagagtaaggcttttgtgtatttaatcctaaaggtggctgtaatcatgaacctaggccaccatggggacctgagagggaaggggacagatgtttctcattgcataatgtcacagttgcctcaaatgagcaccatttgtaataatgatgtcaatttcatgaaaagcctgagtgtattgcatctcttgatttaatcatgtgaaacttttcctagatgcaaatgctgactaataaagacaaagccaccctgaa

SEQ ID NO: 451776 - DNA, 610 bp, Homo sapiens
cgcccccgcgcgcccggcgcctccctcacgcccgccctccttgccgcccagccggtccaggcctctggcgaacatggcgcttgtcccctgccaggtgctgcggatggcaatcctgctgtcttactgctctatcctgtgtaactacaaggccatcgaaatgccctcacaccagacctacggagggagctggaaattcctgacgttcattgatctgtgattgcgtgtgaaggcctggctgcccccgcagcggcaccttctgaaccactcaccgttacctggtagctgggtacccttacctggcaactgggggacaaatggaggtggggcgcagccaggtggtgggctctttggagggggacaccgaactgcttctaagaggtgacacgggaagaatcttcaacaaaagcatcggacctgatcctgaatggcctgagacccattcgccctcaaggtgcttttcagagcacccaccgtgggatgaacttgttgcaactgaaggaaactgggtattgtctagtgatttggaacttcacctgaaagaaccaaatccttctcataagggagagaaagcacctaataaagttgtcttctttgcatctgtttttttccc

SEQ ID NO: 451777 - DNA, 1485 bp, Homo sapiens
cgcccccgcgcgcccggcgcctccctcacgcccgccctccttgccgcccagccggtccaggcctctggcgaacatggcgcttgtcccctgccaggtgctgcggatggcaatcctgctgtcttactgctctatcctgtgtaactacaaggccatcgaaatgccctcacaccagacctacggagggagctggaaattcctgacgttcattgatctggttatccaggctgtcttttttggcatctgtgtgctgactgatctttccagtcttctgactcgaggaagtgggaaccaggagcaagagaggcagctcaagaagctcatctctctccgggactggatgttagctgtgttggcctttcctgttggggtttttgttgtagcagtgttctggatcatttatgcctatgacagagagatgatatacccgaagctgctggataattttatcccagggtggctgaatcacggaatgcacacgacggttctgccctttatattaatcgagatgaggacatcgcaccatcagtatcccagcaggagcagcggacttaccgccatatgtaccttctctgttggctatatattatgggtgtgctgggtgcatcatgtaactggcatgtgggtgtaccctttcctggaacacattggcccaggagccagaatcatcttctttgggtctacaaccatcttaatgaacttcctgtacctgctgggagaagttctgaacaactatatctgggatacacagaaaagtatggaagaagagaaagaaaagcctaaattggaatgagatccaagtctaaacgcaagagctagattgagccgccattgaagactccttcccctcgggcattggcagtgggggagaaaaggcttcaaaggaacttggtggcatcagcacccccctcccccaatgaggacaccttttatatataaatatgtataaacatagaatacagttgtttccaaaagaactcaccctcactgtgtgttaaagaattcttcccaaagtcattactgataataacattttttccttttctagttttaaaaccagaattggaccttggatttttattttggcaattgtaactccatctaatcaagaaagaataaaagtttattgcacttctttttgagaaatatgttaaagtcaaaggggcatatatagagtaaggcttttgtgtatttaatcctaaaggtggctgtaatcatgaacctaggccaccatggggacctgagagggaaggggacagatgtttctcattgcataatgtcacagttgcctcaaatgagcaccatttgtaataatgatgtcaatttcatgaaaagcctgagtgtattgcatctcttgatttaatcatgtgaaacttttcctagatgcaaatgctgactaataaagacaaagccaccctgaaaaaacgaaataaatagtaaaaactaataggttggaaatatatacacttcggcctcatcggcctcacc

SEQ ID NO: 451778 - DNA, 1482 bp, Homo sapiens
cgcccactagccacagggcccgcttccccctggagatcagcgcgcacttcccgagccctcgtagcactcagaggtcgcatccacacctgggatgcctagggggcgcctcctggccgggtgtcccgggaccctgcgaacgcaggagcagaatgacgaaggtgctgcggatggcaatcctgctgtcttactgctctatcctgtgtaactacaaggccatcgaaatgccctcacaccagacctacggagggagctggaaattcctgacgttcattgatctggttatccaggctgtcttttttggcatctgtgtgctgactgatctttccagtcttctgactcgaggaagtgggaaccaggagcaagagaggcagctcaagaagctcatctctctccgggactggatgttagctgtgttggcctttcctgttggggtttttgttgtagcagtgttctggatcatttatgcctatgacagagagatgatatacccgaagctgctggataattttatcccagggtggctgaatcacggaatgcacacgacggttctgccctttatattaatcgagatgaggacatcgcaccatcagtatcccagcaggagcagcggacttaccgccatatgtaccttctctgttggctatatattatgggtgtgctgggtgcatcatgtaactggcatgtgggtgtaccctttcctggaacacattggcccaggagccagaatcatcttctttgggtctacaaccatcttaatgaacttcctgtacctgctgggagaagttctgaacaactatatctgggatacacagaaaagtatggaagaagagaaagaaaagcctaaattggaatgagatccaagtctaaacgcaagagctagattgagccgccattgaagactccttcccctcgggcattggcagtgggggagaaaaggcttcaaaggaacttggtggcatcagcacccccctcccccaatgaggacaccttttatatataaatatgtataaacatagaatacagttgtttccaaaagaactcaccctcactgtgtgttaaagaattcttcccaaagtcattactgataataacattttttccttttctagttttaaaaccagaattggaccttggatttttattttggcaattgtaactccatctaatcaagaaagaataaaagtttattgcacttctttttgagaaatatgttaaagtcaaaggggcatatatagagtaaggcttttgtgtatttaatcctaaaggtggctgtaatcatgaacctaggccaccatggggacctgagagggaaggggacagatgtttctcattgcataatgtcacagttgcctcaaatgagcaccatttgtaataatgatgtcaatttcatgaaaagcctgagtgtattgcatctcttgatttaatcatgtgaaacttttcctagatgcaaatgctgactaataaagacaaagccaccctgaa

SEQ ID NO: 451779 - DNA, 1588 bp, Homo sapiens
  misc_feature (71)..(72): n is a, c, g, or t
actctgggtctgtgccatctttaagagctgtaacacttaccaccaaggtctgccgcttcattcttgaagtnnctgagaccactaatctaccggcaggacaccaattccagacacattattaaggtgctgcggatggcaatcctgctgtcttactgctctatcctgtgtaactacaaggccatcgaaatgccctcacaccagacctacggagggagctggaaattcctgacgttcattgatctgatggagtctcactctgtcaccaggctggagtgcagtggcacgatctcggctcactgcaacctctgcctcctgtgttcaagctattctcctgcctcagcctcccgagtagctgggactacaggcgtgtgccaccatgcccgggttatccaggctgtcttttttggcatctgtgtgctgactgatctttccagtcttctgactcgaggaagtgggaaccaggagcaagagaggcagctcaagaagctcatctctctccgggactggatgttagctgtgttggcctttcctgttggggtttttgttgtagcagtgttctggatcatttatgcctatgacagagagatgatatacccgaagctgctggataattttatcccagggtggctgaatcacggaatgcacacgacggttctgccctttatattaatcgagatgaggacatcgcaccatcagtatcccagcaggagcagcggacttaccgccatatgtaccttctctgttggctatatattatgggtgtgctgggtgcatcatgtaactggcatgtgggtgtaccctttcctggaacacattggcccaggagccagaatcatcttctttgggtctacaaccatcttaatgaacttcctgtacctgctgggagaagttctgaacaactatatctgggatacacagaaaagtatggaagaagagaaagaaaagcctaaattggaatgagatccaagtctaaacgcaagagctagattgagccgccattgaagactccttcccctcgggcattggcagtgggggagaaaaggcttcaaaggaacttggtggcatcagcacccccctcccccaatgaggacaccttttatatataaatatgtataaacatagaatacagttgtttccaaaagaactcaccctcactgtgtgttaaagaattcttcccaaagtcattactgataataacattttttccttttctagttttaaaaccagaattggaccttggatttttattttggcaattgtaactccatctaatcaagaaagaataaaagtttattgcacttctttttgagaaatatgttaaagtcaaaggggcatatatagagtaaggcttttgtgtatttaatcctaaaggtggctgtaatcatgaacctaggccaccatggggacctgagagggaaggggacagatgtttctcattgcataatgtcacagttgcctcaaatgagcaccatttgtaataatgatgtcaatttcatgaaaagcctgagtgtattgcatctcttgatttaatcatgtgaaacttttcctagatgcaaatgctgactaataaagacaaagccaccctgaa

SEQ ID NO: 451780 - DNA, 1262 bp, Homo sapiens
cgcccccgcgcgcccggcgcctccctcacgcccgccctccttgccgcccagccggtccaggcctctggcgaacatggcgcttgtcccctgccaggtgctgcggatggcaatcctgctgtcttactgctctatcctgtgtaactacaaggccatcgaaatgccctcacaccagacctacggagggagctggaaattcctgacgttcattgatctgtttgttgtagcagtgttctggatcatttatgcctatgacagagagatgatatacccgaagctgctggataattttatcccagggtggctgaatcacggaatgcacacgacggttctgccctttatattaatcgagatgaggacatcgcaccatcagtatcccagcaggagcagcggacttaccgccatatgtaccttctctgttggctatatattatgggtgtgctgggtgcatcatgtaactggcatgtgggtgtaccctttcctggaacacattggcccaggagccagaatcatcttctttgggtctacaaccatcttaatgaacttcctgtacctgctgggagaagttctgaacaactatatctgggatacacagaaaagtatggaagaagagaaagaaaagcctaaattggaatgagatccaagtctaaacgcaagagctagattgagccgccattgaagactccttcccctcgggcattggcagtgggggagaaaaggcttcaaaggaacttggtggcatcagcacccccctcccccaatgaggacaccttttatatataaatatgtataaacatagaatacagttgtttccaaaagaactcaccctcactgtgtgttaaagaattcttcccaaagtcattactgataataacattttttccttttctagttttaaaaccagaattggaccttggatttttattttggcaattgtaactccatctaatcaagaaagaataaaagtttattgcacttctttttgagaaatatgttaaagtcaaaggggcatatatagagtaaggcttttgtgtatttaatcctaaaggtggctgtaatcatgaacctaggccaccatggggacctgagagggaaggggacagatgtttctcattgcataatgtcacagttgcctcaaatgagcaccatttgtaataatgatgtcaatttcatgaaaagcctgagtgtattgcatctcttgatttaatcatgtgaaacttttcctagatgcaaatgctgactaataaagacaaagccaccctgaa

SEQ ID NO: 451781 - DNA, 935 bp, Homo sapiens
  misc_feature (30)..(30): n is a, c, g, or t
  misc_feature (36)..(36): n is a, c, g, or t
gtgtaggttgatctcagaggaccccgcagnctgctnccatcagtatcccagcaggagcagcggacttaccgccatatgtaccttctctgttggctatatattatgggtgtgctgggtgcatcatgtaactggcatgtgggtgtaccctttcctggaacacattggcccaggagccagaatcatcttctttgggtctacaaccatcttaatgaacttcctgtacctgctgggagaagttctgaacaactatatctgggatacacagaaaagtatggaagaagagaaagaaaagcctaaattggaatgagatccaagtctaaacgcaagagctagattgagccgccattgaagactccttcccctcgggcattggcagtgggggagaaaaggcttcaaaggaacttggtggcatcagcacccccctcccccaatgaggacaccttttatatataaatatgtataaacatagaatacagttgtttccaaaagaactcaccctcactgtgtgttaaagaattcttcccaaagtcattactgataataacattttttccttttctagttttaaaaccagaattggaccttggatttttattttggcaattgtaactccatctaatcaagaaagaataaaagtttattgcacttctttttgagaaatatgttaaagtcaaaggggcatatatagagtaaggcttttgtgtatttaatcctaaaggtggctgtaatcatgaacctaggccaccatggggacctgagagggaaggggacagatgtttctcattgcataatgtcacagttgcctcaaatgagcaccatttgtaataatgatgtcaatttcatgaaaagcctgagtgtattgcatctcttgatttaatcatgtgaaacttttcctagatgcaaatgctgactaataaagacaaagccaccctgaa

SEQ ID NO: 451782 - DNA, 1541 bp, Homo sapiens
cgcccccgcgcgcccggcgcctccctcacgcccgccctccttgccgcccagccggtccaggcctctggcgaacatggcgcttgtcccctgccaggtgctgcggatggcaatcctgctgtcttactgctctatcctgtgtaactacaaggccatcgaaatgccctcacaccagacctacggagggagctggaaattcctgacgttcattgatctggttatccaggctgtcttttttggcatctgtgtgctgactgatctttccagtcttctgactcgaggaagtgggaaccaggagcaagagaggcagctcaagaagctcatctctctccgggactggatgttagctgtgttggcctttcctgttggggtttttgttgtagcagtgttctggatcatttatgcctatgacagagagatgatatacccgaagctgctggataattttatcccagggtggctgaatcacggaatgcacacgacggttctgccctttatattaatcgagatgaggacatcgcaccatcagtatcccagcaggagcagcggacttaccgccatatgtaccttctctgttggctatatattatgggtgtgctgggtgcatcatgtaactggcatgtgggtgtaccctttcctggaacacattggcccaggagccagaatcatcttctttgggtctacaaccatcttaatgaacttcctgtacctgctgggagaagttctgaacaactatatctgggatacacagaaaaagcctccatcttggcaagatatgaaaattaagtttatgtacctaggaccatctagttagttccacaaagacagatgttttgtgccaagtaagtatcatcctcatttacaagaggggtcacaaactgctggcctcccccaacttctacctatcaagttctgttaggcctacatcgtggaatttttgtttttgaatcagtattttaaaattgggtgattttggctgggcgcagtggctcatgcctgtaatcccggcactttgggagactgaggcaggtggatcacgaggtcaagagatggagaccatcctggccaacatggtgaaatcccatctctactaaaaatacaaaaattagccaggcatggtggcgtgtgcctgtagtcccaggtactcgggaggctgaggcaggagaactgcttgaacccaggaggcagaggttgcagtgagctgagatcatgccactgcaccccagcctggcaacagaacaagactccatctcaaaaaaaaaaaaaaaaaaaataggagatttcacatgaaggccagattttcagcttcttaggaaatattttaagatctggaacacagagcccactgttctattctggtgacaatggtttagaatagagtatcagttatcccttggctgggcacggtggcttacacctgtaatctcagaactttgggaggctaaggtgggcagatcacttgagcccaggagttcaagaccagtctggccaacattgcaaaactccatctctactaaacatacaaaaatgagccgggcgtacat

SEQ ID NO: 451783 - DNA, 907 bp, Homo sapiens
cgcccccgcgcgcccggcgcctccctcacgcccgccctccttgccgcccagccggtccaggcctctggcgaacatggcgcttgtcccctgccaggtgctgcggatggcaatcctgctgtcttactgctctatcctgtgtaactacaaggccatcgaaatgccctcacaccagacctacggagggagctggaaattcctgacgttcattgatctggttatccaggctgtcttttttggcatctgtgtgctgactgatctttccagtcttctgactcgaggaagtgggaaccaggagcaagagaggcagctcaagaagctcatctctctccgggactggatgttagctgtgttggcctttcctgttggggtttttgttgtagcagtgttctggatcatttatgcctatgacagagagatgatatacccgaagctgctggataattttatcccagggtggctgaatcacggaatgcacacgacggttctgccctttatattaatcgagatgaggacatcgcaccatcagtatcccagcaggagcagcggacttaccgccatatgtaccttctctgttggctatatattatgggtgtgctgggtgcatcatgtaactggcatgtgggtgtaccctttcctggaacacattggcccaggagccagaatcatcttctttgggtctacaaccatcttaatgaacttcctgtacctgctgggagaagttctgaacaactatatctgggatacacagaaaagtaagtattgtctgagggaacataaaacaagagaattactgccggcaacggtctatgcagagactgagggaaaattccactgtagcctcttcttttagccttcacacaggatctcctataaagagctccatttttaaaactacaatatgatttta

SEQ ID NO: 451784 - DNA, 3370 bp, Homo sapiens
  misc_feature (328)..(328): n is a, c, g, or t
  misc_feature (396)..(396): n is a, c, g, or t
  misc_feature (467)..(467): n is a, c, g, or t
ccagttcggtaggagagaaagcccccgcagcgcccacagtccgtcccccgccccgcgcgcagcctgagcgccacacaaaggacgcggccgactctagcgaccctgcggcgctcccgggcgcgagccgccggggtcgggcgggcgagcactagcaccgccccgcagagcggcaggctgacagccaggcgcgggcacgagcagtgctctcttcggctccgctggcgcgtgcccttctcgggctccaaaaatcagcagtgctccgggcgccccctgctagtcgcggccgtaaaaggcagacaaaagccctagcctctccaatcggagggcntcgcttcaggtctcccgcctctcctcttacacgctcactttcttctccaataagcgggctcgaaaagnggggcggtgaccggcgaggaatattgggaattgtagttttttggacccacgggacggcagagctggagctncgtgccgcctgtactcccgccttcatttcccatcgtgctgaggcgggtggcatggcggagaaggatgacaccggagtttgacgaagaggtggtttttgagaattctccactttaccaatacttacaggatctgggacacacagactttgaaatatgttcttctttgtcaccaaaaacagaaaaatgcacaacagagggacaacaaaagcctcctacaagagtcctaccaaaacaaggtatcctgttaaaagtggctgaaaccatcaaaagttggatttttttttctcagtgcaataagaaagatgacttacttcacaagttggatattggattccgactcgactcattacataccatcctgcaacaggaagtcctgttacaagaggatgtggagctgattgagctacttgatcccagtatcctgtctgcagggcaatctcaacaacaggaaaatggacaccttccaacactttgctccctggcaacccctaatatttgggatctctcaatgctatttgccttcattagcttgctcgttatgcttcccacttggtggattgtgtcttcctggctggtatggggagtgattctatttgtgtatctggtcataagagctttgagattatggaggacagccaaactacaagtgaccctaaaaaaatacagcgttcatttggaagatatggccacaaacagccgagcttttactaacctcgtgagaaaagctttacgtctcattcaagaaaccgaagtgatttccagaggatttacactggtcagtgctgcttgcccatttaataaagctggacagcatccaagtcagcatctcatcggtcttcggaaagctgtctaccgaactctaagagccaacttccaagcagcaaggctagctaccctatatatgctgaaaaactaccccctgaactctgagagtgacaatgtaaccaactacatctgtgtggtgccttttaaagagctgggccttggacttagtgaagagcagatttcagaagaggaagcacataactttacagatggcttcagcctgcctgcattgaaggttttgttccaactctgggtggcacagagttcagagttcttcagacggttagccctattactttctacagccaattcacctcctgggcccttacttactccagcacttctgcctcatcgtatcttatctgatgtgactcaaggtctacctcatgctcattctgcctgtttggaagagcttaagcgcagctatgagttctatcggtactttgaaactcagcaccagtcagtaccgcagtgtttatccaaaactcaacagaagtcaagagaactgaataatgttcacacagcagtgcgtagcttgcagctccatctgaaagcattactgaatgaggtaataattcttgaagatgaacttgaaaagcttgtttgtactaaagaaacacaagaactagtgtcagaggcttatcccatcctagaacagaaattaaagttgattcagccccacgttcaagcaagcaacaattgctgggaagaggccatttctcaggtcgacaaactgctacgaagaaatacagataaaaaaggcaagcctgaaatagcatgtgaaaacccacattgtacagtagtacctttgaagcagcctactctacacattgcagacaaagatccaatcccagaggagcaggaattagaagcttatgtagatgatatagatattgatagtgatttcagaaaggatgatttttattacttgtctcaagaagacaaagagagacagaagcgtgagcatgaagaatccaagagggtgctccaagaattaaaatctgtgctgggatttaaagcttcagaggcagaaaggcagaagtggaagcaacttctatttagtgatcatgccgtgttgaaatccttgtctcctgtagacccagtggaacccataagtaattcagaaccatcaatgaattcagatatgggaaaagtcagtaaaaatgatactgaagaggaaagtaataaatccgccacaacagacaatgaaataagtaggactgagtatttatgtgaaaactctctagaaggtaaaaataaagataattcttcaaatgaagtcttcccccaaggagcagaagaaagaatgtgttaccaatgtgagagtgaagatgaaccacaagcagatggaagtggtctgaccactgcccctccaactcccagggactcattacagccctccattaagcagaggctggcacggctacagctgtcaccagattttaccttcactgctggccttgctgcagaagtggctgctagatctctctcctttaccaccatgcaggaacagacttttggtgatgaggaggaagaacaaataatagaagaaaataaaaatgagatagaagaaaagtaagaaccaagattcatatgaagtgatattagattgttccttttacaaaagtgtttagcttcaagactggaaagggaatatgagtgtaagtttactatatataaagctaagatgtggatttacaggaagaaccctggtttgaataactgatctgaaattagtagttacctgtaaatggcagatcttttaggaaaataagagaaaggtaagggctcttttgaataaactgctgttttatttgtggcacaactgatcaatcttggaaattctttaagtatttttaataagaaatgaattatcatttcttgccagaatttgctaccttaaggtgattgggaaaattctgttgcaagaacattaacatttagtatgactcctttttactgtattcttgcagttaataactgcagctattatgttaataacaagttgtttgtattttatttttgtttataccagtcttaaagatccaggttctgaataaaaaaattaattgatacaa

SEQ ID NO: 451785 - DNA, 2819 bp, Homo sapiens
  misc_feature (328)..(328): n is a, c, g, or t
  misc_feature (396)..(396): n is a, c, g, or t
  misc_feature (467)..(467): n is a, c, g, or t
ccagttcggtaggagagaaagcccccgcagcgcccacagtccgtcccccgccccgcgcgcagcctgagcgccacacaaaggacgcggccgactctagcgaccctgcggcgctcccgggcgcgagccgccggggtcgggcgggcgagcactagcaccgccccgcagagcggcaggctgacagccaggcgcgggcacgagcagtgctctcttcggctccgctggcgcgtgcccttctcgggctccaaaaatcagcagtgctccgggcgccccctgctagtcgcggccgtaaaaggcagacaaaagccctagcctctccaatcggagggcntcgcttcaggtctcccgcctctcctcttacacgctcactttcttctccaataagcgggctcgaaaagnggggcggtgaccggcgaggaatattgggaattgtagttttttggacccacgggacggcagagctggagctncgtgccgcctgtactcccgccttcatttcccatcgtgctgaggcgggtggcatggcggagaaggatgacaccggagtttgacgaagaggtggtttttgagaattctccactttaccaatacttacaggatctgggacacacagactttgaaatatgttcttctttgtcaccaaaaacagaaaaatgcacaacagagggacaacaaaagcctcctacaagagtcctaccaaaaggatctctcaatgctatttgccttcattagcttgctcgttatgcttcccacttggtggattgtgtcttcctggctggtatggggagtgattctatttgtgtatctggtcataagagctttgagattatggaggacagccaaactacaagtgaccctaaaaaaatacagcgttcatttggaagatatggccacaaacagccgagcttttactaacctcgtgagaaaagctttacgtctcattcaagaaaccgaagtgatttccagaggatttacactggtcagtgctgcttgcccatttaataaagctggacagcatccaagtcagcatctcatcggtcttcggaaagctgtctaccgaactctaagagccaacttccaagcagcaaggctagctaccctatatatgctgaaaaactaccccctgaactctgagagtgacaatgtaaccaactacatctgtgtggtgccttttaaagagctgggccttggacttagtgaagagcagatttcagaagaggaagcacataactttacagatggcttcagcctgcctgcattgaaggttttgttccaactctgggtggcacagagttcagagttcttcagacgggtaataattcttgaagatgaacttgaaaagcttgtttgtactaaagaaacacaagaactagtgtcagaggcttatcccatcctagaacagaaattaaagttgattcagccccacgttcaagcaagcaacaattgctgggaagaggccatttctcaggtcgacaaactgctacgaagaaatacagataaaaaaggcaagcctgaaatagcatgtgaaaacccacattgtacagtagtacctttgaagcagcctactctacacattgcagacaaagatccaatcccagaggagcaggaattagaagcttatgtagatgatatagatattgatagtgatttcagaaaggatgatttttattacttgtctcaagaagacaaagagagacagaagcgtgagcatgaagaatccaagagggtgctccaagaattaaaatctgtgctgggatttaaagcttcagaggcagaaaggcagaagtggaagcaacttctatttagtgatcatgccgtgttgaaatccttgtctcctgtagacccagtggaacccataagtaattcagaaccatcaatgaattcagatatgggaaaagtcagtaaaaatgatactgaagaggaaagtaataaatccgccacaacagacaatgaaataagtaggactgagtatttatgtgaaaactctctagaaggtaaaaataaagataattcttcaaatgaagtcttcccccaaggagcagaagaaagaatgtgttaccaatgtgagagtgaagatgaaccacaagcagatggaagtggtctgaccactgcccctccaactcccagggactcattacagccctccattaagcagaggctggcacggctacagctgtcaccagattttaccttcactgctggccttgctgcagaagtggctgctagatctctctcctttaccaccatgcaggaacagacttttggtgatgaggaggaagaacaaataatagaagaaaataaaaatgagatagaagaaaagtaagaaccaagattcatatgaagtgatattagattgttccttttacaaaagtgtttagcttcaagactggaaagggaatatgagtgtaagtttactatatataaagctaagatgtggatttacaggaagaaccctggtttgaataactgatctgaaattagtagttacctgtaaatggcagatcttttaggaaaataagagaaaggtaagggctcttttgaataaactgctgttttatttgtggcacaactgatcaatcttggaaattctttaagtatttttaataagaaatgaattatcatttcttgccagaatttgctaccttaaggtgattgggaaaattctgttgcaagaacattaacatttagtatgactcctttttactgtattcttgcagttaataactgcagctattatgttaataacaagttgtttgtattttatttttgtttataccagtcttaaagatccaggttctgaataaaaaaattaattgatacaa

SEQ ID NO: 451786 - DNA, 3408 bp, Homo sapiens
  misc_feature (328)..(328): n is a, c, g, or t
  misc_feature (396)..(396): n is a, c, g, or t
  misc_feature (467)..(467): n is a, c, g, or t
ccagttcggtaggagagaaagcccccgcagcgcccacagtccgtcccccgccccgcgcgcagcctgagcgccacacaaaggacgcggccgactctagcgaccctgcggcgctcccgggcgcgagccgccggggtcgggcgggcgagcactagcaccgccccgcagagcggcaggctgacagccaggcgcgggcacgagcagtgctctcttcggctccgctggcgcgtgcccttctcgggctccaaaaatcagcagtgctccgggcgccccctgctagtcgcggccgtaaaaggcagacaaaagccctagcctctccaatcggagggcntcgcttcaggtctcccgcctctcctcttacacgctcactttcttctccaataagcgggctcgaaaagnggggcggtgaccggcgaggaatattgggaattgtagttttttggacccacgggacggcagagctggagctncgtgccgcctgtactcccgccttcatttcccatcgtgctgaggcgggtggcatggcggagaaggatgacaccggagtttgacgaagaggtggtttttgagaattctccactttaccaatacttacaggatctgggacacacagactttgaaatatgttcttctttgtcaccaaaaacagaaaaatgcacaacagagggacaacaaaagcctcctacaagagtcctaccaaaatacctgggatatagtaatcactcaatgaatataaactgcacttactggcatgctcaaggaatgggctattaagcaaggtatcctgttaaaagtggctgaaaccatcaaaagttggatttttttttctcagtgcaataagaaagatgacttacttcacaagttggatattggattccgactcgactcattacataccatcctgcaacaggaagtcctgttacaagaggatgtggagctgattgagctacttgatcccagtatcctgtctgcagggcaatctcaacaacaggaaaatggacaccttccaacactttgctccctggcaacccctaatatttgggatctctcaatgctatttgccttcattagcttgctcgttatgcttcccacttggtggattgtgtcttcctggctggtatggggagtgattctatttgtgtatctggtcataagagctttgagattatggaggacagccaaactacaagtgaccctaaaaaaatacagcgttcatttggaagatatggccacaaacagccgagcttttactaacctcgtgagaaaagctttacgtctcattcaagaaaccgaagtgatttccagaggatttacactggtcagtgctgcttgcccatttaataaagctggacagcatccaagtcagcatctcatcggtcttcggaaagctgtctaccgaactctaagagccaacttccaagcagcaaggctagctaccctatatatgctgaaaaactaccccctgaactctgagagtgacaatgtaaccaactacatctgtgtggtgccttttaaagagctgggccttggacttagtgaagagcagatttcagaagaggaagcacataactttacagatggcttcagcctgcctgcattgaaggttttgttccaactctgggtggcacagagttcagagttcttcagacggttagccctattactttctacagccaattcacctcctgggcccttacttactccagcacttctgcctcatcgtatcttatctgatgtgactcaaggtctacctcatgctcattctgcctgtttggaagagcttaagcgcagctatgagttctatcggtactttgaaactcagcaccagtcagtaccgcagtgtttatccaaaactcaacagaagtcaagagaactgaataatgttcacacagcagtgcgtagcttgcagctccatctgaaagcattactgaatgaggtaataattcttgaagatgaacttgaaaagcttgtttgtactaaagaaacacaagaactagtgtcagaggcttatcccatcctagaacagaaattaaagttgattcagccccacgttcaagcaagcaacaattgctgggaagaggccatttctcaggtcgacaaactgctacgaagaaatacagataaaaaaggcaagcctgaaatagcatgtgaaaacccacattgtacagtagtacctttgaagcagcctactctacacattgcagacaaagatccaatcccagaggagcaggaattagaagcttatgtagatgatatagatattgatagtgatttcagaaaggatgatttttattacttgtctcaagaagacaaagagagacagaagcgtgagcatgaagaatccaagagggtgctccaagaattaaaatctgtgctgggatttaaagcttcagaggcagaaaggcagaagtggaagcaacttctatttagtgatcatggtaagcactgactttaaagtaacaggttatttcaatgtaggggattctttctttcttgaaccatgaatgttattttagctgaagaattcttggggttttataagggtccaccagtatgcatagtactttttcttctagatgctaaatcaatttgattaataaaagagtaggaatgtaaccacattggaaatatgaagtcatacttttttatgagttatttaattttttagtaaatttgttttagaatgggcagtgagttgaataatttgggatattttaaatgttattttcaaatttagtgaatttgagattctcaactctgttgtccatatgttaaaatatttaaaaatacctcagtgaagcacaaaattaataactgtgctcacattgaaaaaaatggcccaggcgcggcggcacatgcttgtaatatcagcacgttgggaagctgaggcgggtggatcatttgaggtcaggagttcaagaccagcctggccaacatggcgaaaccccatctctactaaaaatacaaaaattaacaaggcatggtggcgcgtgcctgtagtcccagctactcgagaggctgaggcaggagaatcacttgaacccgggaggcggaggtttcagtgagccaagatcacgccactgcactccagcctgggcaacagagggagactccatctcaaaaagaaaaaaagaaagaaaagaaaagaaaagaaaaaaaaggaattaaaacctagaccagtgagccacatcattagcattatttaagtggtttgagcactttagtagatgggaggggagcagggtgcctgtgggcgtactccccatactctgatttcagcagagtggggtagctggtaatacaaaagccttacattcctttctgtttctcacccttcttttcttaagtcaaacttcatgggagacagggaaggaatcaggggaagcttaatacttgacagtatcaacctag

SEQ ID NO: 451787 - DNA, 3443 bp, Homo sapiens
  misc_feature (328)..(328): n is a, c, g, or t
  misc_feature (396)..(396): n is a, c, g, or t
  misc_feature (467)..(467): n is a, c, g, or t
ccagttcggtaggagagaaagcccccgcagcgcccacagtccgtcccccgccccgcgcgcagcctgagcgccacacaaaggacgcggccgactctagcgaccctgcggcgctcccgggcgcgagccgccggggtcgggcgggcgagcactagcaccgccccgcagagcggcaggctgacagccaggcgcgggcacgagcagtgctctcttcggctccgctggcgcgtgcccttctcgggctccaaaaatcagcagtgctccgggcgccccctgctagtcgcggccgtaaaaggcagacaaaagccctagcctctccaatcggagggcntcgcttcaggtctcccgcctctcctcttacacgctcactttcttctccaataagcgggctcgaaaagnggggcggtgaccggcgaggaatattgggaattgtagttttttggacccacgggacggcagagctggagctncgtgccgcctgtactcccgccttcatttcccatcgtgctgaggcgggtggcatggcggagaaggatgacaccggagtttgacgaagaggtggtttttgagaattctccactttaccaatacttacaggatctgggacacacagactttgaaatatgttcttctttgtcaccaaaaacagaaaaatgcacaacagagggacaacaaaagcctcctacaagagtcctaccaaaatacctgggatatagtaatcactcaatgaatataaactgcacttactggcatgctcaaggaatgggctattaagcaaggtatcctgttaaaagtggctgaaaccatcaaaagttggatttttttttctcagtgcaataagaaagatgacttacttcacaagttggatattggattccgactcgactcattacataccatcctgcaacaggaagtcctgttacaagaggatgtggagctgattgagctacttgatcccagtatcctgtctgcagggcaatctcaacaacaggaaaatggacaccttccaacactttgctccctggcaacccctaatatttgggatctctcaatgctatttgccttcattagcttgctcgttatgcttcccacttggtggattgtgtcttcctggctggtatggggagtgattctatttgtgtatctggtcataagagctttgagattatggaggacagccaaactacaagtgaccctaaaaaaatacagcgttcatttggaagatatggccacaaacagccgagcttttactaacctcgtgagaaaagctttacgtctcattcaagaaaccgaagtgatttccagaggatttacactggtcagtgctgcttgcccatttaataaagctggacagcatccaagtcagcatctcatcggtcttcggaaagctgtctaccgaactctaagagccaacttccaagcagcaaggctagctaccctatatatgctgaaaaactaccccctgaactctgagagtgacaatgtaaccaactacatctgtgtggtgccttttaaagagctgggccttggacttagtgaagagcagatttcagaagaggaagcacataactttacagatggcttcagcctgcctgcattgaaggttttgttccaactctgggtggcacagagttcagagttcttcagacggttagccctattactttctacagccaattcacctcctgggcccttacttactccagcacttctgcctcatcgtatcttatctgatgtgactcaaggtctacctcatgctcattctgcctgtttggaagagcttaagcgcagctatgagttctatcggtactttgaaactcagcaccagtcagtaccgcagtgtttatccaaaactcaacagaagtcaagagaactgaataatgttcacacagcagtgcgtagcttgcagctccatctgaaagcattactgaatgaggtaataattcttgaagatgaacttgaaaagcttgtttgtactaaagaaacacaagaactagtgtcagaggcttatcccatcctagaacagaaattaaagttgattcagccccacgttcaagcaagcaacaattgctgggaagaggccatttctcaggtcgacaaactgctacgaagaaatacagataaaaaaggcaagcctgaaatagcatgtgaaaacccacattgtacagtagtacctttgaagcagcctactctacacattgcagacaaagatccaatcccagaggagcaggaattagaagcttatgtagatgatatagatattgatagtgatttcagaaaggatgatttttattacttgtctcaagaagacaaagagagacagaagcgtgagcatgaagaatccaagagggtgctccaagaattaaaatctgtgctgggatttaaagcttcagaggcagaaaggcagaagtggaagcaacttctatttagtgatcatgccgtgttgaaatccttgtctcctgtagacccagtggaacccataagtaattcagaaccatcaatgaattcagatatgggaaaagtcagtaaaaatgatactgaagaggaaagtaataaatccgccacaacagacaatgaaataagtaggactgagtatttatgtgaaaactctctagaaggtaaaaataaagataattcttcaaatgaagtcttcccccaaggagcagaagaaagaatgtgttaccaatgtgagagtgaagatgaaccacaagcagatggaagtggtctgaccactgcccctccaactcccagggactcattacagccctccattaagcagaggctggcacggctacagctgtcaccagattttaccttcactgctggccttgctgcagaagtggctgctagatctctctcctttaccaccatgcaggaacagacttttggtgatgaggaggaagaacaaataatagaagaaaataaaaatgagatagaagaaaagtaagaaccaagattcatatgaagtgatattagattgttccttttacaaaagtgtttagcttcaagactggaaagggaatatgagtgtaagtttactatatataaagctaagatgtggatttacaggaagaaccctggtttgaataactgatctgaaattagtagttacctgtaaatggcagatcttttaggaaaataagagaaaggtaagggctcttttgaataaactgctgttttatttgtggcacaactgatcaatcttggaaattctttaagtatttttaataagaaatgaattatcatttcttgccagaatttgctaccttaaggtgattgggaaaattctgttgcaagaacattaacatttagtatgactcctttttactgtattcttgcagttaataactgcagctattatgttaataacaagttgtttgtattttatttttgtttataccagtcttaaagatccaggttctgaataaaaaaattaattgatacaa

SEQ ID NO: 451788 - DNA, 4002 bp, Homo sapiens
  misc_feature (328)..(328): n is a, c, g, or t
  misc_feature (396)..(396): n is a, c, g, or t
  misc_feature (467)..(467): n is a, c, g, or t
ccagttcggtaggagagaaagcccccgcagcgcccacagtccgtcccccgccccgcgcgcagcctgagcgccacacaaaggacgcggccgactctagcgaccctgcggcgctcccgggcgcgagccgccggggtcgggcgggcgagcactagcaccgccccgcagagcggcaggctgacagccaggcgcgggcacgagcagtgctctcttcggctccgctggcgcgtgcccttctcgggctccaaaaatcagcagtgctccgggcgccccctgctagtcgcggccgtaaaaggcagacaaaagccctagcctctccaatcggagggcntcgcttcaggtctcccgcctctcctcttacacgctcactttcttctccaataagcgggctcgaaaagnggggcggtgaccggcgaggaatattgggaattgtagttttttggacccacgggacggcagagctggagctncgtgccgcctgtactcccgccttcatttcccatcgtgctgaggcgggtggcatggcggagaaggatgacaccggagtttgacgaagaggtggtttttgaggtaagaggaaaatggcggtgggtgtggattgcctttgtgtgagaaggacgagacggaaatcgaggaagcaaggcgttcccggggcgagggatcgggtgacgcgctccagctggcctcgaccaccgaaccccagcgatttcagggcctagagtccgtcgtcgcctgacaggtgtaccagaggcgcctggccgtggccggcctctatctcgggcccgcccagaattcccagacggtgcccggttgccaggctctgggctggagcggtgtctcttccttcctgggaatggatgtgcggcgggggggactgcgcccggctggggcggggccgaatcgtgccttttagatagtcacaacttagcctcctccttttccatccgcgatttttttggacattaaaactaccactactatggaagtaccactactagatggaagtttgacctggacatggtggctcacacttgtaatcccagcactttgagaggccaaggcagcagagcccttgctagaagccagtggcatgctcttgaacttcccagcctgcagaactatgagctaaaattctccactttaccaatacttacaggatctgggacacacagactttgaaatatgttcttctttgtcaccaaaaacagaaaaatgcacaacagagggacaacaaaagcctcctacaagagtcctaccaaaatacctgggatatagtaatcactcaatgaatataaactgcacttactggcatgctcaaggaatgggctattaagcaaggtatcctgttaaaagtggctgaaaccatcaaaagttggatttttttttctcagtgcaataagaaagatgacttacttcacaagttggatattggattccgactcgactcattacataccatcctgcaacaggaagtcctgttacaagaggatgtggagctgattgagctacttgatcccagtatcctgtctgcagggcaatctcaacaacaggaaaatggacaccttccaacactttgctccctggcaacccctaatatttgggatctctcaatgctatttgccttcattagcttgctcgttatgcttcccacttggtggattgtgtcttcctggctggtatggggagtgattctatttgtgtatctggtcataagagctttgagattatggaggacagccaaactacaagtgaccctaaaaaaatacagcgttcatttggaagatatggccacaaacagccgagcttttactaacctcgtgagaaaagctttacgtctcattcaagaaaccgaagtgatttccagaggatttacactggtcagtgctgcttgcccatttaataaagctggacagcatccaagtcagcatctcatcggtcttcggaaagctgtctaccgaactctaagagccaacttccaagcagcaaggctagctaccctatatatgctgaaaaactaccccctgaactctgagagtgacaatgtaaccaactacatctgtgtggtgccttttaaagagctgggccttggacttagtgaagagcagatttcagaagaggaagcacataactttacagatggcttcagcctgcctgcattgaaggttttgttccaactctgggtggcacagagttcagagttcttcagacggttagccctattactttctacagccaattcacctcctgggcccttacttactccagcacttctgcctcatcgtatcttatctgatgtgactcaaggtctacctcatgctcattctgcctgtttggaagagcttaagcgcagctatgagttctatcggtactttgaaactcagcaccagtcagtaccgcagtgtttatccaaaactcaacagaagtcaagagaactgaataatgttcacacagcagtgcgtagcttgcagctccatctgaaagcattactgaatgaggtaataattcttgaagatgaacttgaaaagcttgtttgtactaaagaaacacaagaactagtgtcagaggcttatcccatcctagaacagaaattaaagttgattcagccccacgttcaagcaagcaacaattgctgggaagaggccatttctcaggtcgacaaactgctacgaagaaatacagataaaaaaggcaagcctgaaatagcatgtgaaaacccacattgtacagtagtacctttgaagcagcctactctacacattgcagacaaagatccaatcccagaggagcaggaattagaagcttatgtagatgatatagatattgatagtgatttcagaaaggatgatttttattacttgtctcaagaagacaaagagagacagaagcgtgagcatgaagaatccaagagggtgctccaagaattaaaatctgtgctgggatttaaagcttcagaggcagaaaggcagaagtggaagcaacttctatttagtgatcatgccgtgttgaaatccttgtctcctgtagacccagtggaacccataagtaattcagaaccatcaatgaattcagatatgggaaaagtcagtaaaaatgatactgaagaggaaagtaataaatccgccacaacagacaatgaaataagtaggactgagtatttatgtgaaaactctctagaaggtaaaaataaagataattcttcaaatgaagtcttcccccaaggagcagaagaaagaatgtgttaccaatgtgagagtgaagatgaaccacaagcagatggaagtggtctgaccactgcccctccaactcccagggactcattacagccctccattaagcagaggctggcacggctacagctgtcaccagattttaccttcactgctggccttgctgcagaagtggctgctagatctctctcctttaccaccatgcaggaacagacttttggtgatgaggaggaagaacaaataatagaagaaaataaaaatgagatagaagaaaagtaagaaccaagattcatatgaagtgatattagattgttccttttacaaaagtgtttagcttcaagactggaaagggaatatgagtgtaagtttactatatataaagctaagatgtggatttacaggaagaaccctggtttgaataactgatctgaaattagtagttacctgtaaatggcagatcttttaggaaaataagagaaaggtaagggctcttttgaataaactgctgttttatttgtggcacaactgatcaatcttggaaattctttaagtatttttaataagaaatgaattatcatttcttgccagaatttgctaccttaaggtgattgggaaaattctgttgcaagaacattaacatttagtatgactcctttttactgtattcttgcagttaataactgcagctattatgttaataacaagttgtttgtattttatttttgtttataccagtcttaaagatccaggttctgaataaaaaaattaattgatacaa

SEQ ID NO: 451789 - DNA, 4746 bp, Homo sapiens
  misc_feature (328)..(328): n is a, c, g, or t
  misc_feature (396)..(396): n is a, c, g, or t
  misc_feature (467)..(467): n is a, c, g, or t
ccagttcggtaggagagaaagcccccgcagcgcccacagtccgtcccccgccccgcgcgcagcctgagcgccacacaaaggacgcggccgactctagcgaccctgcggcgctcccgggcgcgagccgccggggtcgggcgggcgagcactagcaccgccccgcagagcggcaggctgacagccaggcgcgggcacgagcagtgctctcttcggctccgctggcgcgtgcccttctcgggctccaaaaatcagcagtgctccgggcgccccctgctagtcgcggccgtaaaaggcagacaaaagccctagcctctccaatcggagggcntcgcttcaggtctcccgcctctcctcttacacgctcactttcttctccaataagcgggctcgaaaagnggggcggtgaccggcgaggaatattgggaattgtagttttttggacccacgggacggcagagctggagctncgtgccgcctgtactcccgccttcatttcccatcgtgctgaggcgggtggcatggcggagaaggatgacaccggagtttgacgaagaggtggtttttgagaattctccactttaccaatacttacaggatctgggacacacagactttgaaatatgttcttctttgtcaccaaaaacagaaaaatgcacaacagagggacaacaaaagcctcctacaagagtcctaccaaaatacctgggatatagtaatcactcaatgaatataaactgcacttactggcatgctcaaggaatgggctattaagcaaggtatcctgttaaaagtggctgaaaccatcaaaagttggatttttttttctcagtgcaataagaaagatgacttacttcacaagttggatattggattccgactcgactcattacataccatcctgcaacaggaagtcctgttacaagaggatgtggagctgattgagctacttgatcccagtatcctgtctgcagggcaatctcaacaacaggaaaatggacaccttccaacactttgctccctggcaacccctaatatttgggatctctcaatgctatttgccttcattagcttgctcgttatgcttcccacttggtggattgtgtcttcctggctggtatggggagtgattctatttgtgtatctggtcataagagctttgagattatggaggacagccaaactacaagtgaccctaaaaaaatacagcgttcatttggaagatatggccacaaacagccgagcttttactaacctcgtgagaaaagctttacgtctcattcaagaaaccgaagtgatttccagaggatttacactggtcagtgctgcttgcccatttaataaagctggacagcatccaagtcagcatctcatcggtcttcggaaagctgtctaccgaactctaagagccaacttccaagcagcaaggctagctaccctatatatgctgaaaaactaccccctgaactctgagagtgacaatgtaaccaactacatctgtgtggtgccttttaaagagctgggccttggacttagtgaagagcagatttcagaagaggaagcacataactttacagatggcttcagcctgcctgcattgaaggttttgttccaactctgggtggcacagagttcagagttcttcagacggttagccctattactttctacagccaattcacctcctgggcccttacttactccagcacttctgcctcatcgtatcttatctgatgtgactcaaggtctacctcatgctcattctgcctgtttggaagagcttaagcgcagctatgagttctatcggtactttgaaactcagcaccagtcagtaccgcagtgtttatccaaaactcaacagaagtcaagagaactgaataatgttcacacagcagtgcgtagcttgcagctccatctgaaagcattactgaatgaggtaataattcttgaagatgaacttgaaaagcttgtttgtactaaagaaacacaagaactagtgtcagaggcttatcccatcctagaacagaaattaaagttgattcagccccacgttcaagcaagcaacaattgctgggaagaggccatttctcaggtcgacaaactgctacgaagaaatacagataaaaaaggcaagcctgaaatagcatgtgaaaacccacattgtacagtagtacctttgaagcagcctactctacacattgcagacaaagatccaatcccagaggagcaggaattagaagcttatgtagatgatatagatattgatagtgatttcagaaaggatgatttttattacttgtctcaagaagacaaagagagacagaagcgtgagcatgaagaatccaagagggtgctccaagaattaaaatctgtgctgggatttaaagcttcagaggcagaaaggcagaagtggaagcaacttctatttagtgatcatgtgtttcttcatatagctttaaaattatgctattgacattatgggaaagatttatcaatgagagaaatgtgtctctttttcaggtatgtgcttttgatatagtttacattggaaagggtcataatgctgttttagtttgtgaaaataagtaaaaagctgctgataccatagaatgcttttcccatgaaaaatttcagtacatcttccagagctgttttcatctctgcctacaggggtaaagtccgcatggaattagagggggaaagtctgcactggaacctgctgtggccattttttttctgttgttgctgcttctctagtggagttactgcagcttagggatggttcctggaagtggacacattttacaaaaacgttttttaaatacacgccagctcttcgagaagcacttttttccttccgtcatgcttcatactatattgtattgtactaacccctcatgctgggatgagcgactgcctagcaagcaacccactgcctactaacatcaagaggggctaaataaaactgcattttccttgcaaggacaacttctaccgtatgaatatatattatatttatgtattatattttgtacaatagttgatcttgaatgcagacttcatttgtatttttcgtggtactacaaaatgtgtagaagttatggcttttctttcattagggtcttgttaggtggttggcaagtaagttaaattgtatgttgcatttttttccatgctgttttaacttgtaaatatatatgtatacatgtggaagatattattattatctagattactttaagccttttatctgatgtattatcagtgaaaaccatgctgcttattccctaatacaatggttctcaaactttagtgtgtatcagaatcaagatgagggcttgtaaaatatagctggtccctactcccagagtttccatttcaggaggtctgggatcaggcccaagaatttgcatttttaacaaattcctaggtgataactgataatgttggttcagggaacacactttcagaaccactgctttaatattttaaataagataatatgtgaggtgtcataaaaaccttcatcaaatccctatctcatttcatttcttaggcattttctctcttataaagtttcctggatttataaattttcattgattttactagaaagttttatttagcttttatttatttattgttctttttaagaaaaaaactgagagtttgaattaaaagtttaaatcattgctaggtccttagttattttttttcttttttctttttttttatttgaagccgtgttgaaatccttgtctcctgtagacccagtggaacccataagtaattcagaaccatcaatgaattcagatatgggaaaagtcagtaaaaatgatactgaagaggaaagtaataaatccgccacaacagacaatgaaataagtaggactgagtatttatgtgaaaactctctagaaggtaaaaataaagataattcttcaaatgaagtcttcccccaaggagcagaagaaagaatgtgttaccaatgtgagagtgaagatgaaccacaagcagatggaagtggtctgaccactgcccctccaactcccagggactcattacagccctccattaagcagaggctggcacggctacagctgtcaccagattttaccttcactgctggccttgctgcagaagtggctgctagatctctctcctttaccaccatgcaggaacagacttttggtgatgaggaggaagaacaaataatagaagaaaataaaaatgagatagaagaaaagtaagaaccaagattcatatgaagtgatattagattgttccttttacaaaagtgtttagcttcaagactggaaagggaatatgagtgtaagtttactatatataaagctaagatgtggatttacaggaagaaccctggtttgaataactgatctgaaattagtagttacctgtaaatggcagatcttttaggaaaataagagaaaggtaagggctcttttgaataaactgctgttttatttgtggcacaactgatcaatcttggaaattctttaagtatttttaataagaaatgaattatcatttcttgccagaatttgctaccttaaggtgattgggaaaattctgttgcaagaacattaacatttagtatgactcctttttactgtattcttgcagttaataactgcagctattatgttaataacaagttgtttgtattttatttttgtttataccagtcttaaagatccaggttctgaataaaaaaattaattgatacaa

SEQ ID NO: 451790 - DNA, 3317 bp, Homo sapiens
  misc_feature (328)..(328): n is a, c, g, or t
  misc_feature (396)..(396): n is a, c, g, or t
  misc_feature (467)..(467): n is a, c, g, or t
ccagttcggtaggagagaaagcccccgcagcgcccacagtccgtcccccgccccgcgcgcagcctgagcgccacacaaaggacgcggccgactctagcgaccctgcggcgctcccgggcgcgagccgccggggtcgggcgggcgagcactagcaccgccccgcagagcggcaggctgacagccaggcgcgggcacgagcagtgctctcttcggctccgctggcgcgtgcccttctcgggctccaaaaatcagcagtgctccgggcgccccctgctagtcgcggccgtaaaaggcagacaaaagccctagcctctccaatcggagggcntcgcttcaggtctcccgcctctcctcttacacgctcactttcttctccaataagcgggctcgaaaagnggggcggtgaccggcgaggaatattgggaattgtagttttttggacccacgggacggcagagctggagctncgtgccgcctgtactcccgccttcatttcccatcgtgctgaggcgggtggcatggcggagaaggatgacaccggagtttgacgaagaggtggtttttgagaattctccactttaccaatacttacaggatctgggacacacagactttgaaatatgttcttctttgtcaccaaaaacagaaaaatgcacaacagagggacaacaaaagcctcctacaagagtcctaccaaaacaaggtatcctgttaaaagtggctgaaaccatcaaaagatattggattccgactcgactcattacataccatcctgcaacaggaagtcctgttacaagaggatgtggagctgattgagctacttgatcccagtatcctgtctgcagggcaatctcaacaacaggaaaatggacaccttccaacactttgctccctggcaacccctaatatttgggatctctcaatgctatttgccttcattagcttgctcgttatgcttcccacttggtggattgtgtcttcctggctggtatggggagtgattctatttgtgtatctggtcataagagctttgagattatggaggacagccaaactacaagtgaccctaaaaaaatacagcgttcatttggaagatatggccacaaacagccgagcttttactaacctcgtgagaaaagctttacgtctcattcaagaaaccgaagtgatttccagaggatttacactggtcagtgctgcttgcccatttaataaagctggacagcatccaagtcagcatctcatcggtcttcggaaagctgtctaccgaactctaagagccaacttccaagcagcaaggctagctaccctatatatgctgaaaaactaccccctgaactctgagagtgacaatgtaaccaactacatctgtgtggtgccttttaaagagctgggccttggacttagtgaagagcagatttcagaagaggaagcacataactttacagatggcttcagcctgcctgcattgaaggttttgttccaactctgggtggcacagagttcagagttcttcagacggttagccctattactttctacagccaattcacctcctgggcccttacttactccagcacttctgcctcatcgtatcttatctgatgtgactcaaggtctacctcatgctcattctgcctgtttggaagagcttaagcgcagctatgagttctatcggtactttgaaactcagcaccagtcagtaccgcagtgtttatccaaaactcaacagaagtcaagagaactgaataatgttcacacagcagtgcgtagcttgcagctccatctgaaagcattactgaatgaggtaataattcttgaagatgaacttgaaaagcttgtttgtactaaagaaacacaagaactagtgtcagaggcttatcccatcctagaacagaaattaaagttgattcagccccacgttcaagcaagcaacaattgctgggaagaggccatttctcaggtcgacaaactgctacgaagaaatacagataaaaaaggcaagcctgaaatagcatgtgaaaacccacattgtacagtagtacctttgaagcagcctactctacacattgcagacaaagatccaatcccagaggagcaggaattagaagcttatgtagatgatatagatattgatagtgatttcagaaaggatgatttttattacttgtctcaagaagacaaagagagacagaagcgtgagcatgaagaatccaagagggtgctccaagaattaaaatctgtgctgggatttaaagcttcagaggcagaaaggcagaagtggaagcaacttctatttagtgatcatgccgtgttgaaatccttgtctcctgtagacccagtggaacccataagtaattcagaaccatcaatgaattcagatatgggaaaagtcagtaaaaatgatactgaagaggaaagtaataaatccgccacaacagacaatgaaataagtaggactgagtatttatgtgaaaactctctagaaggtaaaaataaagataattcttcaaatgaagtcttcccccaaggagcagaagaaagaatgtgttaccaatgtgagagtgaagatgaaccacaagcagatggaagtggtctgaccactgcccctccaactcccagggactcattacagccctccattaagcagaggctggcacggctacagctgtcaccagattttaccttcactgctggccttgctgcagaagtggctgctagatctctctcctttaccaccatgcaggaacagacttttggtgatgaggaggaagaacaaataatagaagaaaataaaaatgagatagaagaaaagtaagaaccaagattcatatgaagtgatattagattgttccttttacaaaagtgtttagcttcaagactggaaagggaatatgagtgtaagtttactatatataaagctaagatgtggatttacaggaagaaccctggtttgaataactgatctgaaattagtagttacctgtaaatggcagatcttttaggaaaataagagaaaggtaagggctcttttgaataaactgctgttttatttgtggcacaactgatcaatcttggaaattctttaagtatttttaataagaaatgaattatcatttcttgccagaatttgctaccttaaggtgattgggaaaattctgttgcaagaacattaacatttagtatgactcctttttactgtattcttgcagttaataactgcagctattatgttaataacaagttgtttgtattttatttttgtttataccagtcttaaagatccaggttctgaataaaaaaattaattgatacaa

SEQ ID NO: 451791 - DNA, 3060 bp, Homo sapiens
ctctctcaaaaaataataataataataataataataataattcatgcttacccctttaccaagaattctgccttctccaccaagctgtcctctctactagtctctccttctccatgaatccttctctgagtgctccagctctgccgcctctcctaacactacagaccctcacactagaggaacattgtgataaaatataaaggaagtcttgaaccccaaagcatatagcagagaagggaaatgattaacagattgatttcctgcaatctgttcattcatatactgggcctacatacatcagagattaattttaggcactgttgttttctatatgttcagggttttgttttgttttgttttgtttgtctctgtaacaaaattacagtcttcttaaataggggccttattatcccacagcattcattcagcaaattactcattcaacaagtagttattaggtacttgttatatgtcaggcactgtttactgctgtatccctagcgcaaagatcaagagacaaaatgtaaagcctcctacctgcctcaaggcttaaattctaacacactcgtcaattgatcctctcattactcagattatatccaccccatttaattagtaataattgtgaactatcaaccaacttctaatatatgttgcttcctttaagagctaacagatttataaactaagaatgtacatatattgaaaatagcattgtatataaacttatatccttttttattgtttagtgtttcttcatatagctttaaaattatgctattgacattatgggaaagatttatcaatgagagaaatgtgtctctttttcaggtatgtgcttttgatatagtttacattggaaagggtcataatgctgttttagtttgtgaaaataagtaaaaagctgctgataccatagaatgcttttcccatgaaaaatttcagtacatcttccagagctgttttcatctctgcctacaggggtaaagtccgcatggaattagagggggaaagtctgcactggaacctgctgtggccattttttttctgttgttgctgcttctctagtggagttactgcagcttagggatggttcctggaagtggacacattttacaaaaacgttttttaaatacacgccagctcttcgagaagcacttttttccttccgtcatgcttcatactatattgtattgtactaacccctcatgctgggatgagcgactgcctagcaagcaacccactgcctactaacatcaagaggggctaaataaaactgcattttccttgcaaggacaacttctaccgtatgaatatatattatatttatgtattatattttgtacaatagttgatcttgaatgcagacttcatttgtatttttcgtggtactacaaaatgtgtagaagttatggcttttctttcattagggtcttgttaggtggttggcaagtaagttaaattgtatgttgcatttttttccatgctgttttaacttgtaaatatatatgtatacatgtggaagatattattattatctagattactttaagccttttatctgatgtattatcagtgaaaaccatgctgcttattccctaatacaatggttctcaaactttagtgtgtatcagaatcaagatgagggcttgtaaaatatagctggtccctactcccagagtttccatttcaggaggtctgggatcaggcccaagaatttgcatttttaacaaattcctaggtgataactgataatgttggttcagggaacacactttcagaaccactgctttaatattttaaataagataatatgtgaggtgtcataaaaaccttcatcaaatccctatctcatttcatttcttaggcattttctctcttataaagtttcctggatttataaattttcattgattttactagaaagttttatttagcttttatttatttattgttctttttaagaaaaaaactgagagtttgaattaaaagtttaaatcattgctaggtccttagttattttttttcttttttctttttttttatttgaagccgtgttgaaatccttgtctcctgtagacccagtggaacccataagtaattcagaaccatcaatgaattcagatatgggaaaagtcagtaaaaatgatactgaagaggaaagtaataaatccgccacaacagacaatgaaataagtaggactgagtatttatgtgaaaactctctagaaggtaaaaataaagataattcttcaaatgaagtcttcccccaaggagcagaagaaagaatgtgttaccaatgtgagagtgaagatgaaccacaagcagatggaagtggtctgaccactgcccctccaactcccagggactcattacagccctccattaagcagaggctggcacggctacagctgtcaccagattttaccttcactgctggccttgctgcagaagtggctgctagatctctctcctttaccaccatgcaggaacagacttttggtgatgaggaggaagaacaaataatagaagaaaataaaaatgagatagaagaaaagtaagaaccaagattcatatgaagtgatattagattgttccttttacaaaagtgtttagcttcaagactggaaagggaatatgagtgtaagtttactatatataaagctaagatgtggatttacaggaagaaccctggtttgaataactgatctgaaattagtagttacctgtaaatggcagatcttttaggaaaataagagaaaggtaagggctcttttgaataaactgctgttttatttgtggcacaactgatcaatcttggaaattctttaagtatttttaataagaaatgaattatcatttcttgccagaatttgctaccttaaggtgattgggaaaattctgttgcaagaacattaacatttagtatgactcctttttactgtattcttgcagttaataactgcagctattatgttaataacaagttgtttgtattttatttttgtttataccagtcttaaagatccaggttctgaataaaaaaattaattgatacaa

SEQ ID NO: 451792 - DNA, 5120 bp, Homo sapiens
  misc_feature (328)..(328): n is a, c, g, or t
  misc_feature (396)..(396): n is a, c, g, or t
  misc_feature (467)..(467): n is a, c, g, or t
ccagttcggtaggagagaaagcccccgcagcgcccacagtccgtcccccgccccgcgcgcagcctgagcgccacacaaaggacgcggccgactctagcgaccctgcggcgctcccgggcgcgagccgccggggtcgggcgggcgagcactagcaccgccccgcagagcggcaggctgacagccaggcgcgggcacgagcagtgctctcttcggctccgctggcgcgtgcccttctcgggctccaaaaatcagcagtgctccgggcgccccctgctagtcgcggccgtaaaaggcagacaaaagccctagcctctccaatcggagggcntcgcttcaggtctcccgcctctcctcttacacgctcactttcttctccaataagcgggctcgaaaagnggggcggtgaccggcgaggaatattgggaattgtagttttttggacccacgggacggcagagctggagctncgtgccgcctgtactcccgccttcatttcccatcgtgctgaggcgggtggcatggcggagaaggatgacaccggagtttgacgaagaggtggtttttgagaattctccactttaccaatacttacaggatctgggacacacagactttgaaatatgttcttctttgtcaccaaaaacagaaaaatgcacaacagagggacaacaaaagcctcctacaagagtcctaccaaaacaaggtatcctgttaaaagtggctgaaaccatcaaaagttggatttttttttctcagtgcaataagaaagatgacttacttcacaagttggatattggattccgactcgactcattacataccatcctgcaacaggaagtcctgttacaagaggatgtggagctgattgagctacttgatcccagtatcctgtctgcagggcaatctcaacaacaggaaaatggacaccttccaacactttgctccctggcaacccctaatatttgggatctctcaatgctatttgccttcattagcttgctcgttatgcttcccacttggtggattgtgtcttcctggctggtatggggagtgattctatttgtgtatctggtcataagagctttgagattatggaggacagccaaactacaagtgaccctaaaaaaatacagcgttcatttggaagatatggccacaaacagccgagcttttactaacctcgtgagaaaagctttacgtctcattcaagaaaccgaagtgatttccagaggatttacactggtcagtgctgcttgcccatttaataaagctggacagcatccaagtcagcatctcatcggtcttcggaaagctgtctaccgaactctaagagccaacttccaagcagcaaggctagctaccctatatatgctgaaaaactaccccctgaactctgagagtgacaatgtaaccaactacatctgtgtggtgccttttaaagagctgggccttggacttagtgaagagcagatttcagaagaggaagcacataactttacagatggcttcagcctgcctgcattgaaggttttgttccaactctgggtggcacagagttcagagttcttcagacggttagccctattactttctacagccaattcacctcctgggcccttacttactccagcacttctgcctcatcgtatcttatctgatgtgactcaaggtctacctcatgctcattctgcctgtttggaagagcttaagcgcagctatgagttctatcggtactttgaaactcagcaccagtcagtaccgcagtgtttatccaaaactcaacagaagtcaagagaactgaataatgttcacacagcagtgcgtagcttgcagctccatctgaaagcattactgaatgaggtaataattcttgaagatgaacttgaaaagcttgtttgtactaaagaaacacaagaactagtgtcagaggcttatcccatcctagaacagaaattaaagttgattcagccccacgttcaagcaagcaacaattgctgggaagaggccatttctcaggtcgacaaactgctacgaagaaatacagataaaaaaggcaagcctgaaatagcatgtgaaaacccacattgtacagtagtacctttgaagcagcctactctacacattgcagacaaagatccaatcccagaggagcaggaattagaagcttatgtagatgatatagatattgatagtgatttcagaaaggatgatttttattacttgtctcaagaagacaaagagagacagaagcgtgagcatgaagaatccaagagggtgctccaagaattaaaatctgtgctgggatttaaagcttcagaggcagaaaggcagaagtggaagcaacttctatttagtgatcatgccgtgttgaaatccttgtctcctgtagacccagtggaacccataagtaattcagaaccatcaatgaattcagatatgggaaaagtcagtaaaaatgatactgaagaggaaagtaataaatccgccacaacagacaatgaaataagtaggactgagtatttatgtgaaaactctctagaaggtaaaaataaagataattcttcaaatgaagtcttcccccaaggagcagaagaaagaatgtgttaccaatgtgagagtgaagatgaaccacaagcagatggaagtggtctgaccactgcccctccaactcccagggactcattacagccctccattaagcagaggctggcacggctacagctgtcaccagattttaccttcactgctggccttgctgcagaagtggctgctagatctctctcctttaccaccatgcaggaacagacttttggtgatgaggaggaagaacaaataatagaagaaaataaaaatgagatagaagaaaagtaagaaccaagattcatatgaagtgatattagattgttccttttacaaaagtgtttagcttcaagactggaaagggaatatgagtgtaagtttactatatataaagctaagatgtggatttacaggaagaaccctggtttgaataactgatctgaaattagtagttacctgtaaatggcagatcttttaggaaaataagagaaaggtaagggctcttttgaataaactgctgttttatttgtggcacaactgatcaatcttggaaattctttaagtatttttaataagaaatgaattatcatttcttgccagaatttgctaccttaaggtgattgggaaaattctgttgcaagaacattaacatttagtatgactcctttttactgtattcttgcagttaataactgcagctattatgttaataacaagttgtttgtattttatttttgtttataccagtcttaaagatccaggttctgaataaaaaaattaattgatacaattgatgtgtgctggggtttggaactaaaagtagtttcaacagtgcgtgggttatgacatttcttatgtttctttgttcatgtgtgtatttagtagttaattttaagatgtcctagtgatctttaaaagaaaaatattgtaccattttttagaattacactttcacctttctttttgcaattgaaagtgatgatgtcaaagtgggatttctgtactccaaggccccacccccaatttagcaagcagaaaaacgttccttgtatcactttaccttggataattgggtgccattaacacaaacaggtcacaatcctgctgttttctagccctgtccaccataatgagattcaggaaacatcctgtcagcctcctggaaagcatccttgtctccttagtatttcatttacaaactacctcttaacagagactgcttttcaaattggccaatcttacctgttttgtgttgtgattgcattttcaaagagtaattattttcagcatatacagttttgaaacctgtagctcctatgcaataacatagttctatagacattatttgggggaaatgtagtaataactcaatctatgttgctgtcctagaaaggaaattgcatgatgaatctagattgtctttagagtaaagaaacacattcaaattcctgtaacttatcactttcagtgagtaaatttacttataccaaaggggattttttttctttcaggaatctaaggaaatttactttttaacctgagaaaaaaacttggttctgctttatataaacagtagagattattgtactataagtgattttgcctttttgccaaaatcctggaactcatctataattaacctcttcggagcaataccttaggttgggccttgctttactacttagaaatagctaaatttcaattttaaaaatctttgtgtgttataactgttaaattattcaataatacttagggtttactttcttatttaaatcacttatttagtttaccgacttcatttttctttggatttagaagaagcaattatggaaaaacttggtaatctctctcaacctataaccttacacaggaagaattagagtttaataatttttaattcttttattgtatgttacttttattacaccagtttgggggaaaatcttcataaaattgtatcagttttattcagtgttctctaaggtgataccttttaattttgaaagactaaataattttaatcgagaatttccagtctttcagtctgatctatttaattcactacttgttacataatccagtgaaaactctacttgttgaaattatgacataaagatcttgcagctttatttgagtatttgttcttttgtgtagtttccatcttttaaaatatttaaaatattttcaagataaagtattatcttctctgcaaaaattcctggagtaattttctctcataatatttgaagtcagtggttctcagttgtattagtggggtaactacatcaaaataaataaagtcttatttttaaaatgcaaattttagaccatactcccagtgattcttagttggtctttttggaatgagccataggtaatgtttatgtccaataaaatctaggaacctctgtctggaactttgctcttcttgccatgaataccttaggaagtattaaaaaacaggccaatgtaatatgagtaggttttcttgtttgttacttttctaagaatattttacttcccttagcaggcttttggct

SEQ ID NO: 451793 - DNA, 1852 bp, Homo sapiens
  misc_feature (328)..(328): n is a, c, g, or t
  misc_feature (396)..(396): n is a, c, g, or t
  misc_feature (467)..(467): n is a, c, g, or t
ccagttcggtaggagagaaagcccccgcagcgcccacagtccgtcccccgccccgcgcgcagcctgagcgccacacaaaggacgcggccgactctagcgaccctgcggcgctcccgggcgcgagccgccggggtcgggcgggcgagcactagcaccgccccgcagagcggcaggctgacagccaggcgcgggcacgagcagtgctctcttcggctccgctggcgcgtgcccttctcgggctccaaaaatcagcagtgctccgggcgccccctgctagtcgcggccgtaaaaggcagacaaaagccctagcctctccaatcggagggcntcgcttcaggtctcccgcctctcctcttacacgctcactttcttctccaataagcgggctcgaaaagnggggcggtgaccggcgaggaatattgggaattgtagttttttggacccacgggacggcagagctggagctncgtgccgcctgtactcccgccttcatttcccatcgtgctgaggcgggtggcatggcggagaaggatgacaccggagtttgacgaagaggtggtttttgagaattctccactttaccaatacttacaggatctgggacacacagactttgaaatatgttcttctttgtcaccaaaaacagaaaaatgcacaacagagggacaacaaaagcctcctacaagagtcctaccaaaatacctgggatatagtaatcactcaatgaatataaactgcacttactggcatgctcaaggaatgggctattaagcaaggtatcctgttaaaagtggctgaaaccatcaaaagttggatttttttttctcagtgcaataagaaagatgacttacttcacaagttggatattggattccgactcgactcattacataccatcctgcaacaggaagtcctgttacaagaggatgtggagctgattgagctacttgatcccagtatcctgtctgcagggcaatctcaacaacaggaaaatggacaccttccaacactttgctccctggcaacccctaatatttgggatctctcaatgctatttgccttcattagcttgctcgttatgcttcccacttggtggattgtgtcttcctggctggtatggggagtgattctatttgtgtatctggtcataagagctttgagattatggaggacagccaaactacaagtgaccctaaaaaaatacagcgttcatttggaagatatggccacaaacagccgagcttttactaacctcgtgagaaaagctttaccaccatgcaggaacagacttttggtgatgaggaggaagaacaaataatagaagaaaataaaaatgagatagaagaaaagtaagaaccaagattcatatgaagtgatattagattgttccttttacaaaagtgtttagcttcaagactggaaagggaatatgagtgtaagtttactatatataaagctaagatgtggatttacaggaagaaccctggtttgaataactgatctgaaattagtagttacctgtaaatggcagatcttttaggaaaataagagaaaggtaagggctcttttgaataaactgctgttttatttgtggcacaactgatcaatcttggaaattctttaagtatttttaataagaaatgaattatcatttcttgccagaatttgctaccttaaggtgattgggaaaattctgttgcaagaacattaacatttagtatgactcctttttactgtattcttgcagttaataactgcagctattatgttaataacaagttgtttgtattttatttttgtttataccagtcttaaagatccaggttctgaataaaaaaattaattgatacaa

SEQ ID NO: 451794 - DNA, 910 bp, Homo sapiens
  misc_feature (205)..(205): n is a, c, g, or t
  misc_feature (209)..(209): n is a, c, g, or t
cactattttatatatttaaaaaacacgcaaaagataactatctgaaaggcatgcgctacaataacgtgaaatacagaaacatgacgacagtgtcagggcagaaaatataaggtcctgcaaaactttctaaaacttactgcaatgtgtatattgtatgaagctctacggaacaaaattaatgtgtcactgataattaaaagaaccnccanaaacagggactcattacagccctccattaagcagaggctggcacggctacagctgtcaccagattttaccttcactgctggccttgctgcagaagtggctgctagatctctctcctttaccaccatgcaggaacagacttttggtgatgaggaggaagaacaaataatagaagaaaataaaaatgagatagaagaaaagtaagaaccaagattcatatgaagtgatattagattgttccttttacaaaagtgtttagcttcaagactggaaagggaatatgagtgtaagtttactatatataaagctaagatgtggatttacaggaagaaccctggtttgaataactgatctgaaattagtagttacctgtaaatggcagatcttttaggaaaataagagaaaggtaagggctcttttgaataaactgctgttttatttgtggcacaactgatcaatcttggaaattctttaagtatttttaataagaaatgaattatcatttcttgccagaatttgctaccttaaggtgattgggaaaattctgttgcaagaacattaacatttagtatgactcctttttactgtattcttgcagttaataactgcagctattatgttaataacaagttgtttgtattttatttttgtttataccagtcttaaagatccaggttctgaataaaaaaattaattgatacaa

SEQ ID NO: 451795 - DNA, 2850 bp, Homo sapiens
  misc_feature (328)..(328): n is a, c, g, or t
  misc_feature (396)..(396): n is a, c, g, or t
  misc_feature (467)..(467): n is a, c, g, or t
  misc_feature (2836)..(2836): n is a, c, g, or t
ccagttcggtaggagagaaagcccccgcagcgcccacagtccgtcccccgccccgcgcgcagcctgagcgccacacaaaggacgcggccgactctagcgaccctgcggcgctcccgggcgcgagccgccggggtcgggcgggcgagcactagcaccgccccgcagagcggcaggctgacagccaggcgcgggcacgagcagtgctctcttcggctccgctggcgcgtgcccttctcgggctccaaaaatcagcagtgctccgggcgccccctgctagtcgcggccgtaaaaggcagacaaaagccctagcctctccaatcggagggcntcgcttcaggtctcccgcctctcctcttacacgctcactttcttctccaataagcgggctcgaaaagnggggcggtgaccggcgaggaatattgggaattgtagttttttggacccacgggacggcagagctggagctncgtgccgcctgtactcccgccttcatttcccatcgtgctgaggcgggtggcatggcggagaaggatgacaccggagtttgacgaagaggtggtttttgagaattctccactttaccaatacttacaggatctgggacacacagactttgaaatatgttcttctttgtcaccaaaaacagaaaaatgcacaacagagggacaacaaaagcctcctacaagagtcctaccaaaatacctgggatatagtaatcactcaatgaatataaactgcacttactggcatgctcaaggaatgggctattaagcaaggtatcctgttaaaagtggctgaaaccatcaaaagttggatttttttttctcagtgcaataagaaagatgacttacttcacaagttggatattggattccgactcgactcattacataccatcctgcaacaggaagtcctgttacaagaggatgtggagctgattgagctacttgatcccagtatcctgtctgcagggcaatctcaacaacaggaaaatggacaccttccaacactttgctccctggcaacccctaatatttgggatctctcaatgctatttgccttcattagcttgctcgttatgcttcccacttggtggattgtgtcttcctggctggtatggggagtgattctatttgtgtatctggtcataagagctttgagattatggaggacagccaaactacaagtgaccctaaaaaaatacagcgttcatttggaagatatggccacaaacagccgagcttttactaacctcgtgagaaaagctttacgtctcattcaagaaaccgaagtgatttccagaggatttacactggtcagtgctgcttgcccatttaataaagctggacagcatccaagtcagcatctcatcggtcttcggaaagctgtctaccgaactctaagagccaacttccaagcagcaaggctagctaccctatatatgctgaaaaactaccccctgaactctgagagtgacaatgtaaccaactacatctgtgtggtgccttttaaagagctgggccttggacttagtgaagagcagatttcagaagaggaagcacataactttacagatggcttcagcctgcctgcattgaaggttttgttccaactctgggtggcacagagttcagagttcttcagacggttagccctattactttctacagccaattcacctcctgggcccttacttactccagcacttctgcctcatcgtatcttatctgatgtgactcaaggtctacctcatgctcattctgcctgtttggaagagcttaagcgcagctatgagttctatcggtactttgaaactcagcaccagtcagtaccgcagtgtttatccaaaactcaacagaagtcaagagaactgaataatgttcacacagcagtgcgtagcttgcagctccatctgaaagcattactgaatgaggtaataattcttgaagatgaacttgaaaagcttgtttgtactaaagaaacacaagaactagtgtcagaggcttatcccatcctagaacagaaattaaagttgattcagccccacgttcaagcaagcaacaattgctgggaagaggccatttctcaggtcgacaaactgctacgaagaaatacagataaaaaaggcaagcctgaaatagcatgtgaaaacccacattgtacagtagtacctttgaagcagcctactctacacattgcagacaaagatccaatcccagaggagcaggaattagaagcttatgtagatgatatagatattgatagtgatttcagaaaggatgatttttattacttgtctcaagaagacaaagagagacagaagcgtgagcatgaagaatccaagagggtgctccaagaattaaaatctgtgctgggatttaaagcttcagaggcagaaaggcagaagtggaagcaacttctatttagtgatcatgccgtgttgaaatccttgtctcctgtagacccagtggaacccataagtaattcagaaccatcaatgaattcagatatgggaaaagtcagtaaaaatgatactgaagaggaaagtaataaatccgccacaacagacaatgaaataagtaggactgagtatttatgtgaaaactctctagaaggtaaaaataaagataattcttcaaatgaagtcttcccccaaggagcagaagaaagaatgtgttaccaatgtgagagtgaagatgaaccacaagcagatggaagtggtctgaccactgcccctccaactcccagggactcattacagccctccattaagcagaggctggcacggctacagctgtcaccagattttaccttcactgctggctgatgaattcgnatcctcgggtcacc

SEQ ID NO: 451796 - DNA, 1619 bp, Homo sapiens
  misc_feature (328)..(328): n is a, c, g, or t
  misc_feature (396)..(396): n is a, c, g, or t
  misc_feature (467)..(467): n is a, c, g, or t
ccagttcggtaggagagaaagcccccgcagcgcccacagtccgtcccccgccccgcgcgcagcctgagcgccacacaaaggacgcggccgactctagcgaccctgcggcgctcccgggcgcgagccgccggggtcgggcgggcgagcactagcaccgccccgcagagcggcaggctgacagccaggcgcgggcacgagcagtgctctcttcggctccgctggcgcgtgcccttctcgggctccaaaaatcagcagtgctccgggcgccccctgctagtcgcggccgtaaaaggcagacaaaagccctagcctctccaatcggagggcntcgcttcaggtctcccgcctctcctcttacacgctcactttcttctccaataagcgggctcgaaaagnggggcggtgaccggcgaggaatattgggaattgtagttttttggacccacgggacggcagagctggagctncgtgccgcctgtactcccgccttcatttcccatcgtgctgaggcgggtggcatggcggagaaggatgacaccggagtttgacgaagaggtggtttttgagaattctccactttaccaatacttacaggatctgggacacacagactttgaaatatgttcttctttgtcaccaaaaacagaaaaatgcacaacagagggacaacaaaagcctcctacaagagtcctaccaaaacaaggtatcctgttaaaagtggctgaaaccatcaaaagttggatttttttttctcagtgcaataagaaagatgacttacttcacaagttggatattggattccgactcgactcattacataccatcctgcaacaggaagtcctgttacaagaggatgtggagctgattgagctacttgatcccagtatcctgtctgcagggcaatctcaacaacaggaaaatggacaccttccaacactttgctccctggcaacccctaatatttgggatctctcaatgctatttgccttcattagcttgctcgttatgcttcccacttggtggattgtgtcttcctggctggtatggggagtgattctatttgtgtatctggtcataagagctttgagattatggaggacagccaaactacaagtgaccctaaaaaaatacagcgttcatttggaagatatggccacaaacagccgagcttttactaacctcgtgagaaaagctttacgtctcattcaagaaaccgaagtgatttccagaggatttacactggtcagtgctgcttgcccatttaataaagctggacagcatccaagtcagcatctcatcggtcttcggaaagctgtctaccgaactctaagagccaacttccaagcagcaaggctagctaccctatatatgctgaaaaatacccctgaactctgagagtgaccagtaaccatacatctgtggggtggctttaagaagtgggctgggattagtgagagcgatccggaacaggagcctaattacagatggttagccggcgattgaggttgtccctctggggccaagagtcagtctcaaagggagcctatttacagcaatcctgggctttatcacttgcccggatatggggagggccacctttcgcggggagacacacaatg

SEQ ID NO: 451797 - DNA, 295 bp, Homo sapiens
tgttaaattcctactcatccgttaggactgaactccagtgttagctcctctctgacctcctcttttccaatactttttcagactttacattgattgtaattctttatattgtctcttcttctatactaagttcttgaaaacaatagttacatgtatttatcttttttcccatgaccctttgcagtacctgggatatagtaatcactcaatgaatataaactgcacttactggcatgctcaaggaatgggctattaaggtaaattgaatttttggttgattcagtagtaaagcttt

SEQ ID NO: 451798 - DNA, 3450 bp, Homo sapiens
cggcccagctgagatatggcaagccccgtttcccgcaggctctgtggctggtatggggagtgattctatttgtgtatctggtcataagagctttgagattatggaggacagccaaactacaagtgaccctaaaaaaatacagcgttcatttggaagatatggccacaaacagccgagcttttactaacctcgtgagaaaagctttacgtctcattcaagaaaccgaagtgatttccagaggatttacactggtcagtgctgcttgcccatttaataaagctggacagcatccaagtcagcatctcatcggtcttcggaaagctgtctaccgaactctaagagccaacttccaagcagcaaggctagctaccctatatatgctgaaaaactaccccctgaactctgagagtgacaatgtaaccaactacatctgtgtggtgccttttaaagagctgggccttggacttagtgaagagcagatttcagaagaggaagcacataactttacagatggcttcagcctgcctgcattgaaggttttgttccaactctgggtggcacagagttcagagttcttcagacggttagccctattactttctacagccaattcacctcctgggcccttacttactccagcacttctgcctcatcgtatcttatctgatgtgactcaaggtctacctcatgctcattctgcctgtttggaagagcttaagcgcagctatgagttctatcggtactttgaaactcagcaccagtcagtaccgcagtgtttatccaaaactcaacagaagtcaagagaactgaataatgttcacacagcagtgcgtagcttgcagctccatctgaaagcattactgaatgaggtaataattcttgaagatgaacttgaaaagcttgtttgtactaaagaaacacaagaactagtgtcagaggcttatcccatcctagaacagaaattaaagttgattcagccccacgttcaagcaagcaacaattgctgggaagaggccatttctcaggtcgacaaactgctacgaagaaatacagataaaaaaggcaagcctgaaatagcatgtgaaaacccacattgtacagtagtacctttgaagcagcctactctacacattgcagacaaagatccaatcccagaggagcaggaattagaagcttatgtagatgatatagatattgatagtgatttcagaaaggatgatttttattacttgtctcaagaagacaaagagagacagaagcgtgagcatgaagaatccaagagggtgctccaagaattaaaatctgtgctgggatttaaagcttcagaggcagaaaggcagaagtggaagcaacttctatttagtgatcatggggtaaagtccgcatggaattagagggggaaagtctgcactggaacctgctgtggccattttttttctgttgttgctgcttctctagtggagttactgcagcttagggatggttcctggaagtggacacattttacaaaaacgttttttaaatacacgccagctcttcgagaagcacttttttccttccgtcatgcttcatactatattgtattgtactaacccctcatgctgggatgagcgactgcctagcaagcaacccactgcctactaacatcaagaggggctaaataaaactgcattttccttgcaaggacaacttctaccgtatgaatatatattatatttatgtattatattttgtacaatagttgatcttgaatgcagacttcatttgtatttttcgtggtactacaaaatgtgtagaagttatggcttttctttcattagggtcttgttaggtggttggcaagtaagttaaattgtatgttgcatttttttccatgctgttttaacttgtaaatatatatgtatacatgtggaagatattattattatctagattactttaagccttttatctgatgtattatcagtgaaaaccatgctgcttattccctaatacaatggttctcaaactttagtgtgtatcagaatcaagatgagggcttgtaaaatatagctggtccctactcccagagtttccatttcaggaggtctgggatcaggcccaagaatttgcatttttaacaaattcctaggtgataactgataatgttggttcagggaacacactttcagaaccactgctttaatattttaaataagataatatgtgaggtgtcataaaaaccttcatcaaatccctatctcatttcatttcttaggcattttctctcttataaagtttcctggatttataaattttcattgattttactagaaagttttatttagcttttatttatttattgttctttttaagaaaaaaactgagagtttgaattaaaagtttaaatcattgctaggtccttagttattttttttcttttttctttttttttatttgaagccgtgttgaaatccttgtctcctgtagacccagtggaacccataagtaattcagaaccatcaatgaattcagatatgggaaaagtcagtaaaaatgatactgaagaggaaagtaataaatccgccacaacagacaatgaaataagtaggactgagtatttatgtgaaaactctctagaaggtaaaaataaagataattcttcaaatgaagtcttcccccaaggagcagaagaaagaatgtgttaccaatgtgagagtgaagatgaaccacaagcagatggaagtggtctgaccactgcccctccaactcccagggactcattacagccctccattaagcagaggctggcacggctacagctgtcaccagattttaccttcactgctggccttgctgcagaagtggctgctagatctctctcctttaccaccatgcaggaacagacttttggtgatgaggaggaagaacaaataatagaagaaaataaaaatgagatagaagaaaagtaagaaccaagattcatatgaagtgatattagattgttccttttacaaaagtgtttagcttcaagactggaaagggaatatgagtgtaagtttactatatataaagctaagatgtggatttacaggaagaaccctggtttgaataactgatctgaaattagtagttacctgtaaatggcagatcttttaggaaaataagagaaaggtaagggctcttttgaataaactgctgttttatttgtggcacaactgatcaatcttggaaattctttaagtatttttaataagaaatgaattatcatttcttgccagaatttgctaccttaaggtgattgggaaaattctgttgcaagaacattaacatttagtatgactcctttttactgtattcttgcagttaataactgcagctattatgttaataacaagttgtttgtattttatttttgtttataccagtcttaaagatccaggttctgaataaaaaaattaattgatacaa

SEQ ID NO: 451799 - DNA, 970 bp, Homo sapiens
  misc_feature (328)..(328): n is a, c, g, or t
  misc_feature (396)..(396): n is a, c, g, or t
  misc_feature (467)..(467): n is a, c, g, or t
ccagttcggtaggagagaaagcccccgcagcgcccacagtccgtcccccgccccgcgcgcagcctgagcgccacacaaaggacgcggccgactctagcgaccctgcggcgctcccgggcgcgagccgccggggtcgggcgggcgagcactagcaccgccccgcagagcggcaggctgacagccaggcgcgggcacgagcagtgctctcttcggctccgctggcgcgtgcccttctcgggctccaaaaatcagcagtgctccgggcgccccctgctagtcgcggccgtaaaaggcagacaaaagccctagcctctccaatcggagggcntcgcttcaggtctcccgcctctcctcttacacgctcactttcttctccaataagcgggctcgaaaagnggggcggtgaccggcgaggaatattgggaattgtagttttttggacccacgggacggcagagctggagctncgtgccgcctgtactcccgccttcatttcccatcgtgctgaggcgggtggcatggcggagaaggatgacaccggagtttgacgaagaggtggtttttgagaattctccactttaccaatacttacaggatctgggacacacagactttgaaatatgttcttctttgtcaccaaaaacagaaaaatgcacaacagagggacaacaaaagcctcctacaagagtcctaccaaaagtaagaacgcatgctcattctttctggccgaatcttttgcactttaccttactggctattcagatacttcttaagcacttccatatcctccctcacactggtaagactatttatttcatcaatagtacaaaactttctgttagataaacatgaatccttactgctttggaatactttgtaggtaatttatatccagtgaggaaataatttggtagagaattaaaatacattacttatttaaatattgatgctatccaaacagaatcgaaaa

SEQ ID NO: 451800 - DNA, 4897 bp, Homo sapiens
  misc_feature (328)..(328): n is a, c, g, or t
  misc_feature (396)..(396): n is a, c, g, or t
  misc_feature (467)..(467): n is a, c, g, or t
ccagttcggtaggagagaaagcccccgcagcgcccacagtccgtcccccgccccgcgcgcagcctgagcgccacacaaaggacgcggccgactctagcgaccctgcggcgctcccgggcgcgagccgccggggtcgggcgggcgagcactagcaccgccccgcagagcggcaggctgacagccaggcgcgggcacgagcagtgctctcttcggctccgctggcgcgtgcccttctcgggctccaaaaatcagcagtgctccgggcgccccctgctagtcgcggccgtaaaaggcagacaaaagccctagcctctccaatcggagggcntcgcttcaggtctcccgcctctcctcttacacgctcactttcttctccaataagcgggctcgaaaagnggggcggtgaccggcgaggaatattgggaattgtagttttttggacccacgggacggcagagctggagctncgtgccgcctgtactcccgccttcatttcccatcgtgctgaggcgggtggcatggcggagaaggatgacaccggagtttgacgaagaggtggtttttgagaattctccactttaccaatacttacaggatctgggacacacagactttgaaatatgttcttctttgtcaccaaaaacagaaaaatgcacaacagagggacaacaaaagcctcctacaagagtcctaccaaaacaaggtatcctgttaaaagtggctgaaaccatcaaaagttggatttttttttctcagtgcaataagaaagatgacttacttcacaagttggatattggattccgactcgactcattacataccatcctgcaacaggaagtcctgttacaagaggatgtggagctgattgagctacttgatcccagtatcctgtctgcagggcaatctcaacaacaggaaaatggacaccttccaacactttgctccctggcaacccctaatatttgggatctctcaatgctatttgccttcattagcttgctcgttatgcttcccacttggtggattgtgtcttcctggctggtatggggagtgattctatttgtgtatctggtcataagagctttgagattatggaggacagccaaactacaagtgaccctaaaaaaatacagcgttcatttggaagatatggccacaaacagccgagcttttactaacctcgtgagaaaagctttacgtctcattcaagaaaccgaagtgatttccagaggatttacactggtcagtgctgcttgcccatttaataaagctggacagcatccaagtcagcatctcatcggtcttcggaaagctgtctaccgaactctaagagccaacttccaagcagcaaggctagctaccctatatatgctgaaaaactaccccctgaactctgagagtgacaatgtaaccaactacatctgtgtggtgccttttaaagagctgggccttggacttagtgaagagcagatttcagaagaggaagcacataactttacagatggcttcagcctgcctgcattgaaggttttgttccaactctgggtggcacagagttcagagttcttcagacggttagccctattactttctacagccaattcacctcctgggcccttacttactccagcacttctgcctcatcgtatcttatctgatgtgactcaaggtctacctcatgctcattctgcctgtttggaagagcttaagcgcagctatgagttctatcggtactttgaaactcagcaccagtcagtaccgcagtgtttatccaaaactcaacagaagtcaagagaactgaataatgttcacacagcagtgcgtagcttgcagctccatctgaaagcattactgaatgaggtaataattcttgaagatgaacttgaaaagcttgtttgtactaaagaaacacaagaactagtgtcagaggcttatcccatcctagaacagaaattaaagttgattcagccccacgttcaagcaagcaacaattgctgggaagaggccatttctcaggtcgacaaactgctacgaagaaatacagataaaaaaggcaagcctgaaatagcatgtgaaaacccacattgtacagtagtacctttgaagcagcctactctacacattgcagacaaagatccaatcccagaggagcaggaattagaagcttatgtagatgatatagatattgatagtgatttcagaaaggatgatttttattacttgtctcaagaagacaaagagagacagaagcgtgagcatgaagaatccaagagggtgctccaagaattaaaatctgtgctgggatttaaagcttcagaggcagaaaggcagaagtggaagcaacttctatttagtgatcatgccgtgttgaaatccttgtctcctgtagacccagtggaacccataagtaattcagaaccatcaatgaattcagatatgggaaaagtcagtaaaaatgatactgaagaggaaagtaataaatccgccacaacagacaatgaaataagtaggactgagtatttatgtgaaaactctctagaaggtaaaaataaagataattcttcaaatgaagtcttcccccaaggagcagaagaaagaatgtgttaccaatgtgagagtgaagatgaaccacaagcagatggaagtggtctgaccactgcccctccaactcccagggactcattacagccctccattaagcagaggctggcacggctacagctgtcaccagattttaccttcactgctggccttgctgcagaagtggctgctagatctctctcctttaccaccatgcaggaacagacttttggtgatgaggaggaagaacaaataatagaagaaaataaaaatgagatagaagaaaagtaagaaccaagattcatatgaagtgatattagattgttccttttacaaaagtgtttagcttcaagactggaaagggaatatgagtgtaagtttactatatataaagctaagatgtggatttacaggaagaaccctggtttgaataactgatctgaaattagtagttacctgtaaatggcagatcttttaggaaaataagagaaaggtaagggctcttttgaataaactgctgttttatttgtggcacaactgatcaatcttggaaattctttaagtatttttaataagaaatgaattatcatttcttgccagaatttgctaccttaaggtgattgggaaaattctgttgcaagaacattaacatttagtatgactcctttttactgtattcttgcagttaataactgcagctattatgttaataacaagttgtttgtattttatttttgtttataccagtcttaaagatccaggttctgaataaaaaaattaattgatacaattgatgtgtgctggggtttggaactaaaagtagtttcaacagtgcgtgggttatgacatttcttatgtttctttgttcatgtgtgtatttagtagttaattttaagatgtcctagtgatctttaaaagaaaaatattgtaccattttttagaattacactttcacctttctttttgcaattgaaagtgatgatgtcaaagtgggatttctgtactccaaggccccacccccaatttagcaagcagaaaaacgttccttgtatcactttaccttggataattgggtgccattaacacaaacaggtcacaatcctgctgttttctagccctgtccaccataatgagattcaggaaacatcctgtcagcctcctggaaagcatccttgtctccttagtatttcatttacaaactacctcttaacagagactgcttttcaaattggccaatcttacctgttttgtgttgtgattgcattttcaaagagtaattattttcagcatatacagttttgaaacctgtagctcctatgcaataacatagttctatagacattatttgggggaaatgtagtaataactcaatctatgttgctgtcctagaaaggaaattgcatgatgaatctagattgtctttagagtaaagaaacacattcaaattcctgtaacttatcactttcagtgagtaaatttacttataccaaaggggattttttttctttcaggaatctaaggaaatttactttttaacctgagaaaaaaacttggttctgctttatataaacagtagagattattgtactataagtgattttgcctttttgccaaaatcctggaactcatctataattaacctcttcggagcaataccttaggttgggccttgctttactacttagaaatagctaaatttcaattttaaaaatctttgtgtgttataactgttaaattattcaataatacttagggtttactttcttatttaaatcacttatttagtttaccgacttcatttttctttggatttagaagaagcaattatggaaaaacttggtaatctctctcaacctataaccttacacaggaagaattagagtttaataatttttaattcttttattgtatgttacttttattacaccagtttgggggaaaatcttcataaaattgtatcagttttattcagtgttctctaaggtgataccttttaattttgaaagactaaataattttaatcgagaatttccagtctttcagtctgatctatttaattcactacttgttacataatccagtgaaaactctacttgttgaaattatgacataaagatcttgcagctttatttgagtatttgttcttttgtgtagtttccatcttttaaaatatttaaaatattttcaagataaagtattatcttctctgcaaaaattcctggagtaattttctctcataatatttgaagtcagtggttctcagttgtattagtggggtaactacatcaaaataaataaagtcttatttttaaaatgc

SEQ ID NO: 451801 - DNA, 2977 bp, Homo sapiens
taataaaattcttaaatattggctatattgttacagcttcagggacagcatcttttatgttataggattatattttccatgtcgtgccctagcaatttaatcaattaggcttaactagacaagtttgttaatctgtaattactttacatcttgttattaaaaatttatcttttacatctgatggctcaataatgtctatctcaacctttactgtttcacatttacagtgaaaataaaacccagctatcatactgaaggtagattggactgttgtttcttcttgaagtatcttctgaaaataaacaccaccaaattttattagtacattaggagcttagcgtttaatgcaatattatatatgtgttaatacctctcttctggtattttaatggcaaggatattggattccgactcgactcattacataccatcctgcaacaggaagtcctgttacaagaggatgtggagctgattgagctacttgatcccagtatcctgtctgcagggcaatctcaacaacaggaaaatggacaccttccaacactttgctccctggcaacccctaatatttgggatctctcaatgctatttgccttcattagcttgctcgttatgcttcccacttggtggattgtgtcttcctggctggtatggggagtgattctatttgtgtatctggtcataagagctttgagattatggaggacagccaaactacaagtgaccctaaaaaaatacagcgttcatttggaagatatggccacaaacagccgagcttttactaacctcgtgagaaaagctttacgtctcattcaagaaaccgaagtgatttccagaggatttacactggtcagtgctgcttgcccatttaataaagctggacagcatccaagtcagcatctcatcggtcttcggaaagctgtctaccgaactctaagagccaacttccaagcagcaaggctagctaccctatatatgctgaaaaactaccccctgaactctgagagtgacaatgtaaccaactacatctgtgtggtgccttttaaagagctgggccttggacttagtgaagagcagatttcagaagaggaagcacataactttacagatggcttcagcctgcctgcattgaaggttttgttccaactctgggtggcacagagttcagagttcttcagacggttagccctattactttctacagccaattcacctcctgggcccttacttactccagcacttctgcctcatcgtatcttatctgatgtgactcaaggtctacctcatgctcattctgcctgtttggaagagcttaagcgcagctatgagttctatcggtactttgaaactcagcaccagtcagtaccgcagtgtttatccaaaactcaacagaagtcaagagaactgaataatgttcacacagcagtgcgtagcttgcagctccatctgaaagcattactgaatgaggtaataattcttgaagatgaacttgaaaagcttgtttgtactaaagaaacacaagaactagtgtcagaggcttatcccatcctagaacagaaattaaagttgattcagccccacgttcaagcaagcaacaattgctgggaagaggccatttctcaggtcgacaaactgctacgaagaaatacagataaaaaaggcaagcctgaaatagcatgtgaaaacccacattgtacagtagtacctttgaagcagcctactctacacattgcagacaaagatccaatcccagaggagcaggaattagaagcttatgtagatgatatagatattgatagtgatttcagaaaggatgatttttattacttgtctcaagaagacaaagagagacagaagcgtgagcatgaagaatccaagagggtgctccaagaattaaaatctgtgctgggatttaaagcttcagaggcagaaaggcagaagtggaagcaacttctatttagtgatcatgccgtgttgaaatccttgtctcctgtagacccagtggaacccataagtaattcagaaccatcaatgaattcagatatgggaaaagtcagtaaaaatgatactgaagaggaaagtaataaatccgccacaacagacaatgaaataagtaggactgagtatttatgtgaaaactctctagaaggtaaaaataaagataattcttcaaatgaagtcttcccccaaggagcagaagaaagaatgtgttaccaatgtgagagtgaagatgaaccacaagcagatggaagtggtctgaccactgcccctccaactcccagggactcattacagccctccattaagcagaggctggcacggctacagctgtcaccagattttaccttcactgctggccttgctgcagaagtggctgctagatctctctcctttaccaccatgcaggaacagacttttggtgatgaggaggaagaacaaataatagaagaaaataaaaatgagatagaagaaaagtaagaaccaagattcatatgaagtgatattagattgttccttttacaaaagtgtttagcttcaagactggaaagggaatatgagtgtaagtttactatatataaagctaagatgtggatttacaggaagaaccctggtttgaataactgatctgaaattagtagttacctgtaaatggcagatcttttaggaaaataagagaaaggtaagggctcttttgaataaactgctgttttatttgtggcacaactgatcaatcttggaaattctttaagtatttttaataagaaatgaattatcatttcttgccagaatttgctaccttaaggtgattgggaaaattctgttgcaagaacattaacatttagtatgactcctttttactgtattcttgcagttaataactgcagctattatgttaataacaagttgtttgtattttatttttgtttataccagtcttaaagatccaggttctgaataaaaaaattaattgatacaa

SEQ ID NO: 451802 - DNA, 2357 bp, Homo sapiens
tttgtcttttttttagtggttgtctatatatacatatatatatatatctagtcacagaaatgactattttatgagacctgagttgacatatgtataatcattttctagtgaagatcatgaaagaggaatttgttttctacatttaatagaattgtggatttaggaaacaaaaactttaggacacctgtacagttgtatcacattttacttttcaagtttgcttgacagggtcagtgctgcttgcccatttaataaagctggacagcatccaagtcagcatctcatcggtcttcggaaagctgtctaccgaactctaagagccaacttccaagcagcaaggctagctaccctatatatgctgaaaaactaccccctgaactctgagagtgacaatgtaaccaactacatctgtgtggtgccttttaaagagctgggccttggacttagtgaagagcagatttcagaagaggaagcacataactttacagatggcttcagcctgcctgcattgaaggttttgttccaactctgggtggcacagagttcagagttcttcagacggttagccctattactttctacagccaattcacctcctgggcccttacttactccagcacttctgcctcatcgtatcttatctgatgtgactcaaggtctacctcatgctcattctgcctgtttggaagagcttaagcgcagctatgagttctatcggtactttgaaactcagcaccagtcagtaccgcagtgtttatccaaaactcaacagaagtcaagagaactgaataatgttcacacagcagtgcgtagcttgcagctccatctgaaagcattactgaatgaggtaataattcttgaagatgaacttgaaaagcttgtttgtactaaagaaacacaagaactagtgtcagaggcttatcccatcctagaacagaaattaaagttgattcagccccacgttcaagcaagcaacaattgctgggaagaggccatttctcaggtcgacaaactgctacgaagaaatacagataaaaaaggcaagcctgaaatagcatgtgaaaacccacattgtacagtagtacctttgaagcagcctactctacacattgcagacaaagatccaatcccagaggagcaggaattagaagcttatgtagatgatatagatattgatagtgatttcagaaaggatgatttttattacttgtctcaagaagacaaagagagacagaagcgtgagcatgaagaatccaagagggtgctccaagaattaaaatctgtgctgggatttaaagcttcagaggcagaaaggcagaagtggaagcaacttctatttagtgatcatgccgtgttgaaatccttgtctcctgtagacccagtggaacccataagtaattcagaaccatcaatgaattcagatatgggaaaagtcagtaaaaatgatactgaagaggaaagtaataaatccgccacaacagacaatgaaataagtaggactgagtatttatgtgaaaactctctagaaggtaaaaataaagataattcttcaaatgaagtcttcccccaaggagcagaagaaagaatgtgttaccaatgtgagagtgaagatgaaccacaagcagatggaagtggtctgaccactgcccctccaactcccagggactcattacagccctccattaagcagaggctggcacggctacagctgtcaccagattttaccttcactgctggccttgctgcagaagtggctgctagatctctctcctttaccaccatgcaggaacagacttttggtgatgaggaggaagaacaaataatagaagaaaataaaaatgagatagaagaaaagtaagaaccaagattcatatgaagtgatattagattgttccttttacaaaagtgtttagcttcaagactggaaagggaatatgagtgtaagtttactatatataaagctaagatgtggatttacaggaagaaccctggtttgaataactgatctgaaattagtagttacctgtaaatggcagatcttttaggaaaataagagaaaggtaagggctcttttgaataaactgctgttttatttgtggcacaactgatcaatcttggaaattctttaagtatttttaataagaaatgaattatcatttcttgccagaatttgctaccttaaggtgattgggaaaattctgttgcaagaacattaacatttagtatgactcctttttactgtattcttgcagttaataactgcagctattatgttaataacaagttgtttgtattttatttttgtttataccagtcttaaagatccaggttctgaataaaaaaattaattgatacaa

SEQ ID NO: 451803 - DNA, 4886 bp, Homo sapiens
  misc_feature (328)..(328): n is a, c, g, or t
  misc_feature (396)..(396): n is a, c, g, or t
  misc_feature (467)..(467): n is a, c, g, or t
ccagttcggtaggagagaaagcccccgcagcgcccacagtccgtcccccgccccgcgcgcagcctgagcgccacacaaaggacgcggccgactctagcgaccctgcggcgctcccgggcgcgagccgccggggtcgggcgggcgagcactagcaccgccccgcagagcggcaggctgacagccaggcgcgggcacgagcagtgctctcttcggctccgctggcgcgtgcccttctcgggctccaaaaatcagcagtgctccgggcgccccctgctagtcgcggccgtaaaaggcagacaaaagccctagcctctccaatcggagggcntcgcttcaggtctcccgcctctcctcttacacgctcactttcttctccaataagcgggctcgaaaagnggggcggtgaccggcgaggaatattgggaattgtagttttttggacccacgggacggcagagctggagctncgtgccgcctgtactcccgccttcatttcccatcgtgctgaggcgggtggcatggcggagaaggatgacaccggagtttgacgaagaggtggtttttgagaattctccactttaccaatacttacaggatctgggacacacagactttgaaatatgttcttctttgtcaccaaaaacagaaaaatgcacaacagagggacaacaaaagcctcctacaagagtcctaccaaaatacctgggatatagtaatcactcaatgaatataaactgcacttactggcatgctcaaggaatgggctattaagcaaggtatcctgttaaaagtggctgaaaccatcaaaagttggatttttttttctcagtgcaataagaaagatgacttacttcacaagttggatattggattccgactcgactcattacataccatcctgcaacaggaagtcctgttacaagaggatgtggagctgattgagctacttgatcccagtatcctgtctgcagggcaatctcaacaacaggaaaatggacaccttccaacactttgctccctggcaacccctaatatttgggatctctcaatgctatttgccttcattagcttgctcgttatgcttcccacttggtggattgtgtcttcctggctggtatggggagtgattctatttgtgtatctggtcataagagctttgagattatggaggacagccaaactacaagtgaccctaaaaaaatacagcgttcatttggaagatatggccacaaacagccgagcttttactaacctcgtgagaaaagctttacgtctcattcaagaaaccgaagtgatttccagaggatttacactggtcagtgctgcttgcccatttaataaagctggacagcatccaagtcagcatctcatcggtcttcggaaagctgtctaccgaactctaagagccaacttccaagcagcaaggctagctaccctatatatgctgaaaaactaccccctgaactctgagagtgacaatgtaaccaactacatctgtgtggtgccttttaaagagctgggccttggacttagtgaagagcagatttcagaagaggaagcacataactttacagatggcttcagcctgcctgcattgaaggttttgttccaactctgggtggcacagagttcagagttcttcagacggttagccctattactttctacagccaattcacctcctgggcccttacttactccagcacttctgcctcatcgtatcttatctgatgtgactcaaggtctacctcatgctcattctgcctgtttggaagagcttaagcgcagctatgagttctatcggtactttgaaactcagcaccagtcagtaccgcagtgtttatccaaaactcaacagaagtcaagagaactgaataatgttcacacagcagtgcgtagcttgcagctccatctgaaagcattactgaatgaggtaataattcttgaagatgaacttgaaaagcttgtttgtactaaagaaacacaagaactagtgtcagaggcttatcccatcctagaacagaaattaaagttgattcagccccacgttcaagcaagcaacaattgctgggaagaggccatttctcaggtcgacaaactgctacgaagaaatacagataaaaaaggcaagcctgaaatagcatgtgaaaacccacattgtacagtagtacctttgaagcagcctactctacacattgcagacaaagatccaatcccagaggagcaggaattagaagcttatgtagatgatatagatattgatagtgatttcagaaaggatgatttttattacttgtctcaagaagacaaagagagacagaagcgtgagcatgaagaatccaagagggtgctccaagaattaaaatctgtgctgggatttaaagcttcagaggcagaaaggcagaagtggaagcaacttctatttagtgatcatggggtaaagtccgcatggaattagagggggaaagtctgcactggaacctgctgtggccattttttttctgttgttgctgcttctctagtggagttactgcagcttagggatggttcctggaagtggacacattttacaaaaacgttttttaaatacacgccagctcttcgagaagcacttttttccttccgtcatgcttcatactatattgtattgtactaacccctcatgctgggatgagcgactgcctagcaagcaacccactgcctactaacatcaagaggggctaaataaaactgcattttccttgcaaggacaacttctaccgtatgaatatatattatatttatgtattatattttgtacaatagttgatcttgaatgcagacttcatttgtatttttcgtggtactacaaaatgtgtagaagttatggcttttctttcattagggtcttgttaggtggttggcaagtaagttaaattgtatgttgcatttttttccatgctgttttaacttgtaaatatatatgtatacatgtggaagatattattattatctagattactttaagccttttatctgatgtattatcagtgaaaaccatgctgcttattccctaatacaatggttctcaaactttagtgtgtatcagaatcaagatgagggcttgtaaaatatagctggtccctactcccagagtttccatttcaggaggtctgggatcaggcccaagaatttgcatttttaacaaattcctaggtgataactgataatgttggttcagggaacacactttcagaaccactgctttaatattttaaataagataatatgtgaggtgtcataaaaaccttcatcaaatccctatctcatttcatttcttaggcattttctctcttataaagtttcctggatttataaattttcattgattttactagaaagttttatttagcttttatttatttattgttctttttaagaaaaaaactgagagtttgaattaaaagtttaaatcattgctaggtccttagttattttttttcttttttctttttttttatttgaagccgtgttgaaatccttgtctcctgtagacccagtggaacccataagtaattcagaaccatcaatgaattcagatatgggaaaagtcagtaaaaatgatactgaagaggaaagtaataaatccgccacaacagacaatgaaataagtaggactgagtatttatgtgaaaactctctagaaggtaaaaataaagataattcttcaaatgaagtcttcccccaaggagcagaagaaagaatgtgttaccaatgtgagagtgaagatgaaccacaagcagatggaagtggtctgaccactgcccctccaactcccagggactcattacagccctccattaagcagaggctggcacggctacagctgtcaccagattttaccttcactgctggccttgctgcagaagtggctgctagatctctctcctttaccaccatgcaggaacagacttttggtgatgaggaggaagaacaaataatagaagaaaataaaaatgagatagaagaaaagtaagaaccaagattcatatgaagtgatattagattgttccttttacaaaagtgtttagcttcaagactggaaagggaatatgagtgtaagtttactatatataaagctaagatgtggatttacaggaagaaccctggtttgaataactgatctgaaattagtagttacctgtaaatggcagatcttttaggaaaataagagaaaggtaagggctcttttgaataaactgctgttttatttgtggcacaactgatcaatcttggaaattctttaagtatttttaataagaaatgaattatcatttcttgccagaatttgctaccttaaggtgattgggaaaattctgttgcaagaacattaacatttagtatgactcctttttactgtattcttgcagttaataactgcagctattatgttaataacaagttgtttgtattttatttttgtttataccagtcttaaagatccaggttctgaataaaaaaattaattgatacaaaaaaaaaaaaaaaaaaaaaaaaaccacaaacaaaaaacaaaacaaaaaaaaaaacaaaaacaaaaaaacaacccccacaaacacgacgcaccccccccacccgcgcccgccgccccacctcctgccccgacgtgaccaacgaggtcgcaccccctctgctgaccgcaacaactcccctccatctcccgactttcctctcacaccgcccgccgcccccgacaagacatcccatgcacagcatcatccccccgctcctcctctccgccgccacaccccccatcgcccaaccaccagaccccccacgcccacaccatccggcacaccaccgtccaacacgcttatccaccacgtactcccacgcttccaccacaa

SEQ ID NO: 451804 - DNA, 2503 bp, Homo sapiens
  misc_feature (328)..(328): n is a, c, g, or t
  misc_feature (396)..(396): n is a, c, g, or t
  misc_feature (467)..(467): n is a, c, g, or t
  misc_feature (2465)..(2465): n is a, c, g, or t
ccagttcggtaggagagaaagcccccgcagcgcccacagtccgtcccccgccccgcgcgcagcctgagcgccacacaaaggacgcggccgactctagcgaccctgcggcgctcccgggcgcgagccgccggggtcgggcgggcgagcactagcaccgccccgcagagcggcaggctgacagccaggcgcgggcacgagcagtgctctcttcggctccgctggcgcgtgcccttctcgggctccaaaaatcagcagtgctccgggcgccccctgctagtcgcggccgtaaaaggcagacaaaagccctagcctctccaatcggagggcntcgcttcaggtctcccgcctctcctcttacacgctcactttcttctccaataagcgggctcgaaaagnggggcggtgaccggcgaggaatattgggaattgtagttttttggacccacgggacggcagagctggagctncgtgccgcctgtactcccgccttcatttcccatcgtgctgaggcgggtggcatggcggagaaggatgacaccggagtttgacgaagaggtggtttttgagaattctccactttaccaatacttacaggatctgggacacacagactttgaaatatgttcttctttgtcaccaaaaacagaaaaatgcacaacagagggacaacaaaagcctcctacaagagtcctaccaaaatacctgggatatagtaatcactcaatgaatataaactgcacttactggcatgctcaaggaatgggctattaagcaaggtatcctgttaaaagtggctgaaaccatcaaaagttggatttttttttctcagtgcaataagaaagatgacttacttcacaagttggatattggattccgactcgactcattacataccatcctgcaacaggaagtcctgttacaagaggatgtggagctgattgagctacttgatcccagtatcctgtctgcagggcaatctcaacaacaggaaaatggacaccttccaacactttgctccctggcaacccctaatatttgggatctctcaatgctatttgccttcattagcttgctcgttatgcttcccacttggtggattgtgtcttcctggctggtatggggagtgattctatttgtgtatctggtcataagagctttgagattatggaggacagccaaactacaagtgaccctaaaaaaatacagcgttcatttggaagatatggccacaaacagccgagcttttactaacctcgtgagaaaagctttacgtctcattcaagaaaccgaagtgatttccagaggatttacactggtcagtgctgcttgcccatttaataaagctggacagcatccaagtcagcatctcatcggtcttcggaaagctgtctaccgaactctaagagccaacttccaagcagcaaggctagctaccctatatatgctgaaaaactaccccctgaactctgagagtgacaatgtaaccaactacatctgtgtggtgccttttaaagagctgggccttggacttagtgaagagcagatttcagaagaggaagcacataactttacagatggcttcagcctgcctgcattgaaggttttgttccaactctgggtggcacagagttcagagttcttcagacggttagccctattactttctacagccaattcacctcctgggcccttacttactccagcacttctgcctcatcgtatcttatctgatgtgactcaaggtctacctcatgctcattctgcctgtttggaagagcttaagcgcagctatgagttctatcggtactttgaaactcagcaccagtcagtaccgcagtgtttatccaaaactcaacagaagtcaagagaactgaataatgttcacacagcagtgcgtagcttgcagctccatctgaaagcattactgaatgaggtaataattcttgaagatgaacttgaaaagcttgtttgtactaaagaaacacaagaactagtgtcagaggcttatcccatcctagaacagaaattaaagttgattcagccccacgttcaagcaagcaacaattgctgggaagaggccatttctcaggtcgacaaactgctacgaagaaatacagataaaaaaggcaagcctgaaatagcatgtgaaaacccacattgtacagtagtacctttgaagcagcctactctacacattgcagacaaagatccaatcccagaggagcaggaattagaagcttatgtagatgatatagatattgatagtgatttcagaaaggatgatttttattacttgtctcaagaagacaaagagagacagaagcgtgagcatgaagaatccaagagggtgctccaagaattaaaatctgtgctgggatttaaagcttcagaggcagaaaggcagaagtggaagcaacttctatttagtgatcatgccgtgttgaaatccttgtctcctgtagacnctgtggaattttcactttgggctagcccaaagtgaaaa

SEQ ID NO: 451805 - DNA, 1620 bp, Homo sapiens
aactctatatagggagttcaactggtcacccagagctgtcctgtggcctctgcagctcagcatggctagggtactgggagcacccgttgcactggggttgtggagcctatgctggtctctggccattgccacccctcttcctccgactagtgcccatgggaatgttgctgaaggcgagaccaagccagacccagacgtgactgaacgctgctcagatggctggagctttgatgctaccaccctggatgacaatggaaccatgctgttttttaaaggggagtttgtgtggaagagtcacaaatgggaccgggagttaatctcagagagatggaagaatttccccagccctgtggatgctgcattccgtcaaggtcacaacagtgtctttctgatcaagggggacaaagtctgggtataccctcctgaaaagaaggagaaaggatacccaaagttgctccaagatgaatttcctggaatcccatccccactggatgcagctgtggaatgtcaccgtggagaatgtcaagctgaaggcgtcctcttcttccaaggtgaccgcgagtggttctgggacttggctacgggaaccatgaaggagcgttcctggccagctgttgggaactgctcctctgccctgagatggctgggccgctactactgcttccagggtaaccaattcctgcgcttcgaccctgtcaggggagaggtgcctcccaggtacccgcgggatgtccgagactacttcatgccctgccctggcagaggccatggacacaggaatgggactggccatgggaacagtacccaccatggccctgagtatatgcgctgtagcccacatctagtcttgtctgcactgacgtctgacaaccatggtgccacctatgccttcagtgggacccactactggcgtctggacaccagccgggatggctggcatagctggcccattgctcatcagtggccccagggtccttcagcagtggatgctgccttttcctgggaagaaaaactctatctggtccagggcacccaggtatatgtcttcctgacaaagggaggctataccctagtaagcggttatccgaagcggctggagaaggaagtcgggacccctcatgggattatcctggactctgtggatgcggcctttatctgccctgggtcttctcggctccatatcatggcaggacggcggctgtggtggctggacctgaagtcaggagcccaagccacgtggacagagcttccttggccccatgagaaggtagacggagccttgtgtatggaaaagtcccttggccctaactcatgttccgccaatggtcccggcttgtacctcatccatggtcccaatttgtactgctacagtgatgtggagaaactgaatgcagccaaggcccttccgcaaccccagaatgtgaccagtctcctgggctgcactcactgaggggccttctgacatgagtctggcctggccccacctcctagttcctcataataaagacagattgcttcttcgcttctcactgaggggccttctgacatgagtctggcctggccccacctccccagtttctcataataaagacagattgcttcttcacttgaatcaaggga

SEQ ID NO: 451806 - DNA, 1566 bp, Homo sapiens
aactctatatagggagttcaactggtcacccagagctgtcctgtggcctctgcagctcagcatggctagggtactgggagcacccgttgcactggggttgtggagcctatgctggtctctggccattgccacccctcttcctccgactagtgcccatgggaatgttgctgaaggcgagaccaagccagacccagacgtgactgaacgctgctcagatggctggagctttgatgctaccaccctggatgacaatggaaccatgctgttttttaaaggggagtttgtgtggaagagtcacaaatgggaccgggagttaatctcagagagatggaagaatttccccagccctgtggatgctgcattccgtcaaggtcacaacagtgtctttctgatcaagggggacaaagtctgggtataccctcctgcatccccactggatgcagctgtggaatgtcaccgtggagaatgtcaagctgaaggcgtcctcttcttccaaggtgaccgcgagtggttctgggacttggctacgggaaccatgaaggagcgttcctggccagctgttgggaactgctcctctgccctgagatggctgggccgctactactgcttccagggtaaccaattcctgcgcttcgaccctgtcaggggagaggtgcctcccaggtacccgcgggatgtccgagactacttcatgccctgccctggcagaggccatggacacaggaatgggactggccatgggaacagtacccaccatggccctgagtatatgcgctgtagcccacatctagtcttgtctgcactgacgtctgacaaccatggtgccacctatgccttcagtgggacccactactggcgtctggacaccagccgggatggctggcatagctggcccattgctcatcagtggccccagggtccttcagcagtggatgctgccttttcctgggaagaaaaactctatctggtccagggcacccaggtatatgtcttcctgacaaagggaggctataccctagtaagcggttatccgaagcggctggagaaggaagtcgggacccctcatgggattatcctggactctgtggatgcggcctttatctgccctgggtcttctcggctccatatcatggcaggacggcggctgtggtggctggacctgaagtcaggagcccaagccacgtggacagagcttccttggccccatgagaaggtagacggagccttgtgtatggaaaagtcccttggccctaactcatgttccgccaatggtcccggcttgtacctcatccatggtcccaatttgtactgctacagtgatgtggagaaactgaatgcagccaaggcccttccgcaaccccagaatgtgaccagtctcctgggctgcactcactgaggggccttctgacatgagtctggcctggccccacctcctagttcctcataataaagacagattgcttcttcgcttctcactgaggggccttctgacatgagtctggcctggccccacctccccagtttctcataataaagacagattgcttcttcacttgaatcaaggga

SEQ ID NO: 451807 - DNA, 1667 bp, Homo sapiens
aactctatatagggagttcaactggtcacccagagctgtcctgtggcctctgcagctcagcatggctagggtactgggagcacccgttgcactggggttgtggagcctatgctggtctctggccattgccacccctcttcctccgtgagtaaagctgggactagaagcgaaggattgagttctgggctagggactagtgcccatgggaatgttgctgaaggcgagaccaagccagacccagacgtgactgaacgctgctcagatggctggagctttgatgctaccaccctggatgacaatggaaccatgctgttttttaaaggggagtttgtgtggaagagtcacaaatgggaccgggagttaatctcagagagatggaagaatttccccagccctgtggatgctgcattccgtcaaggtcacaacagtgtctttctgatcaagggggacaaagtctgggtataccctcctgaaaagaaggagaaaggatacccaaagttgctccaagatgaatttcctggaatcccatccccactggatgcagctgtggaatgtcaccgtggagaatgtcaagctgaaggcgtcctcttcttccaaggtgaccgcgagtggttctgggacttggctacgggaaccatgaaggagcgttcctggccagctgttgggaactgctcctctgccctgagatggctgggccgctactactgcttccagggtaaccaattcctgcgcttcgaccctgtcaggggagaggtgcctcccaggtacccgcgggatgtccgagactacttcatgccctgccctggcagaggccatggacacaggaatgggactggccatgggaacagtacccaccatggccctgagtatatgcgctgtagcccacatctagtcttgtctgcactgacgtctgacaaccatggtgccacctatgccttcagtgggacccactactggcgtctggacaccagccgggatggctggcatagctggcccattgctcatcagtggccccagggtccttcagcagtggatgctgccttttcctgggaagaaaaactctatctggtccagggcacccaggtatatgtcttcctgacaaagggaggctataccctagtaagcggttatccgaagcggctggagaaggaagtcgggacccctcatgggattatcctggactctgtggatgcggcctttatctgccctgggtcttctcggctccatatcatggcaggacggcggctgtggtggctggacctgaagtcaggagcccaagccacgtggacagagcttccttggccccatgagaaggtagacggagccttgtgtatggaaaagtcccttggccctaactcatgttccgccaatggtcccggcttgtacctcatccatggtcccaatttgtactgctacagtgatgtggagaaactgaatgcagccaaggcccttccgcaaccccagaatgtgaccagtctcctgggctgcactcactgaggggccttctgacatgagtctggcctggccccacctcctagttcctcataataaagacagattgcttcttcgcttctcactgaggggccttctgacatgagtctggcctggccccacctccccagtttctcataataaagacagattgcttcttcacttgaatcaaggga

SEQ ID NO: 451808 - DNA, 2193 bp, Homo sapiens
aactctatatagggagttcaactggtcacccagagctgtcctgtggcctctgcagctcagcatggctagggtactgggagcacccgttgcactggggttgtggagcctatgctggtctctggccattgccacccctcttcctccgactagtgcccatgggaatgttgctgaaggcgagaccaagccagacccagacgtgactgaacgctgctcagatggctggagctttgatgctaccaccctggatgacaatggaaccatgctgttttttaaaggggagtttgtgtggaagagtcacaaatgggaccgggagttaatctcagagagatggaagaatttccccagccctgtggatgctgcattccgtcaaggtcacaacagtgtctttctgatcaagggggacaaagtctgggtataccctcctgaaaagaaggagaaaggatacccaaagttgctccaagatgaatttcctggaatcccatccccactggatgcagctgtggaatgtcaccgtggagaatgtcaagctgaaggcgtcctcttcttccaaggtgaccgcgagtggttctgggacttggctacgggaaccatgaaggagcgttcctggccagctgttgggaactgctcctctgccctgagatggctgggccgctactactgcttccagggtaaccaattcctgcgcttcgaccctgtcaggggagaggtgcctcccaggtacccgcgggatgtccgagactacttcatgccctgccctggcagaggccatggacacaggaatgggactggccatgggaacagtacccaccatggccctgagtatatgcgctgtagcccacatctagtcttgtctgcactgacgtctgacaaccatggtgccacctatgccttcagtgggacccactactggcgtctggacaccagccgggatggctggcatagctggcccattgctcatcagtggccccagggtccttcagcagtggatgctgccttttcctgggaagaaaaactctatctggtccagggcacccaggtatatgtcttcctgacaaagggaggctataccctagtaagcggttatccgaagcggctggagaaggaagtcgggacccctcatgggattatcctggactctgtggatgcggcctttatctgccctgggtcttctcggctccatatcatggcaggacggcggctgtggtggctggacctgaagtcaggagcccaagccacgtggacagagcttccttggccccatgagaaggtagacggagccttgtgtatggaaaagtcccttggccctaactcatgttccgccaatggtcccggcttgtacctcatccatggtcccaatttgtactgctacagtgatgtggagaaactgaatgcagccaaggcccttccgcaaccccagaatgtgaccagtctcctgggctgcactcactgaggggccttctgacatgagtctggcctggccccacctcctagttcctcataataaagacagattgcttcttcgcttctcactgaggggccttctgacatgagtctggcctggccccacctccccagtttctcataataaagacagattgcttcttcacttgaatcaagggaaaaaaaaaaaaaaagcacactccaaaaatttgagcgcagaaaaaaaaaaaaaaaaaaaaaaaaaaaaaaaaaacaacaaaaaaaaaaaaaaaaaacccacaaaaaaaaaaaaaaaaaaaaaaacccccccccccccccgggtttttttttttttttttttgggccggccccatttaaaaaagggggctaaaaatggaaattggaaaaaaaaaattccttttaaaaaaaaataaccttttaaaaaggaaatttttccttttctgggaaaaaaaatctaaaattttttaaaaaacggccaattttttttccgccgaaataaaaaaaagaaaaggggcacacaaaattttttgcgccccctagaaggccccaaagggggggatgggtccccccgttttaaaaaaaaaaaaaagggccctcgggtttttttttttttccccaccccaaaaacttttaaaaaaaaaaaaacccacccttttttgtgccccggtttgaccccccttaagattctcaaaaaaaaagagaaattttgcccccctaaacatttaaaaggacacttttaattttttgtaaaaa

SEQ ID NO: 451809 - DNA, 1332 bp, Homo sapiens
aactctatatagggagttcaactggtcacccagagctgtcctgtggcctctgcagctcagcatggctagggtactgggagcacccgttgcactggggttgtggagcctatgctggtctctggccattgccacccctcttcctccgactagtgcccatgggaatgttgctgaaggcgagaccaagccagacccagacgtgactgaacgctgctcagatggctggagctttgatgctaccaccctggatgacaatggaaccatgctgttttttaaaggggagtttgtgtggaagagtcacaaatgggaccgggagttaatctcagagagatggaagaatttccccagccctgtggatgctgcattccgtcaaggtcacaacagtgtctttctgatcaagggggacaaagtctgggtataccctcctgaaaagaaggagaaaggatacccaaagttgctccaagatgaatttcctggaatcccatccccactggatgcagctgtggaatgtcaccgtggagaatgtcaagctgaaggcgtcctcttcttccaaggtcagtccaggctggaatccaagaacctggagtagtggtgggttggtagtgatgccaggacccactactggcgtctggacaccagccgggatggctggcatagctggcccattgctcatcagtggccccagggtccttcagcagtggatgctgccttttcctgggaagaaaaactctatctggtccagggcacccaggtatatgtcttcctgacaaagggaggctataccctagtaagcggttatccgaagcggctggagaaggaagtcgggacccctcatgggattatcctggactctgtggatgcggcctttatctgccctgggtcttctcggctccatatcatggcaggacggcggctgtggtggctggacctgaagtcaggagcccaagccacgtggacagagcttccttggccccatgagaaggtagacggagccttgtgtatggaaaagtcccttggccctaactcatgttccgccaatggtcccggcttgtacctcatccatggtcccaatttgtactgctacagtgatgtggagaaactgaatgcagccaaggcccttccgcaaccccagaatgtgaccagtctcctgggctgcactcactgaggggccttctgacatgagtctggcctggccccacctcctagttcctcataataaagacagattgcttcttcgcttctcactgaggggccttctgacatgagtctggcctggccccacctccccagtttctcataataaagacagattgcttcttcacttgaatcaaggga

SEQ ID NO: 451810 - DNA, 2096 bp, Homo sapiens
aactctatatagggagttcaactggtcacccagagctgtcctgtggcctctgcagctcagcatggctagggtactgggagcacccgttgcactggggttgtggagcctatgctggtctctggccattgccacccctcttcctccgactagtgcccatgggaatgttgctgaaggcgagaccaagccagacccagacgtgactgaacgctgctcagatggctggagctttgatgctaccaccctggatgacaatggaaccatgctgttttttaaaggggagtttgtgtggaagagtcacaaatgggaccgggagttaatctcagagagatggaagaatttccccagccctgtggatgctgcattccgtcaaggtcacaacagtgtctttctgatcaagggggacaaagtctgggtataccctcctgaaaagaaggagaaaggatacccaaagttgctccaagatgaatttcctggaatcccatccccactggatgcagctgtggaatgtcaccgtggagaatgtcaagctgaaggcgtcctcttcttccaaggtgaccgcgagtggttctgggacttggctacgggaaccatgaaggagcgttcctggccagctgttgggaactgctcctctgccctgagatggctgggccgctactactgcttccagggtaaccaattcctgcgcttcgaccctgtcaggggagaggtgcctcccaggtacccgcgggatgtccgagactacttcatgccctgccctggcagaggccatggacacaggaatgggactggccatgggaacagtacccaccatggccctgagtatatgcgctgtagcccacatctagtcttgtctgcactgacgtctgacaaccatggtgccacctatgccttcagtgggacccactactggcgtctggacaccagccgggatggctggcatagctggcccattgctcatcagtggccccagggtccttcagcagtggatgctgccttttcctgggaagaaaaactctatctggtccagggcacccaggtatatgtcttcctgacaaagggaggctataccctagtaagcggttatccgaagcggctggagaaggaagtcgggacccctcatgggattatcctggactctgtggatgcggcctttatctgccctgggtcttctcggctccatatcatggcaggacggcggctgtggtggctggacctgaagtcaggagcccaagccacgtggacagagcttccttggccccatgagaaggtagacgtgatgtggagaaactgaatgcagccaaggcccttccgcaaccccagaatgtgaccagtctcctgggctgcactcactgaggggccttctgacatgagtctggcctggccccacctcctagttcctcataataaagacagattgcttcttcgcttctcactgaggggccttctgacatgagtctggcctggccccacctccccagtttctcataataaagacagattgcttcttcacttgaatcaagggaaaaaaaaaaaaaaagcacactccaaaaatttgagcgcagaaaaaaaaaaaaaaaaaaaaaaaaaaaaaaaaaacaacaaaaaaaaaaaaaaaaaacccacaaaaaaaaaaaaaaaaaaaaaaacccccccccccccccgggtttttttttttttttttttgggccggccccatttaaaaaagggggctaaaaatggaaattggaaaaaaaaaattccttttaaaaaaaaataaccttttaaaaaggaaatttttccttttctgggaaaaaaaatctaaaattttttaaaaaacggccaattttttttccgccgaaataaaaaaaagaaaaggggcacacaaaattttttgcgccccctagaaggccccaaagggggggatgggtccccccgttttaaaaaaaaaaaaaagggccctcgggtttttttttttttccccaccccaaaaacttttaaaaaaaaaaaaacccacccttttttgtgccccggtttgaccccccttaagattctcaaaaaaaaagagaaattttgcccccctaaacatttaaaaggacacttttaattttttgtaaaaa

SEQ ID NO: 451811 - DNA, 2058 bp, Homo sapiens
aactctatatagggagttcaactggtcacccagagctgtcctgtggcctctgcagctcagcatggctagggtactgggagcacccgttgcactggggttgtggagcctatgctggtctctggccattgccacccctcttcctccgactagtgcccatgggaatgttgctgaaggcgagaccaagccagacccagacgtgactgaacgctgctcagatggctggagctttgatgctaccaccctggatgacaatggaaccatgctgttttttaaaggggagtttgtgtggaagagtcacaaatgggaccgggagttaatctcagagagatggaagaatttccccagccctgtggatgctgcattccgtcaaggtcacaacagtgtctttctgatcaagggggacaaagtctgggtataccctcctgaaaagaaggagaaaggatacccaaagttgctccaagatgaatttcctggaatcccatccccactggatgcagctgtggaatgtcaccgtggagaatgtcaagctgaaggcgtcctcttcttccaaggtgaccgcgagtggttctgggacttggctacgggaaccatgaaggagcgttcctggccagctgttgggaactgctcctctgccctgagatggctgggccgctactactgcttccagggtaaccaattcctgcgcttcgaccctgtcaggggagaggtgcctcccaggtacccgcgggatgtccgagactacttcatgccctgccctggcagaggccatggacacaggaatgggactggccatgggaacagtacccaccatggccctgagtatatgcgctgtagcccacatctagtcttgtctgcactgacgtctgacaaccatggtgccacctatgccttcagtgggacccactactggcgtctggacaccagccgggatggctggcatagctggcccattgctcatcagtggccccagggtccttcagcagtggatgctgccttttcctgggaagaaaaactctatctggtccagtaccctagtaagcggttatccgaagcggctggagaaggaagtcgggacccctcatgggattatcctggactctgtggatgcggcctttatctgccctgggtcttctcggctccatatcatggcaggacggcggctgtggtggctggacctgaagtcaggagcccaagccacgtggacagagcttccttggccccatgagaaggtagacgtgatgtggagaaactgaatgcagccaaggcccttccgcaaccccagaatgtgaccagtctcctgggctgcactcactgaggggccttctgacatgagtctggcctggccccacctcctagttcctcataataaagacagattgcttcttcgcttctcactgaggggccttctgacatgagtctggcctggccccacctccccagtttctcataataaagacagattgcttcttcacttgaatcaagggaaaaaaaaaaaaaaagcacactccaaaaatttgagcgcagaaaaaaaaaaaaaaaaaaaaaaaaaaaaaaaaaacaacaaaaaaaaaaaaaaaaaacccacaaaaaaaaaaaaaaaaaaaaaaacccccccccccccccgggtttttttttttttttttttgggccggccccatttaaaaaagggggctaaaaatggaaattggaaaaaaaaaattccttttaaaaaaaaataaccttttaaaaaggaaatttttccttttctgggaaaaaaaatctaaaattttttaaaaaacggccaattttttttccgccgaaataaaaaaaagaaaaggggcacacaaaattttttgcgccccctagaaggccccaaagggggggatgggtccccccgttttaaaaaaaaaaaaaagggccctcgggtttttttttttttccccaccccaaaaacttttaaaaaaaaaaaaacccacccttttttgtgccccggtttgaccccccttaagattctcaaaaaaaaagagaaattttgcccccctaaacatttaaaaggacacttttaattttttgtaaaaa

SEQ ID NO: 451812 - DNA, 1884 bp, Homo sapiens
aatgaatgatatcagtcagagtagggaagggaaaagaggcttcaagaatgactcagctttcgtggactcagcaactgagtggctggtggttttgttttctaaaattgggaaagactagggagtgtgtgtgttggtggggggcagaaatcagtttgggcatattaggttttgggtgcctattggcaccccataagcatgtcaggtaggcagctgatttggagcctaaacctcaaaggagaggtcagtcagagctgacgagaacagattggaagtcatcagcatatagatggcatttaaagcccctggactaggtgagattaccaaggaagtgaaggtagagagagaagagaagaggcccaaagtaggggattccaatatttagatatcaggttgaagaaaagagtagtcaaaaaagataagaggaatactgggagagtcaggtgtcacagaagccaagttccaaaaaaagacatttaaaggagaaggaagtagtgagcagtccagtgctcctgagaggtagggtcagatgagaacagagaattgaccatgagatttcgcaaattggagaatactagcaacctggataagaacaatttcaatggttgagggaaacagaagtgtaattgaagaggattgaggaaaaaagacaaatgggagcctagataattccttaataagttgttgtgaaaagaggagaagaaaaacggggtgctagcccagctactccctcactcttccaccacctcatagggagagactggagaacacagccagagtgagaacattcagtagaagtggtgcttcctttttaagttctggacactgtatttcattatctataaccgcatctctgtacatggacacctgaaatccttagggagtgcccgccaaccccatgatgttggccttacctggaaacttagccactgttttccacacttgcctttctttcaggcacctgctgattccagtttcagccagggcacagtgcccaacattgctgaccaagtcttgctctatttctccttctcacctggcctcttccatcttggcctctggatgcattctctccctctcatgactcatttctgcattcatcactagcctcttctctgcctgggcttctgccagcggccctagagcaacctatggtattccacggacccactactggcgtctggacaccagccgggatggctggcatagctggcccattgctcatcagtggccccagggtccttcagcagtggatgctgccttttcctgggaagaaaaactctatctggtccagggcacccaggtatatgtcttcctgacaaagggaggctataccctagtaagcggttatccgaagcggctggagaaggaagtcgggacccctcatgggattatcctggactctgtggatgcggcctttatctgccctgggtcttctcggctccatatcatggcaggacggcggctgtggtggctggacctgaagtcaggagcccaagccacgtggacagagcttccttggccccatgagaaggtagacggagccttgtgtatggaaaagtcccttggccctaactcatgttccgccaatggtcccggcttgtacctcatccatggtcccaatttgtactgctacagtgatgtggagaaactgaatgcagccaaggcccttccgcaaccccagaatgtgaccagtctcctgggctgcactcactgaggggccttctgacatgagtctggcctggccccacctcctagttcctcataataaagacagattgcttcttcgcttctcactgaggggccttctgacatgagtctggcctggccccacctccccagtttctcataataaagacagattgcttcttcacttgaatcaaggga

SEQ ID NO: 451813 - DNA, 883 bp, Homo sapiens
aactctatatagggagttcaactggtcacccagagctgtcctgtggcctctgcagctcagcatggctagggtactgggagcacccgttgcactggggttgtggagcctatgctggtctctggccattgccacccctcttcctccgactagtgcccatgggaatgttgctgaaggcgagaccaagccagacccagacgtgactgaacgctgctcagatggctggagctttgatgctaccaccctggatgacaatggaaccatgctgttttttaaaggggagtttgtgtggaagagtcacaaatgggaccgggagttaatctcagagagatggaagaatttccccagccctgtggatgctgcattccgtcaaggtcacaacagtgtctttctgatcaagggggacaaagtctgggtataccctcctgaaaagaaggagaaaggatacccaaagttgctccaagatgaatttcctggaatcccatccccactggatgcagctgtggaatgtcaccgtggagaatgtcaagctgaaggcgtcctcttcttccaaggtcagtccaggctggaatccaagaacctggagtagtggtgggttggtagtgatgccagtagtgatggtgatagtggtagtgatggtggtggtggagccactatgtggctttttaaggaagggaaatagagaagccacgtatggtctagaggtcacgtgagggaaggagaggaagtcattctggtgaaggcaactgtgtgtaattctgtgtgaatagtccctcattgttccccatgacccttaggacaaatctaccctctttagtcttacatacaagtctctccatggccaaatccctattggcccttcagctttgacttttattatactttt

SEQ ID NO: 451814 - DNA, 1600 bp, Homo sapiens
aactctatatagggagttcaactggtcacccagagctgtcctgtggcctctgcagctcagcatggctagggtactgggagcacccgttgcactggggttgtggagcctatgctggtctctggccattgccacccctcttcctccgactagtgcccatgggaatgttgctgaaggcgagaccaagccagacccagacgtgactgaacgctgctcagatggctggagctttgatgctaccaccctggatgacaatggaaccatgctgttttttaaaggggagtttgtgtggaagagtcacaaatgggaccgggagttaatctcagagagatggaagaatttccccagccctgtggatgctgcattccgtcaaggtcacaacagtgtctttctgatcaagggggacaaagtctgggtataccctcctgaaaagaaggagaaaggatacccaaagttgctccaagatgaatttcctggaatcccatccccactggatgcagctgtggaatgtcaccgtggagaatgtcaagctgaaggcgtcctcttcttccaaggtgaccgcgagtggttctgggacttggctacgggaaccatgaaggagcgttcctggccagctgttgggaactgctcctctgccctgagatggctgggccgctactactgcttccagggtaaccaattcctgcgcttcgaccctgtcaggggagaggtgcctcccaggtacccgcgggatgtccgagactacttcatgccctgccctggcagaggccatggacacaggaatgggactggccatgggaacatatatgcgctgtagcccacatctagtcttgtctgcactgacgtctgacaaccatggtgccacctatgccttcagtgggacccactactggcgtctggacaccagccgggatggctggcatagctggcccattgctcatcagtggccccagggtccttcagcagtggatgctgccttttcctgggaagaaaaactctatctggtccagggcacccaggtatatgtcttcctgacaaagggaggctataccctagtaagcggttatccgaagcggctggagaaggaagtcgggacccctcatgggattatcctggactctgtggatgcggcctttatctgccctgggtcttctcggctccatatcatggcaggacggcggctgtggtggctggacctgaagtcaggagcccaagccacgtggacagagcttccttggccccatgagaaggtagacggagccttgtgtatggaaaagtcccttggccctaactcatgttccgccaatggtcccggcttgtacctcatccatggtcccaatttgtactgctacagtgatgtggagaaactgaatgcagccaaggcccttccgcaaccccagaatgtgaccagtctcctgggctgcactcactgaggggccttctgacatgagtctggcctggccccacctcctagttcctcataataaagacagattgcttcttcgcttctcactgaggggccttctgacatgagtctggcctggccccacctccccagtttctcataataaagacagattgcttcttcacttgaatcaaggga

SEQ ID NO: 451815 - DNA, 1582 bp, Homo sapiens
aactctatatagggagttcaactggtcacccagagctgtcctgtggcctctgcagctcagcatggctagggtactgggagcacccgttgcactggggttgtggagcctatgctggtctctggccattgccacccctcttcctccgactagtgcccatgggaatgttgctgaaggcgagaccaagccagacccagacgtgactgaacgctgctcagatggctggagctttgatgctaccaccctggatgacaatggaaccatgctgttttttaaaggggagtttgtgtggaagagtcacaaatgggaccgggagttaatctcagagagatggaagaatttccccagccctgtggatgctgcattccgtcaaggtcacaacagtgtctttctgatcaagggggacaaagtctgggtataccctcctgaaaagaaggagaaaggatacccaaagttgctccaagatgaatttcctggaatcccatccccactggatgcagctgtggaatgtcaccgtggagaatgtcaagctgaaggcgtcctcttcttccaaggtgaccgcgagtggttctgggacttggctacgggaaccatgaaggagcgttcctggccagctgttgggaactgctcctctgccctgagatggctgggccgctactactgcttccagggtaaccaattcctgcgcttcgaccctgtcaggggagaggtgcctcccaggtacccgcgggatgtccgagactacttcatgccctgccctggcagaggccatggacacaggaatgggactggccatgggaacagtacccaccatggccctgagtatatgcgctgtagcccacatctagtcttgtctgcactgacgtctgacaaccatggtgccacctatgccttcagtgggacccactactggcgtctggacaccagccgggatggctggcatagctggcccattgctcatcagtggccccagggtccttcagcagtggatgctgccttttcctgggaagaaaaactctatctggtccagtaccctagtaagcggttatccgaagcggctggagaaggaagtcgggacccctcatgggattatcctggactctgtggatgcggcctttatctgccctgggtcttctcggctccatatcatggcaggacggcggctgtggtggctggacctgaagtcaggagcccaagccacgtggacagagcttccttggccccatgagaaggtagacggagccttgtgtatggaaaagtcccttggccctaactcatgttccgccaatggtcccggcttgtacctcatccatggtcccaatttgtactgctacagtgatgtggagaaactgaatgcagccaaggcccttccgcaaccccagaatgtgaccagtctcctgggctgcactcactgaggggccttctgacatgagtctggcctggccccacctcctagttcctcataataaagacagattgcttcttcgcttctcactgaggggccttctgacatgagtctggcctggccccacctccccagtttctcataataaagacagattgcttcttcacttgaatcaaggga

SEQ ID NO: 451816 - DNA, 1882 bp, Homo sapiens
aactctatatagggagttcaactggtcacccagagctgtcctgtggcctctgcagctcagcatggctagggtactgggagcacccgttgcactggggttgtggagcctatgctggtctctggccattgccacccctcttcctccgactagtgcccatgggaatgttgctgaaggcgagaccaagccagacccagacgtgactgaacgctgctcagatggctggagctttgatgctaccaccctggatgacaatggaaccatgctgttttttaaaggggagtttgtgtggaagagtcacaaatgggaccgggagttaatctcagagagatggaagaatttccccagccctgtggatgctgcattccgtcaaggtcacaacagtgtctttctgatcaagggggacaaagtctgggtataccctcctgaaaagaaggagaaaggatacccaaagttgctccaagatgaatttcctggaatcccatccccactggatgcagctgtggaatgtcaccgtggagaatgtcaagctgaaggcgtcctcttcttccaaggtgaccgcgagtggttctgggacttggctacgggaaccatgaaggagcgttcctggccagctgttgggaactgctcctctgccctgagatggctgggccgctactactgcttccagggtaaccaattcctgcgcttcgaccctgtcaggggagaggtgcctcccaggtacccgcgggatgtccgagactacttcatgccctgccctggcagaggtgagaaagccctagcacttgagacctgtcagaattcatccactttccctgagcttgtggatctcacgtgtcctagctctcactttaactccgtgttgcgacaccttggcccttaatctagccccatttccattctggattttcccattgccctcatatggggaaacccacaccccactaaccccagccatctcttccaccttggacctcactctgacctctggcctccttctgtgttctcctcacccatttctctctccaggccatggacacaggaatgggactggccatgggaacagtacccaccatggccctgagtatatgcgctgtagcccacatctagtcttgtctgcactgacgtctgacaaccatggtgccacctatgccttcagtgggacccactactggcgtctggacaccagccgggatggctggcatagctggcccattgctcatcagtggccccagggtccttcagcagtggatgctgccttttcctgggaagaaaaactctatctggtccagggcacccaggtatatgtcttcctgacaaagggaggctataccctagtaagcggttatccgaagcggctggagaaggaagtcgggacccctcatgggattatcctggactctgtggatgcggcctttatctgccctgggtcttctcggctccatatcatggcaggacggcggctgtggtggctggacctgaagtcaggagcccaagccacgtggacagagcttccttggccccatgagaaggtagacggagccttgtgtatggaaaagtcccttggccctaactcatgttccgccaatggtcccggcttgtacctcatccatggtcccaatttgtactgctacagtgatgtggagaaactgaatgcagccaaggcccttccgcaaccccagaatgtgaccagtctcctgggctgcactcactgaggggccttctgacatgagtctggcctggccccacctcctagttcctcataataaagacagattgcttcttcgcttctcactgaggggccttctgacatgagtctggcctggccccacctccccagtttctcataataaagacagattgcttcttcacttgaatcaaggga

SEQ ID NO: 451817 - DNA, 1509 bp, Homo sapiens
gtgacatgttgttccagaggttccggaatgtgtgttttcctgttggaaggaaacttcgcagagtagaaaagggatctgagacttttggactagtgcccatgggaatgttgctgaaggcgagaccaagccagacccagacgtgactgaacgctgctcagatggctggagctttgatgctaccaccctggatgacaatggaaccatgctgttttttaaaggggagtttgtgtggaagagtcacaaatgggaccgggagttaatctcagagagatggaagaatttccccagccctgtggatgctgcattccgtcaaggtcacaacagtgtctttctgatcaagggggacaaagtctgggtataccctcctgcatccccactggatgcagctgtggaatgtcaccgtggagaatgtcaagctgaaggcgtcctcttcttccaaggtgaccgcgagtggttctgggacttggctacgggaaccatgaaggagcgttcctggccagctgttgggaactgctcctctgccctgagatggctgggccgctactactgcttccagggtaaccaattcctgcgcttcgaccctgtcaggggagaggtgcctcccaggtacccgcgggatgtccgagactacttcatgccctgccctggcagaggccatggacacaggaatgggactggccatgggaacagtacccaccatggccctgagtatatgcgctgtagcccacatctagtcttgtctgcactgacgtctgacaaccatggtgccacctatgccttcagtgggacccactactggcgtctggacaccagccgggatggctggcatagctggcccattgctcatcagtggccccagggtccttcagcagtggatgctgccttttcctgggaagaaaaactctatctggtccagggcacccaggtatatgtcttcctgacaaagggaggctataccctagtaagcggttatccgaagcggctggagaaggaagtcgggacccctcatgggattatcctggactctgtggatgcggcctttatctgccctgggtcttctcggctccatatcatggcaggacggcggctgtggtggctggacctgaagtcaggagcccaagccacgtggacagagcttccttggccccatgagaaggtagacggagccttgtgtatggaaaagtcccttggccctaactcatgttccgccaatggtcccggcttgtacctcatccatggtcccaatttgtactgctacagtgatgtggagaaactgaatgcagccaaggcccttccgcaaccccagaatgtgaccagtctcctgggctgcactcactgaggggccttctgacatgagtctggcctggccccacctcctagttcctcataataaagacagattgcttcttcgcttctcactgaggggccttctgacatgagtctggcctggccccacctccccagtttctcataataaagacagattgcttcttcacttgaatcaaggga

SEQ ID NO: 451818 - DNA, 1551 bp, Homo sapiens
aactctatatagggagttcaactggtcacccagagctgtcctgtggcctctgcagctcagcatggctagggtactgggagcacccgttgcactggggttgtggagcctatgctggtctctggccattgccacccctcttcctccgactagtgcccatgggaatgttgctgaaggcgagaccaagccagacccagacgtgactgaacgctgctcagatggctggagctttgatgctaccaccctggatgacaatggaaccatgctgttttttaaaggggagtttgtgtggaagagtcacaaatgggaccgggagttaatctcagagagatggaagaatttccccagccctgtggatgctgcattccgtcaaggtcacaacagtgtctttctgatcaagggggacaaagtctgggtataccctcctgaaaagaaggagaaaggatacccaaagttgctccaagatgaatttcctggaatcccatccccactggatgcagctgtggaatgtcaccgtggagaatgtcaagctgaaggcgtcctcttcttccaaggtgaccgcgagtggttctgggacttggctacgggaaccatgaaggagcgttcctggccagctgttgggaactgctcctctgccctgagatggctgggccgctactactgcttccagggtaaccaattcctgcgcttcgaccctgtcaggggagaggtgcctcccaggtacccgcgggatgtccgagactacttcatgccctgccctggcagaggccatggacacaggaatgggactggccatgggaacagtacccaccatggccctgagtatatgcgctgtagcccacatctagtcttgtctgcactgacgtctgacaaccatggtgccacctatgccttcagtgggacccactactggcgtctggacaccagccgggatggctggcatagctggcccattgctcatcagtggccccagggtccttcagcagtggatgctgccttttcctgggaagaaaaactctatctggtccagggcacccaggtatatgtcttcctgacaaagggaggctataccctagtaagcggttatccgaagcggctggagaaggaagtcgggacccctcatgggattatcctggactctgtggatgcggcctttatctgccctgggtcttctcggctccatatcatggcaggacggcggctgtggtggctggacctgaagtcaggagcccaagccacgtggacagagcttccttggccccatgagaaggtagacgtccatggtcccaatttgtactgctacagtgatgtggagaaactgaatgcagccaaggcccttccgcaaccccagaatgtgaccagtctcctgggctgcactcactgaggggccttctgacatgagtctggcctggccccacctcctagttcctcataataaagacagattgcttcttcgcttctcactgaggggccttctgacatgagtctggcctggccccacctccccagtttctcataataaagacagattgcttcttcacttgaatcaaggga

SEQ ID NO: 451819 - DNA, 1379 bp, Homo sapiens
agggcgtaacccggtctcaccaaatgcctgttgattgattggacaaaggtgaccgcgagtggttctgggacttggctacgggaaccatgaaggagcgttcctggccagctgttgggaactgctcctctgccctgagatggctgggccgctactactgcttccagggtaaccaattcctgcgcttcgaccctgtcaggggagaggtgcctcccaggtacccgcgggatgtccgagactacttcatgccctgccctggcagaggtgagaaagccctagcacttgagacctgtcagaattcatccactttccctgagcttgtggatctcacgtgtcctagctctcactttaactccgtgttgcgacaccttggcccttaatctagccccatttccattctggattttcccattgccctcatatggggaaacccacaccccactaaccccagccatctcttccaccttggacctcactctgacctctggcctccttctgtgttctcctcacccatttctctctccaggccatggacacaggaatgggactggccatgggaacagtacccaccatggccctgagtatatgcgctgtagcccacatctagtcttgtctgcactgacgtctgacaaccatggtgccacctatgccttcagtgggacccactactggcgtctggacaccagccgggatggctggcatagctggcccattgctcatcagtggccccagggtccttcagcagtggatgctgccttttcctgggaagaaaaactctatctggtccagggcacccaggtatatgtcttcctgacaaagggaggctataccctagtaagcggttatccgaagcggctggagaaggaagtcgggacccctcatgggattatcctggactctgtggatgcggcctttatctgccctgggtcttctcggctccatatcatggcaggacggcggctgtggtggctggacctgaagtcaggagcccaagccacgtggacagagcttccttggccccatgagaaggtagacggagccttgtgtatggaaaagtcccttggccctaactcatgttccgccaatggtcccggcttgtacctcatccatggtcccaatttgtactgctacagtgatgtggagaaactgaatgcagccaaggcccttccgcaaccccagaatgtgaccagtctcctgggctgcactcactgaggggccttctgacatgagtctggcctggccccacctcctagttcctcataataaagacagattgcttcttcgcttctcactgaggggccttctgacatgagtctggcctggccccacctccccagtttctcataataaagacagattgcttcttcacttgaatcaaggga

SEQ ID NO: 451820 - DNA, 599 bp, Homo sapiens
aactctatatagggagttcaactggtcacccagagctgtcctgtggcctctgcagctcagcatggctagggtactgggagcacccgttgcactggggttgtggagcctatgctggtctctggccattgccacccctcttcctccgactagtgcccatgggaatgttgctgaaggcgagaccaagccagacccagacgtgactgaacgctgctcagatggctggagctttgatgctaccaccctggatgacaatgagccttgtgtatggaaaagtcccttggccctaactcatgttccgccaatggtcccggcttgtacctcatccatggtcccaatttgtactgctacagtgatgtggagaaactgaatgcagccaaggcccttccgcaaccccagaatgtgaccagtctcctgggctgcactcactgaggggccttctgacatgagtctggcctggccccacctcctagttcctcataataaagacagattgcttcttcgcttctcactgaggggccttctgacatgagtctggcctggccccacctccccagtttctcataataaagacagattgcttcttcacttgaatcaaggga

SEQ ID NO: 451821 - DNA, 803 bp, Homo sapiens
gcgggccgaagcgaggtgcggctccctgtcgccgcggaggggcgggggcaggacgcgcaactccggccggagctgtccggggtcgtgagccggccccgccttggtggcggcgccccctcgcggtccagaggcagacgcatcgggtgggctcgggtctccagcccggccgggaggagggaccgggtctgcggagcggggactcggggcctcggcggggcgcgcacacgcaggcggggcggcccggggtgcggggcctctgcgcggctgaccaggctcccagagcgtcagcgccgcccatggccgagccgctccagccagaccccggggcggccgaggacgcggcggcccaagctgtggagacgccgggctggaaggccccggaggacgccggcccccagcccggaagttatgagatccgacactatggaccagccaagtgggtcagcacgtccgtggagtctatggactgggattcagccatccagacgggctttacgaaactgaacagctacattcaaggcaaaaacgagaaagagctgtcacatgactgcatcctgcctgccagggctgcaaagcaagggtcttgccttctatctgggggacgctgctcgagagaggccgagaggccgcagaacattgcccaggtgtcctcacttcaccccaaccctccccaattccaagccctttggccctctcggtcaagggttgggccaggcccagtcacaaggagcaagtgtaacctggaaaatacagtgacctgcctacattaacgggcatcagcccatgaacaggtgagagagtgg

SEQ ID NO: 451822 - DNA, 513 bp, Homo sapiens
tgcttgagcccaggaggtcaaggatgctctgccaccatattccagcctgggcaacagacagagtgagactctgtctcaaaaaaacaaacaaacaaaaaaacctcaggatgtatagagagagctgccagaacgttgatctcttccattggatcataaattcagagaggtgaaaactgtatcatattcatctgtaatccagtgtttattcttttccttaggagagggaaaaaggggcaatgtgcaagtgaaaatcgagtctggaaaaggggcttctacaggggtgttggtgtagttctctgatcagcagcaccggcatggatgtgggagctcggaggaaatacactctcaggccccaccccagacctgaatctgcatcgtagcaaaatccccaggtgacctgtatgcacgttaaaggtttgagaagcacagggtagagcacttgagattgtgtaggttccaaatccacctgtcaacagatggaaggaggggatgcatcctcctgggtttcctcag

SEQ ID NO: 451823 - DNA, 1389 bp, Homo sapiens
gcgggccgaagcgaggtgcggctccctgtcgccgcggaggggcgggggcaggacgcgcaactccggccggagctgtccggggtcgtgagccggccccgccttggtggcggcgccccctcgcggtccagaggcagacgcatcgggtgggctcgggtctccagcccggccgggaggagggaccgggtctgcggagcggggactcggggcctcggcggggcgcgcacacgcaggcggggcggcccggggtgcggggcctctgcgcggctgaccaggctcccagagcgtcagcgccgcccatggccgagccgctccagccagaccccggggcggccgaggacgcggcggcccaagctgtggagacgccgggctggaaggccccggaggacgccggcccccagcccggaagttatgagatccgacactatggaccagccaagtgggtcagcacgtccgtggagtctatggactgggattcagccatccagacgggctttacgaaactgaacagctacattcaaggcaaaaacgagaaagagatgaaaataaagatgacagctccagtgacaagctacgtggagcctggttcaggtccttttagtgagtctaccattaccatttccctgtatattccctctgaacagcaatttgatccacccaggcctttagagtcagatgtcttcattgaagatagagccgaaatgactgtgtttgtacggtctttcgatggattttctagtgcccaaaagaatcaagaacaacttttgacattagcaagcattttaagggaagatggaaaagttttcgatgagaaggtttactacactgcaggctacaacagtcctgtcaaattgcttaatagaaataatgaagtgtggttgattcaaaaaaatgaacccaccaaagaaaacgaatgagaaaaatgaaaggaagttctgctgtcagaggcaaaacatctgtttatcatagacatcaacatgacctataagtaaaaaaaaaaaaaaaaaaaaaaaaaaaaaaaaaaaaaaaaaaaaaaaaaaaaaaaagaaaaaaaaaaaaaaaaacaaataaaaaaaaaaaaaaaaaaaaaaaaaaaaaaaaaagaacaaaaaaagaaaaaaaaaagacaacaagggggactacaagcaaaccccagacaaaggagagaaagagagaagaaaaaaaaaaagcaaaaagaaaaaagaaaaaaaaaaaaagaaggaagaaaaaaaaagaaaggaagaaaaaagggggacaaagagagaaaaaacaaagaggagaaaaaaacacaaaagaagagacaagccagagagaagagagaacagagacaagaaaaaaacagaaaagaggaggaacagcccgaagaaagggacagacggggaaaaaacgaag

SEQ ID NO: 451824 - DNA, 1326 bp, Homo sapiens
gcgggccgaagcgaggtgcggctccctgtcgccgcggaggggcgggggcaggacgcgcaactccggccggagctgtccggggtcgtgagccggccccgccttggtggcggcgccccctcgcggtccagaggcagacgcatcgggtgggctcgggtctccagcccggccgggaggagggaccgggtctgcggagcggggactcggggcctcggcggggcgcgcacacgcaggcggggcggcccggggtgcggggcctctgcgcggctgaccaggctcccagagcgtcagcgccgcccatggccgagccgctccagccagaccccggggcggccgaggacgcggcggcccaagctgtggagacgccgggctggaaggccccggaggacgccggcccccagcccggaagttatgagatccgacactatggaccagccaagtgggtcagcacgtccgtggagtctatggactgggattcagccatccagacgggctttacgaaactgaacagctacattcaaggcaaaaacgagaaagagatgaaaataaagatgacagctccagtgacaagctacgtggagcctggttcaggtccttttagtgagtctaccattaccatttccctgtatattccctctgaacagcaatttgatccacccaggcctttagagtcagatgtcttcattgaagatagagccgaaatgactgtgtttgtacggtctttcgatggattttctagtgcccaaaagaatcaagaacaacttttgacattagcaagcattttaagggaagatggaaaagttttcgatgagaaggtttactacactgcaggctacaacagtcctgtcaaattgcttaatagaaataatgaagtgtggttgattcaaaaaaatgaacccaccaaagaaaacgaatgagaaaaatgaaaggaagttctgctgtcagaggcaaaacatctgtttatcatagacatcaacatgacctataagtaaaaaaaaaaaaaaaaaaaaaaaaaaaaaaaaaaagaaaaaaaaaaaaaaaaaaagggggggttttttgggggggggggaaaaaggggaaaggcgacgcagtgtgcagaatcaggtcttctccgagcaccaccaacttctttgtcgcaacgagggggggaacaatcagccagggagggcccccccaagaggagggggggcgagataaaattgtccgaaaacaggcggggtttctccgcgtttttttttgatctgtcgggaaaaaaactccagccgccaccagcccacccacccagacgatgcacatccgcaaccgcacacgcaatcatcaacctcatgt

SEQ ID NO: 451825 - DNA, 1165 bp, Homo sapiens
gcgggccgaagcgaggtgcggctccctgtcgccgcggaggggcgggggcaggacgcgcaactccggccggagctgtccggggtcgtgagccggccccgccttggtggcggcgccccctcgcggtccagaggcagacgcatcgggtgggctcgggtctccagcccggccgggaggagggaccgggtctgcggagcggggactcggggcctcggcggggcgcgcacacgcaggcggggcggcccggggtgcggggcctctgcgcggctgaccaggctcccagagcgtcagcgccgcccatggccgagccgctccagccagaccccggggcggccgaggacgcggcggcccaagctgtggagacgccgggctggaaggccccggaggacgccggcccccagcccggaagttatgagatccgacactatggaccagccaagtgggtcagcacgtccgtggagtctatggactgggattcagccatccagacgggctttacgaaactgaacagctacattcaaggcaaaaacgagaaagagatgaaaataaagatgacagctccagtgacaagctacgtggagcctggttcaggtccttttagtctttcgatggattttctagtgcccaaaagaatcaagaacaacttttgacattagcaagcattttaagggaagatggaaaagttttcgatgagaaggtttactacactgcaggctacaacagtcctgtcaaattgcttaatagaaataatgaagtgtggttgattcaaaaaaatgaacccaccaaagaaaacgaatgagaaaaatgaaaggaagttctgctgtcagaggcaaaacatctgtttatcatagacatcaacatgacctataagttaaagtgcgtgtctagtgtcttctattgagagtactactattaattaagcttatttccaatgtgcctttttaatgcttgaagttttatctacatacacaggtaacagaggacagtagtctgtaaacatataaatcggtcataactatcgtggtctttatttctgtgaggatctagggaaatttcatgtcacttccctccttcactgcatcacaatcatattcccttttttttttcttggatttgtgtcagttggatgatatcccctccagatagtatcaataaaatgttaaaatta

SEQ ID NO: 451826 - DNA, 1271 bp, Homo sapiens
gcgggccgaagcgaggtgcggctccctgtcgccgcggaggggcgggggcaggacgcgcaactccggccggagctgtccggggtcgtgagccggccccgccttggtggcggcgccccctcgcggtccagaggcagacgcatcgggtgggctcgggtctccagcccggccgggaggagggaccgggtctgcggagcggggactcggggcctcggcggggcgcgcacacgcaggcggggcggcccggggtgcggggcctctgcgcggctgaccaggctcccagagcgtcagcgccgcccatggccgagccgctccagccagaccccggggcggccgaggacgcggcggcccaagctgtggagacgccgggctggaaggccccggaggacgccggcccccagcccggaagttatgagatccgacactatggaccagccaagtgggtcagcacgtccgtggagtctatggactgggattcagccatccagacgggctttacgaaactgaacagctacattcaaggcaaaaacgagaaagagatgaaaataaagatgacagctccagtgacaagctacgtggagcctggttcaggtccttttagtctttcgatggattttctagtgcccaaaagaatcaagaacaacttttgacattagcaagcattttaagggaagatggaaaagttttcgatgagaaggtttactacactgcaggctacaacagtcctgtcaaattgcttaatagaaataatgaagtgtggttgattcaaaaaaatgaacccaccaaagaaaacgaatgagaaaaatgaaaggaagttctgctgtcagaggcaaaacatctgtttatcatagacatcaacatgacctataagtaaaaaaaaaaaaaaaaaaaaaaaaaaaaaaaaaaaaaaaaaaaaaaaaaaaaaaaagaaaaaaaaaaaaaaaaacaaataaaaaaaaaaaaaaaaaaaaaaaaaaaaaaaaaagaacaaaaaaagaaaaaaaaaagacaacaagggggactacaagcaaaccccagacaaaggagagaaagagagaagaaaaaaaaaaagcaaaaagaaaaaagaaaaaaaaaaaaagaaggaagaaaaaaaaagaaaggaagaaaaaagggggacaaagagagaaaaaacaaagaggagaaaaaaacacaaaagaagagacaagccagagagaagagagaacagagacaagaaaaaaacagaaaagaggaggaacagcccgaagaaagggacagacggggaaaaaacgaag

SEQ ID NO: 451827 - DNA, 1011 bp, Homo sapiens
gagggagtagctttttttatttttattttttgagaaagagtcttgcactctgtcgcccaggctggagtgcagtggcgtgatcttggctcactgcaacctccacctcccaggttcaagcgattctcctgcttcagcctcccaagtaactgggactacaggcatccgccaccacatctggctaagttttgtatttttattagagatggggttttaccatgttggccaggctggtcttgaactcctgacctcaagtgatccgcccaccttggcctcccaaagtcctgggattacaggtgtgagccacctcgcctggccgagagggagtaactttggagctgcacttcactcagcattcacggtactagcgcccgctttttgcttcagactgacattccacatcagtattaaaatcattcacggttatttcctttctcctttgtacggtctttcgatggattttctagtgcccaaaagaatcaagaacaacttttgacattagcaagcattttaagggaagatggaaaagttttcgatgagaaggtttactacactgcaggctacaacagtcctgtcaaattgcttaatagaaataatgaagtgtggttgattcaaaaaaatgaacccaccaaagaaaacgaatgagaaaaatgaaaggaagttctgctgtcagaggcaaaacatctgtttatcatagacatcaacatgacctataagttaaagtgcgtgtctagtgtcttctattgagagtactactattaattaagcttatttccaatgtgcctttttaatgcttgaagttttatctacatacacaggtaacagaggacagtagtctgtaaacatataaatcggtcataactatcgtggtctttatttctgtgaggatctagggaaatttcatgtcacttccctccttcactgcatcacaatcatattcccttttttttttcttggatttgtgtcagttggatgatatcccctccagatagtatcaataaaatgttaaaatta

SEQ ID NO: 451828 - DNA, 1283 bp, Homo sapiens
gcgggccgaagcgaggtgcggctccctgtcgccgcggaggggcgggggcaggacgcgcaactccggccggagctgtccggggtcgtgagccggccccgccttggtggcggcgccccctcgcggtccagaggcagacgcatcgggtgggctcgggtctccagcccggccgggaggagggaccgggtctgcggagcggggactcggggcctcggcggggcgcgcacacgcaggcggggcggcccggggtgcggggcctctgcgcggctgaccaggctcccagagcgtcagcgccgcccatggccgagccgctccagccagaccccggggcggccgaggacgcggcggcccaagctgtggagacgccgggctggaaggccccggaggacgccggcccccagcccggaagttatgagatccgacactatggaccagccaagtgggtcagcacgtccgtggagtctatggactgggattcagccatccagacgggctttacgaaactgaacagctacattcaaggcaaaaacgagaaagagatgaaaataaagatgacagctccagtgacaagctacgtggagcctggttcaggtccttttagtgagtctaccattaccatttccctgtatattccctctgaacagcaatttgatccacccaggcctttagagtcagatgtcttcattgaagatagagccgaaatgactgtgtttgtacggtctttcgatggattttctagtgcccaaaagaatcaagaacaacttttgacattagcaagcattttaagggaagatggaaaagttttcgatgagaaggtttactacactgcaggctacaacagtcctgtcaaattgcttaatagaaataatgaagtgtggttgattcaaaaaaatgaacccaccaaagaaaacgaatgagaaaaatgaaaggaagttctgctgtcagaggcaaaacatctgtttatcatagacatcaacatgacctataagttaaagtgcgtgtctagtgtcttctattgagagtactactattaattaagcttatttccaatgtgcctttttaatgcttgaagttttatctacatacacaggtaacagaggacagtagtctgtaaacatataaatcggtcataactatcgtggtctttatttctgtgaggatctagggaaatttcatgtcacttccctccttcactgcatcacaatcatattcccttttttttttcttggatttgtgtcagttggatgatatcccctccagatagtatcaataaaatgttaaaatta

SEQ ID NO: 451829 - DNA, 1393 bp, Homo sapiens
gcgggccgaagcgaggtgcggctccctgtcgccgcggaggggcgggggcaggacgcgcaactccggccggagctgtccggggtcgtgagccggccccgccttggtggcggcgccccctcgcggtccagaggcagacgcatcgggtgggctcgggtctccagcccggccgggaggagggaccgggtctgcggagcggggactcggggcctcggcggggcgcgcacacgcaggcggggcggcccggggtgcggggcctctgcgcggctgaccaggctcccagagcgtcagcgccgcccatggccgagccgctccagccagaccccggggcggccgaggacgcggcggcccaagctgtggagacgccgggctggaaggccccggaggacgccggcccccagcccggaagttatgagatccgacactatggaccagccaagtgggtcagcacgtccgtggagtctatggactgggattcagccatccagacgggctttacgaaactgaacagctacattcaaggcaaaaacgagaaagagatgaaaataaagatgacagctccagtgacaagctacgtggagcctggttcaggtccttttagtgagtctaccattaccatttccctgtatattccctctgaacagcaatttgatccacccaggcctttagagtcagatgtcttcattgaagatagagccgaaatgactgtgtttgtacggtctttcgatggattttctagtgcccaaaagaatcaagaacaacttttgacattagcaagcattttaagggaagatggaaaagttttcgatgagaaggtttactacactgcaggctacaacagtcctgtcaaattgcttaatagaaataatgaagtgtggttgattcaaaaaaatgaacccaccaaagaaaacgaatgagaaaaatgaaaggaagttctgctgtcagaggcaaaacatctgtttatcatagacatcaacatgacctataagttaaagtgcgtgtctagtgtcttctaaaaaaaaaaaaaaaaaaaaaaaaaaaaaaaaaaaagaaaaaaaaaaaaaaaaacaaataaaaaaaaaaaaaaaaaaaaaaaaaaaaaaaaaagaacaaaaaaagaaaaaaaaaagacaacaagggggactacaagcaaaccccagacaaaggagagaaagagagaagaaaaaaaaaaagcaaaaagaaaaaagaaaaaaaaaaaaagaaggaagaaaaaaaaagaaaggaagaaaaaagggggacaaagagagaaaaaacaaagaggagaaaaaaacacaaaagaagagacaagccagagagaagagagaacagagacaagaaaaaaacagaaaagaggaggaacagcccgaagaaagggacagacggggaaaaaacgaag

SEQ ID NO: 451830 - DNA, 1214 bp, Homo sapiens
gcgggccgaagcgaggtgcggctccctgtcgccgcggaggggcgggggcaggacgcgcaactccggccggagctgtccggggtcgtgagccggccccgccttggtggcggcgccccctcgcggtccagaggcagacgcatcgggtgggctcgggtctccagcccggccgggaggagggaccgggtctgcggagcggggactcggggcctcggcggggcgcgcacacgcaggcggggcggcccggggtgcggggcctctgcgcggctgaccaggctcccagagcgtcagcgccgcccatggccgagccgctccagccagaccccggggcgcccggaagttatgagatccgacactatggaccagccaagtgggtcagcacgtccgtggagtctatggactgggattcagccatccagacgggctttacgaaactgaacagctacattcaaggcaaaaacgagaaagagatgaaaataaagatgacagctccagtgacaagctacgtggagcctggttcaggtccttttagtgagtctaccattaccatttccctgtatattccctctgaacagcaatttgatccacccaggcctttagagtcagatgtcttcattgaagatagagccgaaatgactgtgtttgtacggtctttcgatggattttctagtgcccaaaagaatcaagaacaacttttgacattagcaagcattttaagggaagatggaaaagttttcgatgagaaggtttactacactgcaggctacaacagtcctgtcaaattgcttaatagaaataatgaagtgtggttgattcaaaaaaatgaacccaccaaagaaaacgaatgagaaaaatgaaaggaagttctgctgtcagaggcaaaacatctgtttatcatagacatcaacatgacctataagttaaagtgcgtgtctagtgtcttctattgagagtactactattaattaagcttatttccaatgtgcctttttaatgcttgaagttttatctacatacacaggtaacagaggacagtagtctgtaaacatataaatcggtcataactatcgtggtctttatttctgtgaggatctagggaaatttcatgtcacttccctccttcactgcatcacaatcatattcccttttttttttcttggatttgtgtcagttggatgatatcccctccagatagtatcaataaaatgttaaaatta

SEQ ID NO: 451831 - DNA, 1339 bp, Homo sapiens
gcgggccgaagcgaggtgcggctccctgtcgccgcggaggggcgggggcaggacgcgcaactccggccggagctgtccggggtcgtgagccggccccgccttggtggcggcgccccctcgcggtccagaggcagacgcatcgggtgggctcgggtctccagcccggccgggaggagggaccgggtctgcggagcggggactcggggcctcggcggggcgcgcacacgcaggcggggcggcccggggtgcggggcctctgcgcggctgaccaggctcccagagcgtcagcgccgcccatggccgagccgctccagccagaccccggggcggccgaggacgcggcggcccaagctgtggagacgccgggctggaaggccccggaggacgccggcccccagcccggaagttatgagatccgacactatggaccagccaagtgggtcagcacgtccgtggagtctatggactgggattcagccatccagacgggctttacgaaactgaacagctacattcaaggcaaaaacgagaaagagatgaaaataaagatgacagctccagtgacaagctacgtggagcctggttcaggtccttttagagagggaaaaaggggcaatgtgcaagtgaaaatcgagtctggaaaaggggcttctacaggggtgttggtgtagttctctgatcagcagcaccggcatggatgtgggagctcggaggaaatacactctcaggccccaccccagacctgaatctgcatcgtagcaaaatccccaggtctttcgatggattttctagtgcccaaaagaatcaagaacaacttttgacattagcaagcattttaagggaagatggaaaagttttcgatgagaaggtttactacactgcaggctacaacagtcctgtcaaattgcttaatagaaataatgaagtgtggttgattcaaaaaaatgaacccaccaaagaaaacgaatgagaaaaatgaaaggaagttctgctgtcagaggcaaaacatctgtttatcatagacatcaacatgacctataagttaaagtgcgtgtctagtgtcttctattgagagtactactattaattaagcttatttccaatgtgcctttttaatgcttgaagttttatctacatacacaggtaacagaggacagtagtctgtaaacatataaatcggtcataactatcgtggtctttatttctgtgaggatctagggaaatttcatgtcacttccctccttcactgcatcacaatcatattcccttttttttttcttggatttgtgtcagttggatgatatcccctccagatagtatcaataaaatgttaaaatta

SEQ ID NO: 451832 - DNA, 389 bp, Homo sapiens
tcccatgcaaccacaggatgagggctgagcggcctcatcctcacattcagcagagtctctcacaggcctctgctttgttaatgccctccaaaccccatgcattttctaaggcccagaaagatcttcaacttacttagtggtcatgtatcttccctaaggctgtgagcctaatccatccacttatgccttgtgttactgctacgttagctgtcacctgcagctgatggcagttttaatacacaaagaagtggctgctttcctcttaatggagaagcaaagtctattttgcctgctcttgaatcttgactgccctctgactgcctttttgaagtaatagaccttaccgtaaatatgtttgttacaatgagctggaacggatttaattgtaa

SEQ ID NO: 451833 - DNA, 610 bp, Homo sapiens
ccacaacaccattaccaaatgagaaatgtgggaatttcttcaatattaagagggagaaaaaggccaattttggtaatggtgttgtggcctcagatttcttctagtatttgcttctgatgaatgattatggtctatacataaaaaagtaagactaagtattgctgaatttgcagttatgttgtcgtgtataagagctacttccaagtgtggttacaaatgaacccatggaatgatgacttcatgttcttctcgtgggtttgtgccgtgctgctttccaaataggtattgaatttatgcattagtctggtgatttcagttctgtgaaatattttgggatctataccaattaaacattttcatagttctgcctattgtccttccctgaggctccattgctgcttggtggccattctctgcctttttacagtcacctgaacaatgacccatcatctcttgcttgcttgaaatcttgctgaaatgttctcatttcctgtttgctgtatgggctcgggtgggatgtttgttggctctgttgtgtttattcaccaatttgtacattatttgttgtcctttactactgtaaacagtaaatatagtttggtattctgtc

SEQ ID NO: 451834 - DNA, 768 bp, Homo sapiens
tgaacgcgcgcagccacgtgacccccgtgccggccaacgggtgcgccgggatttgggggataaagcgcggccccgcgcacagttgcggcgggagagcggcggggccgagagcgtgactcgcccgctccgcgctgcttcccccgcgccgcctccccgcgccgctcgcgcagccatgtccgaggagaagcccaaggagggtgtgaagacagagaatgaccacatcaacctgaaggtggccgggcaggacggctccgtggtgcagttcaagatcaagaggcacacgccgctgagcaagctgatgaaggcctactgcgagaggcaggtgcggcaccttgctcccccgcagagcctccccgtgtgcgcactggtcctgtgcgttccaggcatccccagagcacgagcgtctcggggctggacccagatgcagctgcccgaggtgccctcttcgtggatgggcaggcgggggcttgtgctgtaaaattagtccaggctgggcttgtcccccatggccttttataaggtggagggacctagaggctcggagaagtgtggtgggtttttcttcctgacagggcggctgcccggggtgctgtgttctccatggggtactaacatctgtgaagtctgtgatgctgaaggctcttgggggccctgctcaggtctggccattctggggctgcaggtggccctgtcctcgcgtatgagctggcctgaccctggagagacactgccctcatgtgcggtgtggttttccattttgttaggaaa

SEQ ID NO: 451835 - DNA, 604 bp, Homo sapiens
caccccaggaatggcgcccgcaagtccggggaggccgtcctgccggcccagcgcgtttcccgcgtccacgaggtccccgttccgccggcactggcggcgtccagcctgggtttgcccgcgctcgccgacgtggcggcctggccaagctcggcgccgctcaccagcgctgacctgggggtggtttgacctcccagtgcctcagtttcttcacaggtaaaacgggtcttcttgaggacgggtgtggagggcccggggcagccccgtaggagcgttggccaaaggagcccggcctggggctgacaggaaaccgcggcggcagggaggcgggtggcgcccccaatcgtctagggtgctggcccgattcgcgcggcccccgcggacgggaccccgcgggccgccttctccgctctgtccgcggctcctgagagggaacgtcacccccagcgtcctccctcctccgccccaggtccctgcggccatgggcggcggccccggcctcacttcccggcgccccaggaacgcggcccccaggaaaggagtcggggcccgggcgacgcggggaggcgggcaagggtccccagggcccgggctccccgtaaacgct

SEQ ID NO: 451836 - DNA, 531 bp, Homo sapiens
agtctctggtgtcttctgcaggagggtgtgaagacagagaatgaccacatcaacctgaaggtggccgggcaggacggctccgtggtgcagttcaagatcaagaggcacacgccgctgagcaagctgatgaaggcctactgcgagaggcagggcttgtcaatgaggcagatcagattcaggttcgacgggcagccaatcaatgaaactgacactccagcacagggcatcatactgtcatggaaagagctttggacctggaaacagacttttttttttgagacggagtctcgctttgttgcccaggctagaatgcagtggcgcagtctcagctcactgtgcaagctctgcctcctgagttcacgccattctcctgcctcagcctcccaagtagctgggactataggtgcccaccaccactcccggctaatttttttgtatttttagtagagacggggtttcaccatgttagccaggatggtctcgatctcctgaccttgtgatctgcccacctcagccccccaaagtgctggg

SEQ ID NO: 451837 - DNA, 241 bp, Homo sapiens
gatgacccatcatctcaagcaagcaagagatgatgggtcattgttcaggtgactgtaaaaaggcagagaatgacccatcatctcttgcttgcttgaaatcttgctgaaatgttctcatttcctgtttgctgtatgggctcgggtgggatgtttgttggctctgttgtgtttattcaccaatttgtacattatttgttgtcctttactactgtaaacagtaaatatagtttggtattctgtc

SEQ ID NO: 451838 - DNA, 2283 bp, Homo sapiens
  misc_feature (1873)..(1873): n is a, c, g, or t
tgaacgcgcgcagccacgtgacccccgtgccggccaacgggtgcgccgggatttgggggataaagcgcggccccgcgcacagttgcggcgggagagcggcggggccgagagcgtgactcgcccgctccgcgctgcttcccccgcgccgcctccccgcgccgctcgcgcagccatgtccgaggagaagcccaaggagggtgtgaagacagagaatgaccacatcaacctgaaggtggccgggcaggacggctccgtggtgcagttcaagatcaagaggcacacgccgctgagcaagctgatgaaggcctactgcgagaggcagggcttgtcaatgaggcagatcagattcaggttcgacgggcagccaatcaatgaaactgacactccagcacagctggagatggaggacgaggacaccatcgacgtgttccagcagcagacgggaggtgtgccggagagcagcctggcagggcacagtttctagagggcccgtccccagcccgggccgtccatcctcgcattgctgttgaatggtgagcacgtgaccatgccgaccacaaaggtgtctgcggaaactcgaggacattcaccacgatgattttcctctctttgatgtacttcaagtgcaactcaaaactatatctgcagggatgaatctgtaacttaaattgggccaatcagaattgttatctttgttcaggtaaaatgagttgcaagatattgtgggtacttttgtgtgctcatttgtgttttccccccctcctacaacatttttttaaccccaaaattatagcctgaatgttcgcttttagtctggccagggatctgactcctgagttggttgcctctcccctgctcactccagtcacatagagaattggtgtttcccgcagtggggatgcagctgttggacaggtattgggggcaaggttggtagggaggacagactgtcacttgctgttacaggcacaggtgattaaaatgctaaatattgcaaatttaagctttgtcagtatatggaaaagttgaagggaaaatactggaatgcttcttcaaaggttaaaaaataaccgagtcttttggtaatttgaccccacgtgctctctggccctcaagcatgtaacctcggggtctgaggcccaggacccacccccctgccacccctcccaccccactccctgctcagtacctggcgttggtacacaggcaaggattggcacaaccaaaattggcctttttctccctcttaatattgaagaaattcccacatttctcatttggtaatggtgttgtggcctcagatttcttctagtatttgcttctgatgaatgattatggtctatacataaaaaagtaagactaagtattgctgaatttgcagttatgttgtcgtgtataagagctacttccaagtgtggttacaaatgaacccatggaatgatgacttcatgttcttctcgtgggtttgtgccgtgctgctttccaaataggtattgaatttatgcattagtctggtgatttcagttctgtgaaatattttgggatctataccaattaaacattttcatagttctgcctattgtccttccctgaggctccattgctgcttggtggccattctctgcctttttacagtcacctgaacaatgacccatcatctcttgcttgcttgaaatcttgctgaaatgttctcatttcctgtttgctgtatgggctcgggtgggatgtttgttggctctgttgtgtttattcaccaatttgtacattatttgttgtcctttactactgtaaacagtaaatatagtttggtattctgtcaaaaaaaaaaaaaaaaaaaaaaaaaaaaaaaaaaaaaaaaaaaaaaaaaaaaaanaaaaaaaaaaaaaaaaaaaaaaacagggccgcggccgcggggcggcgccgcacggaggagaagctatagaaaaaacacatcgacagggagaggaggagggggggccacgcagcgggcagcaacagaaagaggggaagaaagagataggaacaggaggagcacagcgacgggagcactgagcgggcgggagggaggcgagcgcgcgcgcaaaacaacaaaaaccgacgaggggagagagaggcgcgagagagggagactaccggaagaagactatagacaagaagaactcacatccgtgggagagaccacacacgggaggagattctcaggcggaataaagcaagacgaaggagcggacacacagagccagaagaaaaaccccacaaagcagcaggggacaggggagaaga

SEQ ID NO: 451839 - DNA, 1769 bp, Homo sapiens
tgaacgcgcgcagccacgtgacccccgtgccggccaacgggtgcgccgggatttgggggataaagcgcggccccgcgcacagttgcggcgggagagcggcggggccgagagcgtgactcgcccgctccgcgctgcttcccccgcgccgcctccccgcgccgctcgcgcagccatgtccgaggagaagcccaaggagggtgtgaagacagagaatgaccacatcaacctgaaggtggccgggcaggacggctccgtggtgcagttcaagatcaagaggcacacgccgctgagcaagctgatgaaggcctactgcgagaggcagggcttgtcaatgaggcagatcagattcaggttcgacgggcagccaatcaatgaaactgacactccagcacagctggagatggaggacgaggacaccatcgacgtgttccagcagcagacgggaggtgtgccggagagcagcctggcagggcacagtttctagagggcccgtccccagcccgggccgtccatcctcgcattgctgttgaatggtgagcacgtgaccatgccgaccacaaaggtgtctgcggaaactcgaggacattcaccacgatgattttcctctctttgatgtacttcaagtgcaactcaaaactatatctgcagggatgaatctgtaacttaaattgggccaatcagaattgttatctttgttcaggtaaaatgagttgcaagatattgtgggtacttttgtgtgctcatttgtgttttccccccctcctacaacatttttttaaccccaaaattatagcctgaatgttcgcttttagtctggccagggatctgactcctgagttggttgcctctcccctgctcactccagtcacatagagaattggtgtttcccgcagtggggatgcagctgttggacaggtattgggggcaaggttggtagggaggacagactgtcacttgctgttacaggcacaggtgattaaaatgctaaatattgcaaatttaagctttgtcagtatatggaaaagttgaagggaaaatactggaatgcttcttcaaaggttaaaaaataaccgagtcttttggtaatttgaccccacgtgctctctggccctcaagcatgtaacctcggggtctgaggcccaggacccacccccctgccacccctcccaccccactccctgctcagtacctggcgttggtacacaggcaaggattggcacaaccaaaattggcctttttctccctcttaatattgaagaaattcccacatttctcatttggtaatggtgttgtggcctcagatttcttctagtatttgcttctgatgaatgattatggtctatacataaaaaagtaagactaagtattgctgaatttgcagttatgttgtcgtgtataagagctacttccaagtgtggttacaaatgaacccatggaatgatgacttcatgttcttctcgtgggtttgtgccgtgctgctttccaaataggtattgaatttatgcattagtctggtgatttcagttctgtgaaatattttgggatctataccaattaaacattttcatagttctgcctttttacagtcacctgaacaatgacccatcatctcttgcttgcttgaaatcttgctgaaatgttctcatttcctgtttgctgtatgggctcgggtgggatgtttgttggctctgttgtgtttattcaccaatttgtacattatttgttgtcctttactactgtaaacagtaaatatagtttggtattctgtc

SEQ ID NO: 451840 - DNA, 1672 bp, Homo sapiens
aaactttgcgcggcctctgcgcggccatgtccgaggagaagcccaaggagggtgtgaagacagagaatgaccacatcaacctgaaggtggccgggcaggacggctccgtggtgcagttcaagatcaagaggcacacgccgctgagcaagctgatgaaggcctactgcgagaggcagggcttgtcaatgaggcagatcagattcaggttcgacgggcagccaatcaatgaaactgacactccagcacagctggagatggaggacgaggacaccatcgacgtgttccagcagcagacgggaggtgtgccggagagcagcctggcagggcacagtttctagagggcccgtccccagcccgggccgtccatcctcgcattgctgttgaatggtgagcacgtgaccatgccgaccacaaaggtgtctgcggaaactcgaggacattcaccacgatgattttcctctctttgatgtacttcaagtgcaactcaaaactatatctgcagggatgaatctgtaacttaaattgggccaatcagaattgttatctttgttcaggtaaaatgagttgcaagatattgtgggtacttttgtgtgctcatttgtgttttccccccctcctacaacatttttttaaccccaaaattatagcctgaatgttcgcttttagtctggccagggatctgactcctgagttggttgcctctcccctgctcactccagtcacatagagaattggtgtttcccgcagtggggatgcagctgttggacaggtattgggggcaaggttggtagggaggacagactgtcacttgctgttacaggcacaggtgattaaaatgctaaatattgcaaatttaagctttgtcagtatatggaaaagttgaagggaaaatactggaatgcttcttcaaaggttaaaaaataaccgagtcttttggtaatttgaccccacgtgctctctggccctcaagcatgtaacctcggggtctgaggcccaggacccacccccctgccacccctcccaccccactccctgctcagtacctggcgttggtacacaggcaaggattggcacaaccaaaattggcctttttctccctcttaatattgaagaaattcccacatttctcatttggtaatggtgttgtggcctcagatttcttctagtatttgcttctgatgaatgattatggtctatacataaaaaagtaagactaagtattgctgaatttgcagttatgttgtcgtgtataagagctacttccaagtgtggttacaaatgaacccatggaatgatgacttcatgttcttctcgtgggtttgtgccgtgctgctttccaaataggtattgaatttatgcattagtctggtgatttcagttctgtgaaatattttgggatctataccaattaaacattttcatagttctgcctattgtccttccctgaggctccattgctgcttggtggccattctctgcctttttacagtcacctgaacaatgacccatcatctcttgcttgcttgaaatcttgctgaaatgttctcatttcctgtttgctgtatgggctcgggtgggatgtttgttggctctgttgtgtttattcaccaatttgtacattatttgttgtcctttactactgtaaacagtaaatatagtttggtattctgtc

SEQ ID NO: 451841 - DNA, 1764 bp, Homo sapiens
tgaacgcgcgcagccacgtgacccccgtgccggccaacgggtgcgccgggatttgggggataaagcgcggccccgcgcacagttgcggcgggagagcggcggggccgagagcgtgactcgcccgctccgcgctgcttcccccgcgccgcctccccgcgccgctcgcgcagccatgtccgaggagaagcccaaggagggtgtgaagacagagaatgaccacatcaacctgaaggtggccgggcaggacggctccgtggtgcagttcaagatcaagaggcacacgccgctgagcaagctgatgaaggcctactgcgagaggcagggcttgtcaatgaggcagatcagattcaggttcgacgggcagccaatcaatgaaactgacactccagcacagctggagatggaggacgaggacaccatcgacgtgttccagcagcagacgggaggtgtgccggagagcagcctggcagggcacagtttctagagggcccgtccccagcccgggccgtccatcctcgcattgctgttgaatggtgagcacgtgaccatgccgaccacaaaggtgtctgcggaaactcgaggacattcaccacgatgattttcctctctttgatgtacttcaagtgcaactcaaaactatatctgcagggatgaatctgtaacttaaattgggccaatcagaattgttatctttgttcaggtaaaatgagttgcaagatattgtgggtacttttgtgtgctcatttgtgttttccccccctcctacaacatttttttaaccccttggttgcctctcccctgctcactccagtcacatagagaattggtgtttcccgcagtggggatgcagctgttggacaggtattgggggcaaggttggtagggaggacagactgtcacttgctgttacaggcacaggtgattaaaatgctaaatattgcaaatttaagctttgtcagtatatggaaaagttgaagggaaaatactggaatgcttcttcaaaggttaaaaaataaccgagtcttttggtaatttgaccccacgtgctctctggccctcaagcatgtaacctcggggtctgaggcccaggacccacccccctgccacccctcccaccccactccctgctcagtacctggcgttggtacacaggcaaggattggcacaaccaaaattggcctttttctccctcttaatattgaagaaattcccacatttctcatttggtaatggtgttgtggcctcagatttcttctagtatttgcttctgatgaatgattatggtctatacataaaaaagtaagactaagtattgctgaatttgcagttatgttgtcgtgtataagagctacttccaagtgtggttacaaatgaacccatggaatgatgacttcatgttcttctcgtgggtttgtgccgtgctgctttccaaataggtattgaatttatgcattagtctggtgatttcagttctgtgaaatattttgggatctataccaattaaacattttcatagttctgcctattgtccttccctgaggctccattgctgcttggtggccattctctgcctttttacagtcacctgaacaatgacccatcatctcttgcttgcttgaaatcttgctgaaatgttctcatttcctgtttgctgtatgggctcgggtgggatgtttgttggctctgttgtgtttattcaccaatttgtacattatttgttgtcctttactactgtaaacagtaaatatagtttggtattctgtc

SEQ ID NO: 451842 - DNA, 1868 bp, Homo sapiens
tgaacgcgcgcagccacgtgacccccgtgccggccaacgggtgcgccgggatttgggggataaagcgcggccccgcgcacagttgcggcgggagagcggcggggccgagagcgtgactcgcccgctccgcgctgcttcccccgcgccgcctccccgcgccgctcgcgcagccatgtccgaggagaagcccaaggagggtgtgaagacagagaatgaccacatcaacctgaaggtggccgggcaggacggctccgtggtgcagttcaagatcaagaggcacacgccgctgagcaagctgatgaaggcctactgcgagaggcagggcttgtcaatgaggcagatcagattcaggttcgacgggcagccaatcaatgaaactgacactccagcacaggtacggagctggcttcgcgtggttccagggcgacttccgatttgtgcgggctggagatggaggacgaggacaccatcgacgtgttccagcagcagacgggaggtgtgccggagagcagcctggcagggcacagtttctagagggcccgtccccagcccgggccgtccatcctcgcattgctgttgaatggtgagcacgtgaccatgccgaccacaaaggtgtctgcggaaactcgaggacattcaccacgatgattttcctctctttgatgtacttcaagtgcaactcaaaactatatctgcagggatgaatctgtaacttaaattgggccaatcagaattgttatctttgttcaggtaaaatgagttgcaagatattgtgggtacttttgtgtgctcatttgtgttttccccccctcctacaacatttttttaaccccaaaattatagcctgaatgttcgcttttagtctggccagggatctgactcctgagttggttgcctctcccctgctcactccagtcacatagagaattggtgtttcccgcagtggggatgcagctgttggacaggtattgggggcaaggttggtagggaggacagactgtcacttgctgttacaggcacaggtgattaaaatgctaaatattgcaaatttaagctttgtcagtatatggaaaagttgaagggaaaatactggaatgcttcttcaaaggttaaaaaataaccgagtcttttggtaatttgaccccacgtgctctctggccctcaagcatgtaacctcggggtctgaggcccaggacccacccccctgccacccctcccaccccactccctgctcagtacctggcgttggtacacaggcaaggattggcacaaccaaaattggcctttttctccctcttaatattgaagaaattcccacatttctcatttggtaatggtgttgtggcctcagatttcttctagtatttgcttctgatgaatgattatggtctatacataaaaaagtaagactaagtattgctgaatttgcagttatgttgtcgtgtataagagctacttccaagtgtggttacaaatgaacccatggaatgatgacttcatgttcttctcgtgggtttgtgccgtgctgctttccaaataggtattgaatttatgcattagtctggtgatttcagttctgtgaaatattttgggatctataccaattaaacattttcatagttctgcctattgtccttccctgaggctccattgctgcttggtggccattctctgcctttttacagtcacctgaacaatgacccatcatctcttgcttgcttgaaatcttgctgaaatgttctcatttcctgtttgctgtatgggctcgggtgggatgtttgttggctctgttgtgtttattcaccaatttgtacattatttgttgtcctttactactgtaaacagtaaatatagtttggtattctgtc

SEQ ID NO: 451843 - DNA, 1579 bp, Homo sapiens
tattcctaatttgttgagagttttcatcataatgaatgttgaatttcatccaattaagctatactggcagtcaaattgattggattggaggatagaaagcattgatcctgggtgtgcctgtgagggtgttgacaaacgagattaacatttgagtcagtgggctgggaaagggaggcccactcttaattgggtgagcaccatctaataagctgccaatgtatataaagtaggcaggataccgtataaaggagagactggcctaagctcccagtctacatcttttgctgttgaatggtgagcacgtgaccatgccgaccacaaaggtgtctgcggaaactcgaggacattcaccacgatgattttcctctctttgatgtacttcaagtgcaactcaaaactatatctgcagggatgaatctgtaacttaaattgggccaatcagaattgttatctttgttcaggtaaaatgagttgcaagatattgtgggtacttttgtgtgctcatttgtgttttccccccctcctacaacatttttttaaccccaaaattatagcctgaatgttcgcttttagtctggccagggatctgactcctgagttggttgcctctcccctgctcactccagtcacatagagaattggtgtttcccgcagtggggatgcagctgttggacaggtattgggggcaaggttggtagggaggacagactgtcacttgctgttacaggcacaggtgattaaaatgctaaatattgcaaatttaagctttgtcagtatatggaaaagttgaagggaaaatactggaatgcttcttcaaaggttaaaaaataaccgagtcttttggtaatttgaccccacgtgctctctggccctcaagcatgtaacctcggggtctgaggcccaggacccacccccctgccacccctcccaccccactccctgctcagtacctggcgttggtacacaggcaaggattggcacaaccaaaattggcctttttctccctcttaatattgaagaaattcccacatttctcatttggtaatggtgttgtggcctcagatttcttctagtatttgcttctgatgaatgattatggtctatacataaaaaagtaagactaagtattgctgaatttgcagttatgttgtcgtgtataagagctacttccaagtgtggttacaaatgaacccatggaatgatgacttcatgttcttctcgtgggtttgtgccgtgctgctttccaaataggtattgaatttatgcattagtctggtgatttcagttctgtgaaatattttgggatctataccaattaaacattttcatagttctgcctattgtccttccctgaggctccattgctgcttggtggccattctctgcctttttacagtcacctgaacaatgacccatcatctcttgcttgcttgaaatcttgctgaaatgttctcatttcctgtttgctgtatgggctcgggtgggatgtttgttggctctgttgtgtttattcaccaatttgtacattatttgttgtcctttactactgtaaacagtaaatatagtttggtattctgtc

SEQ ID NO: 451844 - DNA, 1319 bp, Homo sapiens
tgaacgcgcgcagccacgtgacccccgtgccggccaacgggtgcgccgggatttgggggataaagcgcggccccgcgcacagttgcggcgggagagcggcggggccgagagcgtgactcgcccgctccgcgctgcttcccccgcgccgcctccccgcgccgctcgcgcagccatgtccgaggagaagcccaaggagggtgtgaagacagagaatgaccacatcaacctgaaggtggccgggcaggacggctccgtggtgcagttcaagatcaagaggcacacgccgctgagcaagctgatgaaggcctactgcgagaggcagggcttgtcaatgaggcagatcagattcaggttcgacgggcagccaatcaatgaaactgacactccagcacagtggggatgcagctgttggacaggtattgggggcaaggttggtagggaggacagactgtcacttgctgttacaggcacaggtgattaaaatgctaaatattgcaaatttaagctttgtcagtatatggaaaagttgaagggaaaatactggaatgcttcttcaaaggttaaaaaataaccgagtcttttggtaatttgaccccacgtgctctctggccctcaagcatgtaacctcggggtctgaggcccaggacccacccccctgccacccctcccaccccactccctgctcagtacctggcgttggtacacaggcaaggattggcacaaccaaaattggcctttttctccctcttaatattgaagaaattcccacatttctcatttggtaatggtgttgtggcctcagatttcttctagtatttgcttctgatgaatgattatggtctatacataaaaaagtaagactaagtattgctgaatttgcagttatgttgtcgtgtataagagctacttccaagtgtggttacaaatgaacccatggaatgatgacttcatgttcttctcgtgggtttgtgccgtgctgctttccaaataggtattgaatttatgcattagtctggtgatttcagttctgtgaaatattttgggatctataccaattaaacattttcatagttctgcctattgtccttccctgaggctccattgctgcttggtggccattctctgcctttttacagtcacctgaacaatgacccatcatctcttgcttgcttgaaatcttgctgaaatgttctcatttcctgtttgctgtatgggctcgggtgggatgtttgttggctctgttgtgtttattcaccaatttgtacattatttgttgtcctttactactgtaaacagtaaatatagtttggtattctgtc

SEQ ID NO: 451845 - DNA, 1576 bp, Homo sapiens
tgaacgcgcgcagccacgtgacccccgtgccggccaacgggtgcgccgggatttgggggataaagcgcggccccgcgcacagttgcggcgggagagcggcggggccgagagcgtgactcgcccgctccgcgctgcttcccccgcgccgcctccccgcgccgctcgcgcagccatgtccgaggagaagcccaaggagggtgtgaagacagagaatgaccacatcaacctgaaggtggccgggcaggacggctccgtggtgcagttcaagatcaagaggcacacgccgctgagcaagctgatgaaggcctactgcgagaggcagggcttgtcaatgaggcagatcagattcaggttcgacgggcagccaatcaatgaaactgacactccagcacagctggagatggaggacgaggacaccatcgacgtgttccagcagcagacgggaggtgtgccggagagcagcctggcagggcacagtttctagagggcccgtccccagcccgggccgtccatcctcgcattgctgttgaatggtgagcacgtgaccatgccgaccacaaaggtgtctgcggaaactcgaggacattcaccacgatgattttcctctctttgatgtacttcaagtgcaactcaaaactatatctgcagggatgaatctgtaacttaaattgggccaatcagaattgttatctttgttcaggtaaaatgagttgcaagatattgtgggtacttttgtgtgctcatttgtgttttccccccctcctacaacatttttttaaccccaaaattatagcctgaatgttcgcttttagtctggccagggatctgactcctgagttggttgcctctcccctgctcactccagtcacatagagaattggtgtttcccgcagtggggatgcagctgttggacaggtattgggggcaaggttggtagggaggacagactgtcacttgctgttacaggcacaggtgattaaaatgctaaatattgcaaatttaagctttgtcagtatatggaaaagttgaagggaaaatactggaatgcttcttcaaaggttaaaaaataaccgagtcttttggtaatttgaccccacgtgctctctggccctcaagcatgtaacctcggggtctgaggcccaggacccacccccctgccacccctcccaccccactccctgctcagtacctggcgttggtacacaggcaaggattggcacaaccaaaattggcctttttctccctcttaatattgaagaaattcccacatttctcatttggtaatggtgttgtggcctcagatttcttctagtatttgcttctgatgaatgattatggtctatacataaaaaagtaagactaagtattgctgaatttgcagttatgttgtcgtgtataagagctacttccaagtgtggttacaaatgaacccatggaatgatgacttcatgttcttctcgtgggtttgtgccgtgctgctttccaaataggtattgaatttatgcattagtctggtgatttcagttctgtgaaatattttgggatctataccaattaaacattttcatagttctgc

SEQ ID NO: 451846 - DNA, 1818 bp, Homo sapiens
tgaacgcgcgcagccacgtgacccccgtgccggccaacgggtgcgccgggatttgggggataaagcgcggccccgcgcacagttgcggcgggagagcggcggggccgagagcgtgactcgcccgctccgcgctgcttcccccgcgccgcctccccgcgccgctcgcgcagccatgtccgaggagaagcccaaggagggtgtgaagacagagaatgaccacatcaacctgaaggtggccgggcaggacggctccgtggtgcagttcaagatcaagaggcacacgccgctgagcaagctgatgaaggcctactgcgagaggcagggcttgtcaatgaggcagatcagattcaggttcgacgggcagccaatcaatgaaactgacactccagcacagctggagatggaggacgaggacaccatcgacgtgttccagcagcagacgggaggtgtgccggagagcagcctggcagggcacagtttctagagggcccgtccccagcccgggccgtccatcctcgcattgctgttgaatggtgagcacgtgaccatgccgaccacaaaggtgtctgcggaaactcgaggacattcaccacgatgattttcctctctttgatgtacttcaagtgcaactcaaaactatatctgcagggatgaatctgtaacttaaattgggccaatcagaattgttatctttgttcaggtaaaatgagttgcaagatattgtgggtacttttgtgtgctcatttgtgttttccccccctcctacaacatttttttaaccccaaaattatagcctgaatgttcgcttttagtctggccagggatctgactcctgagttggttgcctctcccctgctcactccagtcacatagagaattggtgtttcccgcagtggggatgcagctgttggacaggtattgggggcaaggttggtagggaggacagactgtcacttgctgttacaggcacaggtgattaaaatgctaaatattgcaaatttaagctttgtcagtatatggaaaagttgaagggaaaatactggaatgcttcttcaaaggttaaaaaataaccgagtcttttggtaatttgaccccacgtgctctctggccctcaagcatgtaacctcggggtctgaggcccaggacccacccccctgccacccctcccaccccactccctgctcagtacctggcgttggtacacaggcaaggattggcacaaccaaaattggcctttttctccctcttaatattgaagaaattcccacatttctcatttggtaatggtgttgtggcctcagatttcttctagtatttgcttctgatgaatgattatggtctatacataaaaaagtaagactaagtattgctgaatttgcagttatgttgtcgtgtataagagctacttccaagtgtggttacaaatgaacccatggaatgatgacttcatgttcttctcgtgggtttgtgccgtgctgctttccaaataggtattgaatttatgcattagtctggtgatttcagttctgtgaaatattttgggatctataccaattaaacattttcatagttctgcctattgtccttccctgaggctccattgctgcttggtggccattctctgcctttttacagtcacctgaacaatgacccatcatctcttgcttgcttgaaatcttgctgaaatgttctcatttcctgtttgctgtatgggctcgggtgggatgtttgttggctctgttgtgtttattcaccaatttgtacattatttgttgtcctttactactgtaaacagtaaatatagtttggtattctgtc

SEQ ID NO: 451847 - DNA, 2104 bp, Homo sapiens
tgaacgcgcgcagccacgtgacccccgtgccggccaacgggtgcgccgggatttgggggataaagcgcggccccgcgcacagttgcggcgggagagcggcggggccgagagcgtgactcgcccgctccgcgctgcttcccccgcgccgcctccccgcgccgctcgcgcagccatgtccgaggagaagcccaaggagggtgtgaagacagagaatgaccacatcaacctgaaggtggccgggcaggacggctccgtggtgcagttcaagatcaagaggcacacgccgctgagcaagctgatgaaggcctactgcgagaggcagggcttgtcaatgaggcagatcagattcaggttcgacgggcagccaatcaatgaaactgacactccagcacagctggagatggaggacgaggacaccatcgacgtgttccagcagcagacgggaggtgtgccggagagcagcctggcagggcacagtttctagagggcccgtccccagcccgggccgtccatcctcgcattgctgttgaatggtgagcacgtgaccatgccgaccacaaaggtgtctgcggaaactcgaggacattcaccacgatgattttcctctctttgatgtacttcaagtgcaactcaaaactatatctgcagggatgaatctgtaacttaaattgggccaatcagaattgttatctttgttcaggtaaaatgagttgcaagatattgtgggtacttttgtgtgctcatttgtgttttccccccctcctacaacatttttttaaccccaaaattatagcctgaatgttcgcttttagtctggccagggatctgactcctgagttggttgcctctcccctgctcactccagtcacatagagaattggtgtttcccgcagtggggatgcagctgttggacaggtattgggggcaaggttggtagggaggacagactgtcacttgctgttacaggcacaggtgattaaaatgctaaatattgcaaatttaagctttgtcagtatatggaaaagttgaagggaaaatactggaatgcttcttcaaaggttaaaaaataaccgagtcttttggtaatttgaccccacgtgctctctggccctcaagcatgtaacctcggggtctgaggcccaggacccacccccctgccacccctcccaccccactccctgctcagtacctggcgttggtacacaggcaaggattggcacaaccaaaattggcctttttctccctcttaatattgaagaaattcccacatttctcatttggtaatggtgttgtggcctcagatttcttctagtatttgcttctgatgaatgattatggtctatacataaaaaagtaagactaagtattgctgaatttgcagttatgttgtcgtgtataagagctacttccaagtgtggttacaaatgaacccatggaatgatgacttcatgttcttctcgtgggtttgtgccgtgctgctttccaaataggtattgaatttatgcattagtctggtgatttcagttctgtgaaatattttgggatctataccaattaaacattttcatagttctgcctattgtccttccctgaggctccattgctgcttggtggccattctctgcctttttacagtcacctgaacaatgacccatcatctcttgcttgcttgaaatcttgctgaaatgttctcatttcctgtttgctgtatgggctcgggtgggatgtttgttggctctgttgtgtttattcaccaatttgtacattatttgttgtcctttactactgtaaacagtaaatatagtttggtattctgtcaaaaaaacaaaacaacccaaaaaaaacaaaaaaactgtggtgggagcgccttgggccccagaaaaaggcttctaacaccacttgcgttggagcgcggggcccccagtgtctagcgagacacgtggacaagacacgggccgccaagagaaaccgcgacagaaacaggtccgtgggtttcccacaatataaaaaaccgccggggcaacaacgagggtcttggaccacctcaagggggcccggaggacatagcggatcattcacaggaggccaagggagccgaatcaat

SEQ ID NO: 451848 - DNA, 1838 bp, Homo sapiens
caccccaggaatggcgcccgcaagtccggggaggccgtcctgccggcccagcgcgtttcccgcgtccacgaggtccccgttccgccggcactggcggcgtccagcctgggtttgcccgcgctcgccgacgtggcggcctggccaagctcggcgccgctcaccagcgctgacctgggggtggtttgacctcccagtgcctcagtttcttcacaggagggtgtgaagacagagaatgaccacatcaacctgaaggtggccgggcaggacggctccgtggtgcagttcaagatcaagaggcacacgccgctgagcaagctgatgaaggcctactgcgagaggcagggcttgtcaatgaggcagatcagattcaggttcgacgggcagccaatcaatgaaactgacactccagcacagctggagatggaggacgaggacaccatcgacgtgttccagcagcagacgggaggtgtgccggagagcagcctggcagggcacagtttctagagggcccgtccccagcccgggccgtccatcctcgcattgctgttgaatggtgagcacgtgaccatgccgaccacaaaggtgtctgcggaaactcgaggacattcaccacgatgattttcctctctttgatgtacttcaagtgcaactcaaaactatatctgcagggatgaatctgtaacttaaattgggccaatcagaattgttatctttgttcaggtaaaatgagttgcaagatattgtgggtacttttgtgtgctcatttgtgttttccccccctcctacaacatttttttaaccccaaaattatagcctgaatgttcgcttttagtctggccagggatctgactcctgagttggttgcctctcccctgctcactccagtcacatagagaattggtgtttcccgcagtggggatgcagctgttggacaggtattgggggcaaggttggtagggaggacagactgtcacttgctgttacaggcacaggtgattaaaatgctaaatattgcaaatttaagctttgtcagtatatggaaaagttgaagggaaaatactggaatgcttcttcaaaggttaaaaaataaccgagtcttttggtaatttgaccccacgtgctctctggccctcaagcatgtaacctcggggtctgaggcccaggacccacccccctgccacccctcccaccccactccctgctcagtacctggcgttggtacacaggcaaggattggcacaaccaaaattggcctttttctccctcttaatattgaagaaattcccacatttctcatttggtaatggtgttgtggcctcagatttcttctagtatttgcttctgatgaatgattatggtctatacataaaaaagtaagactaagtattgctgaatttgcagttatgttgtcgtgtataagagctacttccaagtgtggttacaaatgaacccatggaatgatgacttcatgttcttctcgtgggtttgtgccgtgctgctttccaaataggtattgaatttatgcattagtctggtgatttcagttctgtgaaatattttgggatctataccaattaaacattttcatagttctgcctattgtccttccctgaggctccattgctgcttggtggccattctctgcctttttacagtcacctgaacaatgacccatcatctcttgcttgcttgaaatcttgctgaaatgttctcatttcctgtttgctgtatgggctcgggtgggatgtttgttggctctgttgtgtttattcaccaatttgtacattatttgttgtcctttactactgtaaacagtaaatatagtttggtattctgtc

SEQ ID NO: 451849 - DNA, 1561 bp, Homo sapiens
  misc_feature (55)..(55): n is a, c, g, or t
tatacgaatcgagctcgtgtacccagcggaacaagcaagctgatgaaggcctacngcgagaggcaggcttgtcaatgaggcagatcagattcaggttcgacgggcagccaatcaatgaaactgacactccagcacagctggagatggaggacgaggacaccatcgacgtgttccagcagcagacgggaggtgtgccggagagcagcctggcagggcacagtttctagagggcccgtccccagcccgggccgtccatcctcgcattgctgttgaatggtgagcacgtgaccatgccgaccacaaaggtgtctgcggaaactcgaggacattcaccacgatgattttcctctctttgatgtacttcaagtgcaactcaaaactatatctgcagggatgaatctgtaacttaaattgggccaatcagaattgttatctttgttcaggtaaaatgagttgcaagatattgtgggtacttttgtgtgctcatttgtgttttccccccctcctacaacatttttttaaccccaaaattatagcctgaatgttcgcttttagtctggccagggatctgactcctgagttggttgcctctcccctgctcactccagtcacatagagaattggtgtttcccgcagtggggatgcagctgttggacaggtattgggggcaaggttggtagggaggacagactgtcacttgctgttacaggcacaggtgattaaaatgctaaatattgcaaatttaagctttgtcagtatatggaaaagttgaagggaaaatactggaatgcttcttcaaaggttaaaaaataaccgagtcttttggtaatttgaccccacgtgctctctggccctcaagcatgtaacctcggggtctgaggcccaggacccacccccctgccacccctcccaccccactccctgctcagtacctggcgttggtacacaggcaaggattggcacaaccaaaattggcctttttctccctcttaatattgaagaaattcccacatttctcatttggtaatggtgttgtggcctcagatttcttctagtatttgcttctgatgaatgattatggtctatacataaaaaagtaagactaagtattgctgaatttgcagttatgttgtcgtgtataagagctacttccaagtgtggttacaaatgaacccatggaatgatgacttcatgttcttctcgtgggtttgtgccgtgctgctttccaaataggtattgaatttatgcattagtctggtgatttcagttctgtgaaatattttgggatctataccaattaaacattttcatagttctgcctattgtccttccctgaggctccattgctgcttggtggccattctctgcctttttacagtcacctgaacaatgacccatcatctcttgcttgcttgaaatcttgctgaaatgttctcatttcctgtttgctgtatgggctcgggtgggatgtttgttggctctgttgtgtttattcaccaatttgtacattatttgttgtcctttactactgtaaacagtaaatatagtttggtattctgtc

SEQ ID NO: 451850 - DNA, 1721 bp, Homo sapiens
tgaacgcgcgcagccacgtgacccccgtgccggccaacgggtgcgccgggatttgggggataaagcgcggccccgcgcacagttgcggcgggagagcggcggggccgagagcgtgactcgcccgctccgcgctgcttcccccgcgccgcctccccgcgccgctcgcgcagccatgtccgaggagaagcccaaggagggtgtgaagacagagaatgaccacatcaacctgaaggtggccgggcaggacggctccgtggtgcagttcaagatcaagaggcacacgccgctgagcaagctgatgaaggcctactgcgagaggcagggcttgtcaatgaggcagatcagattcaggttcgacgggcagccaatcaatgaaactgacactccagcacagctggagatggaggacgaggacaccatcgattgctgttgaatggtgagcacgtgaccatgccgaccacaaaggtgtctgcggaaactcgaggacattcaccacgatgattttcctctctttgatgtacttcaagtgcaactcaaaactatatctgcagggatgaatctgtaacttaaattgggccaatcagaattgttatctttgttcaggtaaaatgagttgcaagatattgtgggtacttttgtgtgctcatttgtgttttccccccctcctacaacatttttttaaccccaaaattatagcctgaatgttcgcttttagtctggccagggatctgactcctgagttggttgcctctcccctgctcactccagtcacatagagaattggtgtttcccgcagtggggatgcagctgttggacaggtattgggggcaaggttggtagggaggacagactgtcacttgctgttacaggcacaggtgattaaaatgctaaatattgcaaatttaagctttgtcagtatatggaaaagttgaagggaaaatactggaatgcttcttcaaaggttaaaaaataaccgagtcttttggtaatttgaccccacgtgctctctggccctcaagcatgtaacctcggggtctgaggcccaggacccacccccctgccacccctcccaccccactccctgctcagtacctggcgttggtacacaggcaaggattggcacaaccaaaattggcctttttctccctcttaatattgaagaaattcccacatttctcatttggtaatggtgttgtggcctcagatttcttctagtatttgcttctgatgaatgattatggtctatacataaaaaagtaagactaagtattgctgaatttgcagttatgttgtcgtgtataagagctacttccaagtgtggttacaaatgaacccatggaatgatgacttcatgttcttctcgtgggtttgtgccgtgctgctttccaaataggtattgaatttatgcattagtctggtgatttcagttctgtgaaatattttgggatctataccaattaaacattttcatagttctgcctattgtccttccctgaggctccattgctgcttggtggccattctctgcctttttacagtcacctgaacaatgacccatcatctcttgcttgcttgaaatcttgctgaaatgttctcatttcctgtttgctgtatgggctcgggtgggatgtttgttggctctgttgtgtttattcaccaatttgtacattatttgttgtcctttactactgtaaacagtaaatatagtttggtattctgtc

SEQ ID NO: 451851 - DNA, 1140 bp, Homo sapiens
  misc_feature (768)..(768): n is a, c, g, or t
  misc_feature (858)..(858): n is a, c, g, or t
  misc_feature (869)..(869): n is a, c, g, or t
  misc_feature (880)..(880): n is a, c, g, or t
  misc_feature (885)..(885): n is a, c, g, or t
  misc_feature (890)..(890): n is a, c, g, or t
  misc_feature (904)..(904): n is a, c, g, or t
  misc_feature (908)..(908): n is a, c, g, or t
  misc_feature (914)..(914): n is a, c, g, or t
  misc_feature (921)..(921): n is a, c, g, or t
  misc_feature (923)..(923): n is a, c, g, or t
  misc_feature (952)..(952): n is a, c, g, or t
  misc_feature (959)..(959): n is a, c, g, or t
  misc_feature (969)..(969): n is a, c, g, or t
  misc_feature (981)..(981): n is a, c, g, or t
  misc_feature (986)..(986): n is a, c, g, or t
  misc_feature (994)..(994): n is a, c, g, or t
  misc_feature (1011)..(1011): n is a, c, g, or t
  misc_feature (1015)..(1016): n is a, c, g, or t
  misc_feature (1139)..(1139): n is a, c, g, or t
tgaacgcgcgcagccacgtgacccccgtgccggccaacgggtgcgccgggatttgggggataaagcgcggccccgcgcacagttgcggcgggagagcggcggggccgagagcgtgactcgcccgctccgcgctgcttcccccgcgccgcctccccgcgccgctcgcgcagccatgtccgaggagaagcccaaggagggtgtgaagacagagaatgaccacatcaacctgaaggtggccgggcaggacggctccgtggtgcagttcaagatcaagaggcacacgccgctgagcaagctgatgaaggcctactgcgagaggcagggcttgtcaatgaggcagatcagattcaggttcgacgggcagccaatcaatgaaactgacactccagcacagctggagatggaggacgaggacaccatcgacgtgttccagcagcagacgggaggtgtgccggagagcagcctggcagggcacagtttctagagggcccgtccccagcccgggccgtccatcctcgcattgctgttgaatggtgagcacgtgaccatgccgaccacaaaggtgtctgcggaaactcgaggacattcaccacgatgattttcctctctttgatgtacttcaagtgcaactcaaaactatatctgcagggatgaatctgtaacttaaattgggccaatcagaattgttatctttgttcaggtaaaatgagttgcaagatattgtgggtacttttgtgtgctcatttgtgttttcccccccttttaaanacaaaattataactgcatgtcgctttatctgcaggatctgactctgatagtgctctcctgtcatcatcactagagattgtgttccgcatngggtgcatgtngaagtatgggncagtngtagnagaagatgtcatgntgtnaagcanagtgatnangtatatgcatcactgtatatgtaatgagnaatatgnagtctcagtnaatacgatcttngtatntacatgtntgctcacatatcggtgncatnncctgcactcacatctgtatatctgtaagcagtgaacaatgcttttcttatgaatcaattatgagttgtgatctaatgtatagtagtataatatagttgatcatattgtaatatcatgtatacng

SEQ ID NO: 451852 - DNA, 5676 bp, Homo sapiens
tttgtgtagatacttacaaggagattacgatttcggttggaacgtgcacctggtgaaactgcattgattgacaggactggcagaatgttgaagatggaacctttggctacagttgaatctctggaacagtaccttttgaaaatggtagcaaaacagtggtatgattttgaccgatcttcatttgtttttgttcgaaaattaagagaaggacaaaattttatatttcggcaccagcatgattttgatgaaaatggaatcatttactggattggaacaaatgcaaaaactgcttatgaatgggtaaatccagctgcctatggacttgtagtagtaacgtcatcagaaggaagaaatctaccttatggccgcttagaagacatactaagtcgtgataattcagctttaaattgtcatagcaatgatgataagaatgcctggtttgccatagatctgggtctctgggtgataccatcagcatatacacttcgtcatgctcgtggttatggaaggtctgcactgagaaattgggttttccaggtatccaaagatggacagaactggacttctttgtatacccatgttgatgactgcagtctcaatgaaccagggtcaactgcaacttggcctcttgatccaccaaaggatgagaaacaagggtggagacatgtgagaattaaacagatggggaaaaatgccagtggacaaacacactacctctcattatctggattcgaactttatggcactgtaaatggagtatgtgaagatcagctagggaaagcagctaaagaagcagaagctaatcttagacggcagagacgtctagtacgttcccaggttctgaaatacatggttccaggagctcgtgttatcagaggcctggattggaaatggcgagatcaggatggcagcccacagggagaaggcactgtcacaggagaactacacaatggctggattgatgtcacctgggatgctggtggctcaaactcttaccgtatgggcgcagaaggaaaatttgacctcaagcttgcaccagggtacgaccctgatacagtggcatcacccaaacctgtttcatccactgtttcaggcacaacgcaatcatggagcagcttggtgaaaaacaactgtccagacaagacatctgctgctgcaggctcctcaagtagaaaaggaagcagcagttctgtgtgtagcgtggccagtagcagcgacatcagcttgggttcgaccaaaacggaacggagatcagaaattgtaatggaacacagtatagtttcaggagctgatgtccatgaaccaattgttgttctttcatctgctgaaaacgtccctcaaacagaagtagggtcatcttccagtgcaagcaccagcaccttaacagcggaaacgggaagtgaaaatgctgaaaggaagttaggccctgatagttctgttcgtactcctggggagtctagtgcaatatccatgggaattgtcagtgttagttctcctgatgttagttcagtatctgaattaactaataaagaagcagcttcacaacgacctcttagctcttcagcaagtaacagactgtcagtgagttctttgttggctgctggggcccctatgagctctagtgcaagtgtacctaacctgtcctcaagagaaacatctagcttggagagttttgtaaggagagtggcaaacatagcacggactaatgccacgaacaacatgaatctaagccgaagcagcagtgataacaacactaatactttggggaggaatgtgatgagcacagcaacttctcctcttatgggtgctcagagtttccctaatttgaccacacctggtactacatcaacagtgactatgtcaacatccagtgttactagcagcagcaatgtagctacagcaacaacagttttatcagttggtcaatctttaagtaacactttaaccaccagcctcacatcaacttccagtgagagtgacacaggtcaggaagcagaatattccttatatgatttccttgatagctgccgtgccagtactctattggctgagctcgatgatgatgaggacttacctgagccagatgaagaagatgatgagaatgaagatgacaatcaggaggaccaagaatacgaggaggttatgattctgagacgcccatccctgcaacgtcgagctggctcccgctctgatgtaacgcatcatgctgttacctcgcagctaccacaggtacctgctggagcagggagccgacctattggggagcaggaagaagaagagtacgaaactaaaggaggacgccggagaacatgggatgatgattatgtgctaaagagacagttttctgcattggttcctgcttttgatcctagacctggtcgtactaatgtccagcagacaactgatctagaaataccacccccagggacccctcattcagagctcttggaagaagtcgaatgtactccgtcacctcgattagctctcactttgaaagtaacaggtcttggaacgactcgtgaagttgaattaccactcaccaatttcagatcaaccatcttttactatgtacaaaaattgcttcaattgtcctgtaatggcaatgtgaaatcagataaacttaggcgtatttgggagcccacatacacaatcatgtacagagaaatgaaggattctgataaagaaaaggaaaatggaaaaatgggttgctggtctatagagcatgtggagcagtaccttggcactgatgaattaccaaagaatgacttgataacctacctgcagaagaatgcagacgctgctttcctgcgccactggaaattaactggcactaataaaagtattaggaaaaacagaaattgttctcagctcatagctgcatataaggatttttgtgagcatggaacaaagtctgggttaaaccagggggccatttctactcttcaaagtagtgatattcttaatttaacaaaagaacaacctcaggccaaagcaggcaatggacagaactcttgtggagtagaagatgtccttcagcttctgcgtattctgtatatagttgcaagtgacccttattcaagaatatcccaggaagatggtgatgaacagcctcagtttacttttccaccagatgaattcactagcaaaaaaattacaacaaaaatattacagcagattgaggaaccattggcactggcaagtggggctctgccagactggtgtgaacaattaaccagcaaatgtccttttctaataccatttgaaactagacagctttatttcacatgtacagcatttggcgcctcaagagcaatagtatggttacagaaccgacgtgaagccactgtggagcgaacgagaaccacaagcagtgttaggcgagatgaccctggagagtttcgagttggtcgtctcaagcatgaaagagtaaaagttccacgtggcgagtcactgatggaatgggctgagaatgtcatgcaaatacatgcagatcggaaatcagttcttgaggttgaatttttaggagaagaaggaactggcttgggacccacattagagttttatgctctggtggcagcagaattccagagaactgacttgggagcttggctttgtgatgataattttccagatgatgaatctcgtcacgttgatcttggaggtggattgaaacctcctggatattatgtgcagaggtcatgtggactgttcacagcaccatttccacaggatagtgatgagcttgaaaggatcacgaaactgtttcatttccttggaattttcttggccaaatgcattcaagacaatagacttgtggacttacctatttctaaacctttttttaaacttatgtgtatgggtgacattaaaagcaatatgagtaaactgatttatgagtcacgaggtgatagagacttacactgtactgaaagtcagtctgaagcttctacagaagaaggtcatgattcactctcggtaggaagctttgaagaggattcaaaatcagaatttattcttgatccccctaaaccaaaacccccagcttggtttaatggaattttgacttgggaagactttgaattagtaaacccacacagagccagatttttaaaagaaattaaagaccttgctatcaagaggcgccaaattttaagcaacaaaggtctttctgaagatgagaagaacacaaaattacaggaactagtgctgaagaatccatcaggttctgggcctccacttagcatagaggatttaggtttaaatttccagttttgcccttcctcaagaatatatggttttacagctgtggatctcaagccaagtggtgaagatgagatgataacaatggataatgcagaagaatatgtggatttgatgtttgacttttgtatgcatacgggtattcagaaacaaatggaagcctttagagatgggtttaataaagtttttccaatggagaaattaagttccttcagccatgaagaagtccaaatgattctttgtggaaaccagtcaccatcctgggcagcagaggatattatcaattacactgaacctaagctgggttatacacgtgacagccctggtttcctgaggtttgtgagggttttatgtggcatgtcttctgatgaaaggaaagcattcttgcagtttaccactggttgttcaactctacccccaggtggactggctaacctgcatcccaggctcacggttgtacgcaaggttgatgctactgatgcaagctatccatcagtcaatacatgtgtgcattaccttaagttgcctgaatattcttccgaggagatcatgagagagcgcctgctagctgctacaatggagaaaggctttcatctcaattgagctttgaagtgcaatgggagacatcagagactttaaaaatactagtgaagcctcttgtgtttgtgtgcagagaagtatatgatccaccatgctaatgacacttgcctttttttccaccattaaggctttaagaacatgtggaataagttttttagctgctaatgacaaaacaaatcctgtaactacccagccagcaagtatatagcacagaacactgtgttactttacaagggcttatgtgactggaataaggtggtcccacttgactgttccaaagagcagcttctcagatcttcagtgttcactggtaaatttctaacagtgtatttgtgtaaagtttgtcatttcatactccatacactacagttgctgtcactgatccctgttttgctggcttttaagctacttggtcaaaaatcctgcttccttaaaacatagagaattaatgagcatctcaagctttttcttttcctttttaatgatgcctgcactatcaagagtattctagtgttctctctttgtttggcatataatcatgcaccaaactttttatttctttaaggtgggagtatatttttatttcctaaatgccatactatgaagatcaaagtcttaagtgtgtttgcagctcaaaaataaagatgtattaaggggggaaaacctggtctaagtgcaaggcacacttacagcgagttttactttcggttgtattttctttgtatattataaacatttatttaacttgttgccgtttgaagtaaaaaatttccaaaatgtatgctcaacaataatcattaaaatgtttgcagcgta

SEQ ID NO: 451853 - DNA, 272 bp, Homo sapiens
aaacatgtgctgtgtccactcagggttaaatggattaagggcggtgcaagatgtgctttgttaaacagatgcttgaaggcagcatgctcgttaagagtcatcaccactccctaatctcaagtacccagggacacaaacactgcggaaggccgcagggtcctctgcctaggaaaaccagagacctttgttcacttatttaacttgttgccgtttgaagtaaaaaatttccaaaatgtatgctcaacaataatcattaaaatgtttgcagcgta

SEQ ID NO: 451854 - DNA, 5050 bp, Homo sapiens
  misc_feature (6)..(7): n is a, c, g, or t
  misc_feature (33)..(33): n is a, c, g, or t
  misc_feature (38)..(38): n is a, c, g, or t
gcggcnnctactactactaaattcgcggccgcntgacnatgtgagaattaaacagatggggaaaaatgccagtggacaaacacactacctctcattatctggattcgaactttatggcactgtaaatggagtatgtgaagatcagctagggaaagcagctaaagaagcagaagctaatcttagacggcagagacgtctagtacgttcccaggttctgaaatacatggttccaggagctcgtgttatcagaggcctggattggaaatggcgagatcaggatggcagcccacagggagaaggcactgtcacaggagaactacacaatggctggattgatgtcacctgggatgctggtggctcaaactcttaccgtatgggcgcagaaggaaaatttgacctcaagcttgcaccagggtacgaccctgatacagtggcatcacccaaacctgtttcatccactgtttcaggcacaacgcaatcatggagcagcttggtgaaaaacaactgtccagacaagacatctgctgctgcaggctcctcaagtagaaaaggaagcagcagttctgtgtgtagcgtggccagtagcagcgacatcagcttgggttcgaccaaaacggaacggagatcagaaattgtaatggaacacagtatagtttcaggagctgatgtccatgaaccaattgttgttctttcatctgctgaaaacgtccctcaaacagaagtagggtcatcttccagtgcaagcaccagcaccttaacagcggaaacgggaagtgaaaatgctgaaaggaagttaggccctgatagttctgttcgtactcctggggagtctagtgcaatatccatgggaattgtcagtgttagttctcctgatgttagttcagtatctgaattaactaataaagaagcagcttcacaacgacctcttagctcttcagcaagtaacagactgtcagtgagttctttgttggctgctggggcccctatgagctctagtgcaagtgtacctaacctgtcctcaagagaaacatctagcttggagagttttgtaaggagagtggcaaacatagcacggactaatgccacgaacaacatgaatctaagccgaagcagcagtgataacaacactaatactttggggaggaatgtgatgagcacagcaacttctcctcttatgggtgctcagagtttccctaatttgaccacacctggtactacatcaacagtgactatgtcaacatccagtgttactagcagcagcaatgtagctacagcaacaacagttttatcagttggtcaatctttaagtaacactttaaccaccagcctcacatcaacttccagtgagagtgacacaggtcaggaagcagaatattccttatatgatttccttgatagctgccgtgccagtactctattggctgagctcgatgatgatgaggacttacctgagccagatgaagaagatgatgagaatgaagatgacaatcaggaggaccaagaatacgaggaggttatgattctgagacgcccatccctgcaacgtcgagctggctcccgctctgatgtaacgcatcatgctgttacctcgcagctaccacaggtacctgctggagcagggagccgacctattggggagcaggaagaagaagagtacgaaactaaaggaggacgccggagaacatgggatgatgattatgtgctaaagagacagttttctgcattggttcctgcttttgatcctagacctggtcgtactaatgtccagcagacaactgatctagaaataccacccccagggacccctcattcagagctcttggaagaagtcgaatgtactccgtcacctcgattagctctcactttgaaagtaacaggtcttggaacgactcgtgaagttgaattaccactcaccaatttcagatcaaccatcttttactatgtacaaaaattgcttcaattgtcctgtaatggcaatgtgaaatcagataaacttaggcgtatttgggagcccacatacacaatcatgtacagagaaatgaaggattctgataaagaaaaggaaaatggaaaaatgggttgctggtctatagagcatgtggagcagtaccttggcactgatgaattaccaaagaatgacttgataacctacctgcagaagaatgcagacgctgctttcctgcgccactggaaattaactggcactaataaaagtattaggaaaaacagaaattgttctcagctcatagctgcatataaggatttttgtgagcatggaacaaagtctgggttaaaccagggggccatttctactcttcaaagtagtgatattcttaatttaacaaaagaacaacctcaggccaaagcaggcaatggacagaactcttgtggagtagaagatgtccttcagcttctgcgtattctgtatatagttgcaagtgacccttattcaagaatatcccaggaagatggtgatgaacagcctcagtttacttttccaccagatgaattcactagcaaaaaaattacaacaaaaatattacagcagattgaggaaccattggcactggcaagtggggctctgccagactggtgtgaacaattaaccagcaaatgtccttttctaataccatttgaaactagacagctttatttcacatgtacagcatttggcgcctcaagagcaatagtatggttacagaaccgacgtgaagccactgtggagcgaacgagaaccacaagcagtgttaggcgagatgaccctggagagtttcgagttggtcgtctcaagcatgaaagagtaaaagttccacgtggcgagtcactgatggaatgggctgagaatgtcatgcaaatacatgcagatcggaaatcagttcttgaggttgaatttttaggagaagaaggaactggcttgggacccacattagagttttatgctctggtggcagcagaattccagagaactgacttgggagcttggctttgtgatgataattttccagatgatgaatctcgtcacgttgatcttggaggtggattgaaacctcctggatattatgtgcagaggtcatgtggactgttcacagcaccatttccacaggatagtgatgagcttgaaaggatcacgaaactgtttcatttccttggaattttcttggccaaatgcattcaagacaatagacttgtggacttacctatttctaaacctttttttaaacttatgtgtatgggtgacattaaaagcaatatgagtaaactgatttatgagtcacgaggtgatagagacttacactgtactgaaagtcagtctgaagcttctacagaagaaggtcatgattcactctcggtaggaagctttgaagaggattcaaaatcagaatttattcttgatccccctaaaccaaaacccccagcttggtttaatggaattttgacttgggaagactttgaattagtaaacccacacagagccagatttttaaaagaaattaaagaccttgctatcaagaggcgccaaattttaagcaacaaaggtctttctgaagatgagaagaacacaaaattacaggaactagtgctgaagaatccatcaggttctgggcctccacttagcatagaggatttaggtttaaatttccagttttgcccttcctcaagaatatatggttttacagctgtggatctcaagccaagtggtgaagatgagatgataacaatggataatgcagaagaatatgtggatttgatgtttgacttttgtatgcatacgggtattcagaaacaaatggaagcctttagagatgggtttaataaagtttttccaatggagaaattaagttccttcagccatgaagaagtccaaatgattctttgtggaaaccagtcaccatcctgggcagcagaggatattatcaattacactgaacctaagctgggttatacacgtgacagccctggtttcctgaggtttgtgagggttttatgtggcatgtcttctgatgaaaggaaagcattcttgcagtttaccactggttgttcaactctacccccaggtggactggctaacctgcatcccaggctcacggttgtacgcaaggttgatgctactgatgcaagctatccatcagtcaatacatgtgtgcattaccttaagttgcctgaatattcttccgaggagatcatgagagagcgcctgctagctgctacaatggagaaaggctttcatctcaattgagctttgaagtgcaatgggagacatcagagactttaaaaatactagtgaagcctcttgtgtttgtgtgcagagaagtatatgatccaccatgctaatgacacttgcctttttttccaccattaaggctttaagaacatgtggaataagttttttagctgctaatgacaaaacaaatcctgtaactacccagccagcaagtatatagcacagaacactgtgttactttacaagggcttatgtgactggaataaggtggtcccacttgactgttccaaagagcagcttctcagatcttcagtgttcactggtaaatttctaacagtgtatttgtgtaaagtttgtcatttcatactccatacactacagttgctgtcactgatccctgttttgctggcttttaagctacttggtcaaaaatcctgcttccttaaaacatagagaattaatgagcatctcaagctttttcttttcctttttaatgatgcctgcactatcaagagtattctagtgttctctctttgtttggcatataatcatgcaccaaactttttatttctttaaggtgggagtatatttttatttcctaaatgccatactatgaagatcaaagtcttaagtgtgtttgcagctcaaaaataaagatgtattaaggggggaaaacctggtctaagtgcaaggcacacttacagcgagttttactttcggttgtattttctttgtatattataaacatttatttaacttgttgccgtttgaagtaaaaaatttccaaaatgtatgctcaacaataatcattaaaatgtttgcagcgta

SEQ ID NO: 451855 - DNA, 5147 bp, Homo sapiens
tttgtgtagatacttacaaggagattacgatttcggttggaacgtgcacctggtgaaactgcattgattgacaggactggcagaatgttgaagatggaacctttggctacagttgaatctctggaacagtaccttttgaaaatggtagcaaaacagtggtatgattttgaccgatcttcatttgtttttgttcgaaaattaagagaaggacaaaattttatatttcggcaccagcatgattttgatgaaaatggaatcatttactggattggaacaaatgcaaaaactgcttatgaatgggtaaatccagctgcctatggacttgtagtagtaacgtcatcagaaggaagaaatctaccttatggccgcttagaagacatactaagtcgtgataattcagctttaaattgtcatagcaatgatgataagaatgcctggtttgccatagatctgggtctctgggtgataccatcagcatatacacttcgtcatgctcgtggttatggaaggtctgcactgagaaattgggttttccaggtatccaaagatggacagaactggacttctttgtatacccatgttgatgactgcagtctcaatgaaccagggtcaactgcaacttggcctcttgatccaccaaaggatgagaaacaagggtggagacatgtgagaattaaacagatggggaaaaatgccagtggacaaacacactacctctcattatctggattcgaactttatggcactgtaaatggagtatgtgaagatcagctagggaaagcagctaaagaagcagaagctaatcttagacggcagagacgtctagtacgttcccaggttctgaaatacatggttccaggagctcgtgttatcagaggcctggattggaaatggcgagatcaggatggcagcccacagggagaaggcactgtcacaggagaactacacaatggcacaacgcaatcatggagcagcttggtgaaaaacaactgtccagacaagacatctgctgctgcaggctcctcaagtagaaaaggaagcagcagttctgtgtgtagcgtggccagtagcagcgacatcagcttgggttcgaccaaaacggaacggagatcagaaattgtaatggaacacagtatagtttcaggagctgatgtccatgaaccaattgttgttctttcatctgctgaaaacgtccctcaaacagaagtagggtcatcttccagtgcaagcaccagcaccttaacagcggaaacgggaagtgaaaatgctgaaaggaagttaggccctgatagttctgttcgtactcctggggagtctagtgcaatatccatgggaattgtcagtgttagttctcctgatgttagttcagtatctgaattaactaataaagaagcagcttcacaacgacctcttagctcttcagcctcacatcaacttccagtgagagtgacacaggtcaggaagcagaatattccttatatgatttccttgatagctgccgtgccagtactctattggctgagctcgatgatgatgaggacttacctgagccagatgaagaagatgatgagaatgaagatgacaatcaggaggaccaagaatacgaggaggttatgattctgagacgcccatccctgcaacgtcgagctggctcccgctctgatgtaacgcatcatgctgttacctcgcagctaccacaggtacctgctggagcagggagccgacctattggggagcaggaagaagaagagtacgaaactaaaggaggacgccggagaacatgggatgatgattatgtgctaaagagacagttttctgcattggttcctgcttttgatcctagacctggtcgtactaatgtccagcagacaactgatctagaaataccacccccagggacccctcattcagagctcttggaagaagtcgaatgtactccgtcacctcgattagctctcactttgaaagtaacaggtcttggaacgactcgtgaagttgaattaccactcaccaatttcagatcaaccatcttttactatgtacaaaaattgcttcaattgtcctgtaatggcaatgtgaaatcagataaacttaggcgtatttgggagcccacatacacaatcatgtacagagaaatgaaggattctgataaagaaaaggaaaatggaaaaatgggttgctggtctatagagcatgtggagcagtaccttggcactgatgaattaccaaagaatgacttgataacctacctgcagaagaatgcagacgctgctttcctgcgccactggaaattaactggcactaataaaagtattaggaaaaacagaaattgttctcagctcatagctgcatataaggatttttgtgagcatggaacaaagtctgggttaaaccagggggccatttctactcttcaaagtagtgatattcttaatttaacaaaagaacaacctcaggccaaagcaggcaatggacagaactcttgtggagtagaagatgtccttcagcttctgcgtattctgtatatagttgcaagtgacccttattcaagaatatcccaggaagatggtgatgaacagcctcagtttacttttccaccagatgaattcactagcaaaaaaattacaacaaaaatattacagcagattgaggaaccattggcactggcaagtggggctctgccagactggtgtgaacaattaaccagcaaatgtccttttctaataccatttgaaactagacagctttatttcacatgtacagcatttggcgcctcaagagcaatagtatggttacagaaccgacgtgaagccactgtggagcgaacgagaaccacaagcagtgttaggcgagatgaccctggagagtttcgagttggtcgtctcaagcatgaaagagtaaaagttccacgtggcgagtcactgatggaatgggctgagaatgtcatgcaaatacatgcagatcggaaatcagttcttgaggttgaatttttaggagaagaaggaactggcttgggacccacattagagttttatgctctggtggcagcagaattccagagaactgacttgggagcttggctttgtgatgataattttccagatgatgaatctcgtcacgttgatcttggaggtggattgaaacctcctggatattatgtgcagaggtcatgtggactgttcacagcaccatttccacaggatagtgatgagcttgaaaggatcacgaaactgtttcatttccttggaattttcttggccaaatgcattcaagacaatagacttgtggacttacctatttctaaacctttttttaaacttatgtgtatgggtgacattaaaagcaatatgagtaaactgatttatgagtcacgaggtgatagagacttacactgtactgaaagtcagtctgaagcttctacagaagaaggtcatgattcactctcggtaggaagctttgaagaggattcaaaatcagaatttattcttgatccccctaaaccaaaacccccagcttggtttaatggaattttgacttgggaagactttgaattagtaaacccacacagagccagatttttaaaagaaattaaagaccttgctatcaagaggcgccaaattttaagcaacaaaggtctttctgaagatgagaagaacacaaaattacaggaactagtgctgaagaatccatcaggttctgggcctccacttagcatagaggatttaggtttaaatttccagttttgcccttcctcaagaatatatggttttacagctgtggatctcaagccaagtggtgaagatgagatgataacaatggataatgcagaagaatatgtggatttgatgtttgacttttgtatgcatacgggtattcagaaacaaatggaagcctttagagatgggtttaataaagtttttccaatggagaaattaagttccttcagccatgaagaagtccaaatgattctttgtggaaaccagtcaccatcctgggcagcagaggatattatcaattacactgaacctaagctgggttatacacgtgacagccctggtttcctgaggtttgtgagggttttatgtggcatgtcttctgatgaaaggaaagcattcttgcagtttaccactggttgttcaactctacccccaggtggactggctaacctgcatcccaggctcacggttgtacgcaaggttgatgctactgatgcaagctatccatcagtcaatacatgtgtgcattaccttaagttgcctgaatattcttccgaggagatcatgagagagcgcctgctagctgctacaatggagaaaggctttcatctcaattgagctttgaagtgcaatgggagacatcagagactttaaaaatactagtgaagcctcttgtgtttgtgtgcagagaagtatatgatccaccatgctaatgacacttgcctttttttccaccattaaggctttaagaacatgtggaataagttttttagctgctaatgacaaaacaaatcctgtaactacccagccagcaagtatatagcacagaacactgtgttactttacaagggcttatgtgactggaataaggtggtcccacttgactgttccaaagagcagcttctcagatcttcagtgttcactggtaaatttctaacagtgtatttgtgtaaagtttgtcatttcatactccatacactacagttgctgtcactgatccctgttttgctggcttttaagctacttggtcaaaaatcctgcttccttaaaacatagagaattaatgagcatctcaagctttttcttttcctttttaatgatgcctgcactatcaagagtattctagtgttctctctttgtttggcatataatcatgcaccaaactttttatttctttaaggtgggagtatatttttatttcctaaatgccatactatgaagatcaaagtcttaagtgtgtttgcagctcaaaaataaagatgtattaaggggggaaaacctggtctaagtgcaaggcacacttacagcgagttttactttcggttgtattttctttgtatattataaacatttatttaacttgttgccgtttgaagtaaaaaatttccaaaatgtatgctcaacaataatcattaaaatgtttgcagcgta

SEQ ID NO: 451856 - DNA, 5508 bp, Homo sapiens
tttgtgtagatacttacaaggagattacgatttcggttggaacgtgcacctggtgaaactgcattgattgacaggactggcagaatgttgaagatggaacctttggctacagttgaatctctggaacagtaccttttgaaaatggtagcaaaacagtggtatgattttgaccgatcttcatttgtttttgttcgaaaattaagagaaggacaaaattttatatttcggcaccagcatgattttgatgaaaatggaatcatttactggattggaacaaatgcaaaaactgcttatgaatgggtaaatccagctgcctatggacttgtagtagtaacgtcatcagaaggaagaaatctaccttatggccgcttagaagacatactaagtcgtgataattcagctttaaattgtcatagcaatgatgataagaatgcctggtttgccatagatctgggtctctgggtgataccatcagcatatacacttcgtcatgctcgtggttatggaaggtctgcactgagaaattgggttttccaggtatccaaagatggacagaactggacttctttgtatacccatgttgatgactgcagtctcaatgaaccagggtcaactgcaacttggcctcttgatccaccaaaggatgagaaacaagggtggagacatgtgagaattaaacagatggggaaaaatgccagtggacaaacacactacctctcattatctggattcgaactttatggcactgtaaatggagtatgtgaagatcagctagggaaagcagctaaagaagcagaagctaatcttagacggcagagacgtctagtacgttcccaggttctgaaatacatggttccaggagctcgtgttatcagaggcctggattggaaatggcgagatcaggatggcagcccacagggagaaggcactgtcacaggagaactacacaatggcacaacgcaatcatggagcagcttggtgaaaaacaactgtccagacaagacatctgctgctgcaggctcctcaagtagaaaaggaagcagcagttctgtgtgtagcgtggccagtagcagcgacatcagcttgggttcgaccaaaacggaacggagatcagaaattgtaatggaacacagtatagtttcaggagctgatgtccatgaaccaattgttgttctttcatctgctgaaaacgtccctcaaacagaagtagggtcatcttccagtgcaagcaccagcaccttaacagcggaaacgggaagtgaaaatgctgaaaggaagttaggccctgatagttctgttcgtactcctggggagtctagtgcaatatccatgggaattgtcagtgttagttctcctgatgttagttcagtatctgaattaactaataaagaagcagcttcacaacgacctcttagctcttcagcaagtaacagactgtcagtgagttctttgttggctgctggggcccctatgagctctagtgcaagtgtacctaacctgtcctcaagagaaacatctagcttggagagttttgtaaggagagtggcaaacatagcacggactaatgccacgaacaacatgaatctaagccgaagcagcagtgataacaacactaatactttggggaggaatgtgatgagcacagcaacttctcctcttatgggtgctcagagtttccctaatttgaccacacctggtactacatcaacagtgactatgtcaacatccagtgttactagcagcagcaatgtagctacagcaacaacagttttatcagttggtcaatctttaagtaacactttaaccaccagcctcacatcaacttccagtgagagtgacacagatttccttgatagctgccgtgccagtactctattggctgagctcgatgatgatgaggacttacctgagccagatgaagaagatgatgagaatgaagatgacaatcaggaggaccaagaatacgaggaggttatgattctgagacgcccatccctgcaacgtcgagctggctcccgctctgatgtaacgcatcatgctgttacctcgcagctaccacaggtacctgctggagcagggagccgacctattggggagcaggaagaagaagagtacgaaactaaaggaggacgccggagaacatgggatgatgattatgtgctaaagagacagttttctgcattggttcctgcttttgatcctagacctggtcgtactaatgtccagcagacaactgatctagaaataccacccccagggacccctcattcagagctcttggaagaagtcgaatgtactccgtcacctcgattagctctcactttgaaagtaacaggtcttggaacgactcgtgaagttgaattaccactcaccaatttcagatcaaccatcttttactatgtacaaaaattgcttcaattgtcctgtaatggcaatgtgaaatcagataaacttaggcgtatttgggagcccacatacacaatcatgtacagagaaatgaaggattctgataaagaaaaggaaaatggaaaaatgggttgctggtctatagagcatgtggagcagtaccttggcactgatgaattaccaaagaatgacttgataacctacctgcagaagaatgcagacgctgctttcctgcgccactggaaattaactggcactaataaaagtattaggaaaaacagaaattgttctcagctcatagctgcatataaggatttttgtgagcatggaacaaagtctgggttaaaccagggggccatttctactcttcaaagtagtgatattcttaatttaacaaaagaacaacctcaggccaaagcaggcaatggacagaactcttgtggagtagaagatgtccttcagcttctgcgtattctgtatatagttgcaagtgacccttattcaagaatatcccaggaagatggtgatgaacagcctcagtttacttttccaccagatgaattcactagcaaaaaaattacaacaaaaatattacagcagattgaggaaccattggcactggcaagtggggctctgccagactggtgtgaacaattaaccagcaaatgtccttttctaataccatttgaaactagacagctttatttcacatgtacagcatttggcgcctcaagagcaatagtatggttacagaaccgacgtgaagccactgtggagcgaacgagaaccacaagcagtgttaggcgagatgaccctggagagtttcgagttggtcgtctcaagcatgaaagagtaaaagttccacgtggcgagtcactgatggaatgggctgagaatgtcatgcaaatacatgcagatcggaaatcagttcttgaggttgaatttttaggagaagaaggaactggcttgggacccacattagagttttatgctctggtggcagcagaattccagagaactgacttgggagcttggctttgtgatgataattttccagatgatgaatctcgtcacgttgatcttggaggtggattgaaacctcctggatattatgtgcagaggtcatgtggactgttcacagcaccatttccacaggatagtgatgagcttgaaaggatcacgaaactgtttcatttccttggaattttcttggccaaatgcattcaagacaatagacttgtggacttacctatttctaaacctttttttaaacttatgtgtatgggtgacattaaaagcaatatgagtaaactgatttatgagtcacgaggtgatagagacttacactgtactgaaagtcagtctgaagcttctacagaagaaggtcatgattcactctcggtaggaagctttgaagaggattcaaaatcagaatttattcttgatccccctaaaccaaaacccccagcttggtttaatggaattttgacttgggaagactttgaattagtaaacccacacagagccagatttttaaaagaaattaaagaccttgctatcaagaggcgccaaattttaagcaacaaaggtctttctgaagatgagaagaacacaaaattacaggaactagtgctgaagaatccatcaggttctgggcctccacttagcatagaggatttaggtttaaatttccagttttgcccttcctcaagaatatatggttttacagctgtggatctcaagccaagtggtgaagatgagatgataacaatggataatgcagaagaatatgtggatttgatgtttgacttttgtatgcatacgggtattcagaaacaaatggaagcctttagagatgggtttaataaagtttttccaatggagaaattaagttccttcagccatgaagaagtccaaatgattctttgtggaaaccagtcaccatcctgggcagcagaggatattatcaattacactgaacctaagctgggttatacacgtgacagccctggtttcctgaggtttgtgagggttttatgtggcatgtcttctgatgaaaggaaagcattcttgcagtttaccactggttgttcaactctacccccaggtggactggctaacctgcatcccaggctcacggttgtacgcaaggttgatgctactgatgcaagctatccatcagtcaatacatgtgtgcattaccttaagttgcctgaatattcttccgaggagatcatgagagagcgcctgctagctgctacaatggagaaaggctttcatctcaattgagctttgaagtgcaatgggagacatcagagactttaaaaatactagtgaagcctcttgtgtttgtgtgcagagaagtatatgatccaccatgctaatgacacttgcctttttttccaccattaaggctttaagaacatgtggaataagttttttagctgctaatgacaaaacaaatcctgtaactacccagccagcaagtatatagcacagaacactgtgttactttacaagggcttatgtgactggaataaggtggtcccacttgactgttccaaagagcagcttctcagatcttcagtgttcactggtaaatttctaacagtgtatttgtgtaaagtttgtcatttcatactccatacactacagttgctgtcactgatccctgttttgctggcttttaagctacttggtcaaaaatcctgcttccttaaaacatagagaattaatgagcatctcaagctttttcttttcctttttaatgatgcctgcactatcaagagtattctagtgttctctctttgtttggcatataatcatgcaccaaactttttatttctttaaggtgggagtatatttttatttcctaaatgccatactatgaagatcaaagtcttaagtgtgtttgcagctcaaaaataaagatgtattaaggggggaaaacctggtctaagtgcaaggcacacttacagcgagttttactttcggttgtattttctttgtatattataaacatttatttaacttgttgccgtttgaagtaaaaaatttccaaaatgtatgctcaacaataatcattaaaatgtttgcagcgta

SEQ ID NO: 451857 - DNA, 5482 bp, Homo sapiens
tttgtgtagatacttacaaggagattacgatttcggttggaacgtgcacctggtgaaactgcattgattgacaggactggcagaatgttgaagatggaacctttggctacagttgaatctctggaacagtaccttttgaaaatggtagcaaaacagtggtatgattttgaccgatcttcatttgtttttgttcgaaaattaagagaaggacaaaattttatatttcggcaccagcatgattttgatgaaaatggaatcatttactggattggaacaaatgcaaaaactgcttatgaatgggtaaatccagctgcctatggacttgtagtagtaacgtcatcagaaggaagaaatctaccttatggccgcttagaagacatactaagtcgtgataattcagctttaaattgtcatagcaatgatgataagaatgcctggtttgccatagatctgggtctctgggtgataccatcagcatatacacttcgtcatgctcgtggttatggaaggtctgcactgagaaattgggttttccaggtatccaaagatggacagaactggacttctttgtatacccatgttgatgactgcagtctcaatgaaccagggtcaactgcaacttggcctcttgatccaccaaaggatgagaaacaagggtggagacatgtgagaattaaacagatggggaaaaatgccagtggacaaacacactacctctcattatctggattcgaactttatggcactgtaaatggagtatgtgaagatcagctagggaaagcagctaaagaagcagaagctaatcttagacggcagagacgtctagtacgttcccaggttctgaaatacatggttccaggagctcgtgttatcagaggcctggattggaaatggcgagatcaggatggcagcccacagggagaaggcactgtcacaggagaactacacaatggcacaacgcaatcatggagcagcttggtgaaaaacaactgtccagacaagacatctgctgctgcaggctcctcaagtagaaaaggaagcagcagttctgtgtgtagcgtggccagtagcagcgacatcagcttgggttcgaccaaaacggaacggagatcagaaattgtaatggaacacagtatagtttcaggagctgatgtccatgaaccaattgttgttctttcatctgctgaaaacgtccctcaaacagaagtagggtcatcttccagtgcaagcaccagcaccttaacagcggaaacgggaagtgaaaatgctgaaaggaagttaggccctgatagttctgttcgtactcctggggagtctagtgcaatatccatgggaattgtcagtgttagttctcctgatgttagttcagtatctgaattaactaataaagaagcagcttcacaacgacctcttagctcttcagcaagtaacagactgtcagtgagttctttgttggctgctggggcccctatgagctctagtgcaagtgtacctaacctgtcctcaagagaaacatctagcttggagagttttgtaaggagagtggcaaacatagcacggactaatgccacgaacaacatgaatctaagccgaagcagcagtgataacaacactaatactttggggaggaatgtgatgagcacagcaacttctcctcttatgggtgctcagagtttccctaatttgaccacacctggtactacatcaacagtgactatgtcaacatccagtgttactagcagcagcaatgtagctacagcaacaacagttttatcagttggtcaatctttaagtaacactttaaccaccagcctcacatcaacttccagtgagagtgacacaggtcaggaagcagaatattccttatatgatttccttgatagctgccgtgccagtactctattggctgagctcgatgatgatgaggacttacctgagccagatgaagaagatgatgagaatgaagatgacaatcaggaggaccaagaatacgaggaggttatgattctgagacgcccatccctgcaacgtcgagctggctcccgctctgatgtaacgcatcatgctgttacctcgcagctaccacaggtacctgctggagcagggagccgacctattggggagcaggaagaagaagagtacgaaactaaaggaggacgccggagaacatgggatgatgattatgtgctaaagagacagttttctgcattggttcctgcttttgatcctagacctggtcgtactaatgtccagcagacaactgatctagaaataccacccccagggacccctcattcagagctcttggaagaagtcgaatgtactccgtcacctcgattagctctcactttgaaagtaacaggtcttggaacgactcgtgaagttgaattaccactcaccaatttcagatcaaccatcttttactatgtacaaaaattgcttcaattgtcctgtaatggcaatgtgaaatcagataaacttaggcgtatttgggagcccacatacacaatcatgtacagagaaatgaaggattctgataaagaaaaggaaaatggaaaaatgggttgctggtctatagagcatgtggagcagtaccttggcactgatgaattaccaaagaatgacttgataacctacctgcagaagaatgcagacgctgctttcctgcgccactggaaattaactggcactaataaaagtattaggaaaaacagaaattgttctcagctcatagctgcatataaggatttttgtgagcatggaacaaagtctgggttaaaccagggggccatttctactcttcaaagtagtgatattcttaatttaacaaaagaacaacctcaggccaaagcaggcaatggacagaactcttgtggagtagaagatgtccttcagcttctgcgtattctgtatatagttgcaagtgacccttattcaagaatatcccaggaagatggtgatgaacagcctcagtttacttttccaccagatgaattcactagcaaaaaaattacaacaaaaatattacagcagattgaggaaccattggcactggcaagtggggctctgccagactggtgtgaacaattaaccagcaaatgtccttttctaataccatttgaaactagacagctttatttcacatgtacagcatttggcgcctcaagagcaatagtatggttacagaaccgacgtgaagccactgtggagcgaacgagaaccacaagcagtgttaggcgagatgaccctggagagtttcgagttggtcgtctcaagcatgaaagagtaaaagttccacgtggcgagtcactgatggaatgggctgagaatgtcatgcaaatacatgcagatcggaaatcagttcttgaggttgaatttttaggagaagaaggaactggcttgggacccacattagagttttatgctctggtggcagcagaattccagagaactgacttgggagcttggctttgtgatgataattttccagatgatgaatctcgtcacgttgatcttggaggtggattgaaacctcctggatattatgtgcagaggtcatgtggactgttcacagcaccatttccacaggatagtgatgagcttgaaaggatcacgaaactgtttcatttccttggaattttcttggccaaatgcattcaagacaatagacttgtggacttacctatttctaaacctttttttaaacttatgtgtatgggtgacattaaaagcaatatgagtaaactgatttatgagtcacgaggtgatagagacttacactgtactgaaagtcagtctgaagcttctacagaagaaggtcatgattcactctcggtaggaagctttgaagaggattcaaaatcagaatttattcttgatccccctaaaccaaaacccccagcttggtttaatggaattttgacttgggaagactttgaattagtaaacccacacagagccagatttttaaaagaaattaaagaccttgctatcaagaggcgccaaattttaagcaacaaaggtctttctgaagatgagaagaacacaaaattacaggaactagtgctgaagaatccatcaggttctgggcctccacttagcatagaggatttaggtttaaatttccagttttgcccttcctcaagaatatatggttttacagctgtggatctcaagccaagtggtgaagatgagatgataacaatggataatgcagaagaatatgtggatttgatgtttgacttttgtatgcatacgggtattcagaaacaaatggaagcctttagagatgggtttaataaagtttttccaatggagaaattaagttccttcagccatgaagaagtccaaatgattctttgtggaaaccagtcaccatcctgggcagcagaggatattatcaattacactgaacctaagctgggttatacacgtgacagccctggtttcctgaggtttgtgagggttttatgtggcatgtcttctgatgaaaggaaagcattcttgcagtttaccactggttgttcaactctacccccaggtggactggctaacctgcatcccaggctcacggttgtacgcaaggttgatgctactgatgcaagctatccatcagtcaatacatgtgtgcattaccttaagttgcctgaatattcttccgaggagatcatgagagagcgcctgctagctgctacaatggagaaaggctttcatctcaattgagctttgaagtgcaatgggagacatcagagactttcatgctaatgacacttgcctttttttccaccattaaggctttaagaacatgtggaataagttttttagctgctaatgacaaaacaaatcctgtaactacccagccagcaagtatatagcacagaacactgtgttactttacaagggcttatgtgactggaataaggtggtcccacttgactgttccaaagagcagcttctcagatcttcagtgttcactggtaaatttctaacagtgtatttgtgtaaagtttgtcatttcatactccatacactacagttgctgtcactgatccctgttttgctggcttttaagctacttggtcaaaaatcctgcttccttaaaacatagagaattaatgagcatctcaagctttttcttttcctttttaatgatgcctgcactatcaagagtattctagtgttctctctttgtttggcatataatcatgcaccaaactttttatttctttaaggtgggagtatatttttatttcctaaatgccatactatgaagatcaaagtcttaagtgtgtttgcagctcaaaaataaagatgtattaaggggggaaaacctggtctaagtgcaaggcacacttacagcgagttttactttcggttgtattttctttgtatattataaacatttatttaacttgttgccgtttgaagtaaaaaatttccaaaatgtatgctcaacaataatcattaaaatgtttgcagcgta

SEQ ID NO: 451858 - DNA, 5924 bp, Homo sapiens
tttgtgtagatacttacaaggagattacgatttcggttggaacgtgcacctggtgaaactgcattgattgacaggactggcagaatgttgaagatggaacctttggctacagttgaatctctggaacagtaccttttgaaaatggtagcaaaacagtggtatgattttgaccgatcttcatttgtttttgttcgaaaattaagagaaggacaaaattttatatttcggcaccagcatgattttgatgaaaatggaatcatttactggattggaacaaatgcaaaaactgcttatgaatgggtaaatccagctgcctatggacttgtagtagtaacgtcatcagaaggaagaaatctaccttatggccgcttagaagacatactaagtcgtgataattcagctttaaattgtcatagcaatgatgataagaatgcctggtttgccatagatctgggtctctgggtgataccatcagcatatacacttcgtcatgctcgtggttatggaaggtctgcactgagaaattgggttttccaggtatccaaagatggacagaactggacttctttgtatacccatgttgatgactgcagtctcaatgaaccagggtcaactgcaacttggcctcttgatccaccaaaggatgagaaacaagggtggagacatgtgagaattaaacagatggggaaaaatgccagtggacaaacacactacctctcattatctggattcgaactttatggcactgtaaatggagtatgtgaagatcagctagggaaagcagctaaagaagcagaagctaatcttagacggcagagacgtctagtacgttcccaggttctgaaatacatggttccaggagctcgtgttatcagaggcctggattggaaatggcgagatcaggatggcagcccacagggagaaggcactgtcacaggagaactacacaatggcacaacgcaatcatggagcagcttggtgaaaaacaactgtccagacaagacatctgctgctgcaggctcctcaagtagaaaaggaagcagcagttctgtgtgtagcgtggccagtagcagcgacatcagcttgggttcgaccaaaacggaacggagatcagaaattgtaatggaacacagtatagtttcaggagctgatgtccatgaaccaattgttgttctttcatctgctgaaaacgtccctcaaacagaagtagggtcatcttccagtgcaagcaccagcaccttaacagcggaaacgggaagtgaaaatgctgaaaggaagttaggccctgatagttctgttcgtactcctggggagtctagtgcaatatccatgggaattgtcagtgttagttctcctgatgttagttcagtatctgaattaactaataaagaagcagcttcacaacgacctcttagctcttcagcaagtaacagactgtcagtgagttctttgttggctgctggggcccctatgagctctagtgcaagtgtacctaacctgtcctcaagagaaacatctagcttggagagttttgtaaggagagtggcaaacatagcacggactaatgccacgaacaacatgaatctaagccgaagcagcagtgataacaacactaatactttggggaggaatgtgatgagcacagcaacttctcctcttatgggtgctcagagtttccctaatttgaccacacctggtactacatcaacagtgactatgtcaacatccagtgttactagcagcagcaatgtagctacagcaacaacagttttatcagttggtcaatctttaagtaacactttaaccaccagcctcacatcaacttccagtgagagtgacacaggtcaggaagcagaatattccttatatgatttccttgatagctgccgtgccagtactctattggctgagctcgatgatgatgaggacttacctgagccagatgaagaagatgatgagaatgaagatgacaatcaggaggaccaagaatacgaggaggttatgattctgagacgcccatccctgcaacgtcgagctggctcccgctctgatgtaacgcatcatgctgttacctcgcagctaccacaggtacctgctggagcagggagccgacctattggggagcaggaagaagaagagtacgaaactaaaggaggacgccggagaacatgggatgatgattatgtgctaaagagacagttttctgcattggttcctgcttttgatcctagacctggtcgtactaatgtccagcagacaactgatctagaaataccacccccagggacccctcattcagagctcttggaagaagtcgaatgtactccgtcacctcgattagctctcactttgaaagtaacaggtcttggaacgactcgtgaagttgaattaccactcaccaatttcagatcaaccatcttttactatgtacaaaaattgcttcaattgtcctgtaatggcaatgtgaaatcagataaacttaggcgtatttgggagcccacatacacaatcatgtacagagaaatgaaggattctgataaagaaaaggaaaatggaaaaatgggttgctggtctatagagcatgtggagcagtaccttggcactgatgaattaccaaagaatgacttgataacctacctgcagaagaatgcagacgctgctttcctgcgccactggaaattaactggcactaataaaagtattaggaaaaacagaaattgttctcagctcatagctgcatataaggatttttgtgagcatggaacaaagtctgggttaaaccagggggccatttctactcttcaaagtagtgatattcttaatttaacaaaagaacaacctcaggccaaagcaggcaatggacagaactcttgtggagtagaagatgtccttcagcttctgcgtattctgtatatagttgcaagtgacccttattcaagaatatcccaggaagatggtgatgaacagcctcagtttacttttccaccagatgaattcactagcaaaaaaattacaacaaaaatattacagcagattgaggaaccattggcactggcaagtggggctctgccagactggtgtgaacaattaaccagcaaatgtccttttctaataccatttgaaactagacagctttatttcacatgtacagcatttggcgcctcaagagcaatagtatggttacagaaccgacgtgaagccactgtggagcgaacgagaaccacaagcagtgttaggcgagatgaccctggagagtttcgagttggtcgtctcaagcatgaaagagtaaaagttccacgtggcgagtcactgatggaatgggctgagaatgtcatgcaaatacatgcagatcggaaatcagttcttgaggttgaatttttaggagaagaaggaactggcttgggacccacattagagttttatgctctggtggcagcagaattccagagaactgacttgggagcttggctttgtgatgataattttccagatgatgaatctcgtcacgttgatcttggaggtggattgaaacctcctggatattatgtgcagaggtcatgtggactgttcacagcaccatttccacaggatagtgatgagcttgaaaggatcacgaaactgtttcatttccttggaattttcttggccaaatgcattcaagacaatagacttgtggacttacctatttctaaacctttttttaaacttatgtgtatgggtgacattaaaagcaatatgagtaaactgatttatgagtcacgaggtgatagagacttacactgtactgaaagtcagtctgaagcttctacagaagaaggtcatgattcactctcggtaggaagctttgaagaggattcaaaatcagaatttattcttgatccccctaaaccaaaacccccagcttggtttaatggaattttgacttgggaagactttgaattagtaaacccacacagagccagatttttaaaagaaattaaagaccttgctatcaagaggcgccaaattttaagcaacaaaggtctttctgaagatgagaagaacacaaaattacaggaactagtgctgaagaatccatcaggttctgggcctccacttagcatagaggatttaggtttaaatttccagttttgcccttcctcaagaatatatggttttacagctgtggatctcaagccaagtggtgaagatgagatgataacaatggataatgcagaagaatatgtggatttgatgtttgacttttgtatgcatacgggtattcagaaacaaatggaagcctttagagatgggtttaataaagtttttccaatggagaaattaagttccttcagccatgaagaagtccaaatgattctttgtggaaaccagtcaccatcctgggcagcagaggatattatcaattacactgaacctaagctgggttatacacgtgacagccctggtttcctgaggtttgtgagggttttatgtggcatgtcttctgatgaaaggaaagcattcttgcagtttaccactggttgttcaactctacccccaggtggactggctaacctgcatcccaggctcacggttgtacgcaaggttgatgctactgatgcaagctatccatcagtcaatacatgtgtgcattaccttaagttgcctgaatattcttccgaggagatcatgagagagcgcctgctagctgctacaatggagaaaggctttcatctcaattgagctttgaagtgcaatgggagacatcagagactttaaaaatactagtgaagcctcttgtgtttgtgtgcagagaagtatatgatccaccatgctaatgacacttgcctttttttccaccattaaggctttaagaacatgtggaataagttttttagctgctaatgacaaaacaaatcctgtaactacccagccagcaagtatatagcacagaacactgtgttactttacaagggcttatgtgactggaataaggtggtcccacttgactgttccaaagagcagcttctcagatcttcagtgttcactggtaaatttctaacagtgtatttgtgtaaagtttgtcatttcatactccatacactacagttgctgtcactgatccctgttttgctggcttttaagctacttggtcaaaaatcctgcttccttaaaacatagagaattaatgagcatctcaagctttttcttttcctttttaatgatgcctgcactatcaagagtattctagtgttctctctttgtttggcatataatcatgcaccaaactttttatttctttaaggtgggagtatatttttatttcctaaatgccatactatgaagatcaaagtcttaagtgtgtttgcagctcaaaaataaagatgtattaaggggggttttctttgtatattataaacatttatttaacttgttgccgtttgaagtaaaaaatttccaaaatgtatgctcaacaataatcattaaaatgtttgcagcgtaaaaaaaaaaaagaaaaagaaaaaaaaaaaaaaaaaaaaagaaaaagaaaaaaagacgtgaaggaaaaaaaagaggggggggagagttggaggaggggggtataagatgtcatacttggaccacgacatcgcatgcatccacaatcgccattcattccaacaccgtcgccgcgcgtatcacacgcacagccttcaacccggcgaagcaactctgtggtgagagacccacacactgacgcaagcacagagagcatcacgacactgcgcaataatgacacgtcagcgatgaatctcccacagtgtagcttgcggcggctgatacatgggcatcagtgagaactgtatacaatagacaaaatgagatagacgcaacacgctcgactcggatcagagactccatgcaacagtcacactcagcggccgtgctatcctccgtcccccagg

SEQ ID NO: 451859 - DNA, 5477 bp, Homo sapiens
tttgtgtagatacttacaaggagattacgatttcggttggaacgtgcacctggtgaaactgcattgattgacaggactggcagaatgttgaagatggaacctttggctacagttgaatctctggaacagtaccttttgaaaatggtagcaaaacagtggtatgattttgaccgatcttcatttgtttttgttcgaaaattaagagaaggacaaaattttatatttcggcaccagcatgattttgatgaaaatggaatcatttactggattggaacaaatgcaaaaactgcttatgaatgggtaaatccagctgcctatggacttgtagtagtaacgtcatcagaaggaagaaatctaccttatggccgcttagaagacatactaagtcgtgataattcagctttaaattgtcatagcaatgatgataagaatgcctggtttgccatagatctgggtctctgggtgataccatcagcatatacacttcgtcatgctcgtggttatggaaggtctgcactgagaaattgggttttccaggtatccaaagatggacagaactggacttctttgtatacccatgttgatgactgcagtctcaatgaaccagggtcaactgcaacttggcctcttgatccaccaaaggatgagaaacaagggtggagacatgtgagaattaaacagatggggaaaaatgccagtggacaaacacactacctctcattatctggattcgaactttatggcactgtaaatggagtatgtgaagatcagctagggaaagcagctaaagaagcagaagctaatcttagacggcagagacgtctagtacgttcccaggttctgaaatacatggttccaggagctcgtgttatcagaggcctggattggaaatggcgagatcaggatggcagcccacagggagaaggcactgtcacaggagaactacacaatggcacaacgcaatcatggagcagcttggtgaaaaacaactgtccagacaagacatctgctgctgcaggctcctcaagtagaaaaggaagcagcagttctgtgtgtagcgtggccagtagcagcgacatcagcttgggttcgaccaaaacggaacggagatcagaaattgtaatggaacacagtatagtttcaggagctgatgtccatgaaccaattgttgttctttcatctgctgaaaacgtccctcaaacagaagtagggtcatcttccagtgcaagcaccagcaccttaacagcggaaacgggaagtgaaaatgctgaaaggaagttaggccctgatagttctgttcgtactcctggggagtctagtgcaatatccatgggaattgtcagtgttagttctcctgatgttagttcagtatctgaattaactaataaagaagcagcttcacaacgacctcttagctcttcagcaagtaacagactgtcagtgagttctttgttggctgctggggcccctatgagctctagtgcaagtgtacctaacctgtcctcaagagaaacatctagcttggagagttttgtaaggagagtggcaaacatagcacggactaatgccacgaacaacatgaatctaagccgaagcagcagtgataacaacactaatactttggggaggaatgtgatgagcacagcaacttctcctcttatgggtgctcagagtttccctaatttgaccacacctggtactacatcaacagtgactatgtcaacatccagtgttactagcagcagcaatgtagctacagcaacaacagttttatcagttggtcaatctttaagtaacactttaaccaccagcctcacatcaacttccagtgagagtgacacaggtcaggaagcagaatattccttatatgatttccttgatagctgccgtgccagtactctattggctgagctcgatgatgatgaggacttacctgagccagatgaagaagatgatgagaatgaagatgacaatcaggaggaccaagaatacgaggaggttatgattctgagacgcccatccctgcaacgtcgagctggctcccgctctgatgtaacgcatcatgctgttacctcgcagctaccacaggtacctgctggagcagggagccgacctattggggagcaggaagaagaagagtacgaaactaaaggaggacgccggagaacatgggatgatgattatgtgctaaagagacagttttctgcattggttcctgcttttgatcctagacctggtcgtactaatgtccagcagacaactgatctagaaataccacccccagggacccctcattcagagctcttggaagaagtcgaatgtactccgtcacctcgattagctctcactttgaaagtaacaggtcttggaacgactcgtgaagttgaattaccactcaccaatttcagatcaaccatcttttactatgtacaaaaattgcttcaattgtcctgtaatggcaatgtgaaatcagataaacttaggcgtatttgggagcccacatacacaatcatgtacagagaaatgaaggattctgataaagaaaaggaaaatggaaaaatgggttgctggtctatagagcatgtggagcagtaccttggcactgatgaattaccaaagaatgacttgataacctacctgcagaagaatgcagacgctgctttcctgcgccactggaaattaactggcactaataaaagtattaggaaaaacagaaattgttctcagctcatagctgcatataaggatttttgtgagcatggaacaaagtctgggttaaaccagggggccatttctactcttcaaagtagtgatattcttaatttaacaaaagaacaacctcaggccaaagcaggcaatggacagaactcttgtggagtagaagatgtccttcagcttctgcgtattctgtatatagttgcaagtgacccttattcaagaatatcccaggaagatggtgatgaacagcctcagtttacttttccaccagatgaattcactagcaaaaaaattacaacaaaaatattacagcagattgaggaaccattggcactggcaagtggggctctgccagactggtgtgaacaattaaccagcaaatgtccttttctaataccatttgaaactagacagctttatttcacatgtacagcatttggcgcctcaagagcaatagtatggttacagaaccgacgtgaagccactgtggagcgaacgagaaccacaagcagtgttaggcgagatgaccctggagagtttcgagttggtcgtctcaagcatgaaagagtaaaagttccacgtggcgagtcactgatggaatgggctgagaatgtcatgcaaatacatgcagatcggaaatcagttcttgaggttgaatttttaggagaagaaggaactggcttgggacccacattagagttttatgctctggtggcagcagaattccagagaactgacttgggagcttggctttgtgatgataattttccagatgatgaatctcgtcacgttgatcttggaggtggattgaaacctcctggatattatgtgcagaggtcatgtggactgttcacagcaccatttccacaggatagtgatgagcttgaaaggatcacgaaactgtttcatttccttggaattttcttggccaaatgcattcaagacaatagacttgtggacttacctatttctaaacctttttttaaacttatgtgtatgggtgacattaaaagcaatatgagtaaactgatttatgagtcacgaggtgatagagacttacactgtactgaaagtcagtctgaagcttctacagaagaaggtcatgattcactctcggtaggaagctttgaagaggattcaaaatcagaatttattcttgatccccctaaaccaaaacccccagcttggtttaatggaattttgacttgggaagactttgaattagtaaacccacacagagccagatttttaaaagaaattaaagaccttgctatcaagaggcgccaaattttaagcaacaaaggtctttctgaagatgagaagaacacaaaattacaggaactagtgctgaagaatccatcaggttctgggcctccacttagcatagaggatttaggtttaaatttccagttttgcccttcctcaagaatatatggttttacagctgtggatctcaagccaagtggtgaagatgagatgataacaatggataatgcagaagaatatgtggatttgatgtttgacttttgtatgcatacgggtattcagaaacaaatggaagcctttagagatgggtttaataaagtttttccaatggagaaattaagttccttcagccatgaagaagtccaaatgattctttgtggaaaccagtcaccatcctgggcagcagaggatattatcaattacactgaacctaagctgggttatacacgtgacagccctggtttcctgaggtttgtgagggttttatgtggcatgtcttctgatgaaaggaaagcattcttgcagtttaccactggttgttcaactctacccccaggtggactggctaacctgcatcccaggctcacggttgtacgcaaggttgatgctactgatgcaagctatccatcagtcaatacatgtgtgcattaccttaagttgcctgaatattcttccgaggagatcatgagagagcgcctgctagctgctacaatggagaaaggctttcatctcaattgagctttgaagtgcaatgggagacatcagagactttaaaaatactagtgaagcctcttgtgtttgtgtgcagagaagtatatgatccaccatgctaatgacacttgcctttttttccaccattaaggctttaagaacatgtggaataagttttttagctgctaatgacaaaacaaatcctgtaactacccagccagcaagtatatagcacagaacactgtgttactttacaagggcttatgtgactggaataaggtggtcccacttgactgttccaaagagcagcttctcagatcttcagtgttcactggtaaatttctaacagtgtatttgtgtaaagtttgtcactacttggtcaaaaatcctgcttccttaaaacatagagaattaatgagcatctcaagctttttcttttcctttttaatgatgcctgcactatcaagagtattctagtgttctctctttgtttggcatataatcatgcaccaaactttttatttctttaaggtgggagtatatttttatttcctaaatgccatactatgaagatcaaagtcttaagtgtgtttgcagctcaaaaataaagatgtattaaggggggaaaacctggtctaagtgcaaggcacacttacagcgagttttactttcggttgtattttctttgtatattataaacatttatttaacttgttgccgtttgaagtaaaaaatttccaaaatgtatgctcaacaataatcattaaaatgtttgcagcgta

SEQ ID NO: 451860 - DNA, 1329 bp, Homo sapiens
gaaaaactttattaaacccatctctaaaggcttccattgtttctgaatacccgtatgcagaaacaaatggaagcctttagagatgggtttaataaagtttttccaatggagaaattaagttccttcagccatgaagaagtccaaatgattctttgtggaaaccagtcaccatcctgggcagcagaggatattatcaattacactgaacctaagctgggttatacacgtgacagccctggtttcctgaggtttgtgagggttttatgtggcatgtcttctgatgaaaggaaagcattcttgcagtttaccactggttgttcaactctacccccaggtggactggctaacctgcatcccaggctcacggttgtacgcaaggttgatgctactgatgcaagctatccatcagtcaatacatgtgtgcattaccttaagttgcctgaatattcttccgaggagatcatgagagagcgcctgctagctgctacaatggagaaaggctttcatctcaattgagctttgaagtgcaatgggagacatcagagactttaaaaatactagtgaagcctcttgtgtttgtgtgcagagaagtatatgatccaccatgctaatgacacttgcctttttttccaccattaaggctttaagaacatgtggaataagttttttagctgctaatgacaaaacaaatcctgtaactacccagccagcaagtatatagcacagaacactgtgttactttacaagggcttatgtgactggaataaggtggtcccacttgactgttccaaagagcagcttctcagatcttcagtgttcactggtaaatttctaacagtgtatttgtgtaaagtttgtcatttcatactccatacactacagttgctgtcactgatccctgttttgctggcttttaagctacttggtcaaaaatcctgcttccttaaaacatagagaattaatgagcatctcaagctttttcttttcctttttaatgatgcctgcactatcaagagtattctagtgttctctctttgtttggcatataatcatgcaccaaactttttatttctttaaggtgggagtatatttttatttcctaaatgccatactatgaagatcaaagtcttaagtgtgtttgcagctcaaaaataaagatgtattaaggggggaaaacctggtctaagtgcaaggcacacttacagcgagttttactttcggttgtattttctttgtatattataaacatttatttaacttgttgccgtttgaagtaaaaaatttccaaaatgtatgctcaacaataatcattaaaatgtttgcagcgta

SEQ ID NO: 451861 - DNA, 1167 bp, Homo sapiens
agaaaatagtggtagtgattttcatttaaatctgcagtcaactcaatataactatatttttgttcttttagccctggtttcctgaggtttgtgagggttttatgtggcatgtcttctgatgaaaggaaagcattcttgcagtttaccactggttgttcaactctacccccaggtggactggctaacctgcatcccaggctcacggttgtacgcaaggttgatgctactgatgcaagctatccatcagtcaatacatgtgtgcattaccttaagttgcctgaatattcttccgaggagatcatgagagagcgcctgctagctgctacaatggagaaaggctttcatctcaattgagctttgaagtgcaatgggagacatcagagactttaaaaatactagtgaagcctcttgtgtttgtgtgcagagaagtatatgatccaccatgctaatgacacttgcctttttttccaccattaaggctttaagaacatgtggaataagttttttagctgctaatgacaaaacaaatcctgtaactacccagccagcaagtatatagcacagaacactgtgttactttacaagggcttatgtgactggaataaggtggtcccacttgactgttccaaagagcagcttctcagatcttcagtgttcactggtaaatttctaacagtgtatttgtgtaaagtttgtcatttcatactccatacactacagttgctgtcactgatccctgttttgctggcttttaagctacttggtcaaaaatcctgcttccttaaaacatagagaattaatgagcatctcaagctttttcttttcctttttaatgatgcctgcactatcaagagtattctagtgttctctctttgtttggcatataatcatgcaccaaactttttatttctttaaggtgggagtatatttttatttcctaaatgccatactatgaagatcaaagtcttaagtgtgtttgcagctcaaaaataaagatgtattaaggggggaaaacctggtctaagtgcaaggcacacttacagcgagttttactttcggttgtattttctttgtatattataaacatttatttaacttgttgccgtttgaagtaaaaaatttccaaaatgtatgctcaacaataatcattaaaatgtttgcagcgta

SEQ ID NO: 451862 - DNA, 1120 bp, Homo sapiens
cacggttgtacgcaaggttgagcctgggatgcaggttagccagtccacctgggggtagagttgaacaaccagtggtaaactgcaagaatgctttcctttcatcagaagacatgccacataaaaccctcacaaacctcaggaaaccagggctgtcacggttgtacgcaaggttgatgctactgatgcaagctatccatcagtcaatacatgtgtgcattaccttaagttgcctgaatattcttccgaggagatcatgagagagcgcctgctagctgctacaatggagaaaggctttcatctcaattgagctttgaagtgcaatgggagacatcagagactttaaaaatactagtgaagcctcttgtgtttgtgtgcagagaagtatatgatccaccatgctaatgacacttgcctttttttccaccattaaggctttaagaacatgtggaataagttttttagctgctaatgacaaaacaaatcctgtaactacccagccagcaagtatatagcacagaacactgtgttactttacaagggcttatgtgactggaataaggtggtcccacttgactgttccaaagagcagcttctcagatcttcagtgttcactggtaaatttctaacagtgtatttgtgtaaagtttgtcatttcatactccatacactacagttgctgtcactgatccctgttttgctggcttttaagctacttggtcaaaaatcctgcttccttaaaacatagagaattaatgagcatctcaagctttttcttttcctttttaatgatgcctgcactatcaagagtattctagtgttctctctttgtttggcatataatcatgcaccaaactttttatttctttaaggtgggagtatatttttatttcctaaatgccatactatgaagatcaaagtcttaagtgtgtttgcagctcaaaaataaagatgtattaaggggggaaaacctggtctaagtgcaaggcacacttacagcgagttttactttcggttgtattttctttgtatattataaacatttatttaacttgttgccgtttgaagtaaaaaatttccaaaatgtatgctcaacaataatcattaaaatgtttgcagcgta

SEQ ID NO: 451863 - DNA, 566 bp, Homo sapiens
  misc_feature (6)..(7): n is a, c, g, or t
  misc_feature (33)..(33): n is a, c, g, or t
  misc_feature (38)..(38): n is a, c, g, or t
gcggcnnctactactactaaattcgcggccgcntgacnctcagatcttcagtgttcactggtaaatttctaacagtgtatttgtgtaaagtttgtcatttcatactccatacactacagttgctgtcactgatccctgttttgctggcttttaagctacttggtcaaaaatcctgcttccttaaaacatagagaattaatgagcatctcaagctttttcttttcctttttaatgatgcctgcactatcaagagtattctagtgttctctctttgtttggcatataatcatgcaccaaactttttatttctttaaggtgggagtatatttttatttcctaaatgccatactatgaagatcaaagtcttaagtgtgtttgcagctcaaaaataaagatgtattaaggggggaaaacctggtctaagtgcaaggcacacttacagcgagttttactttcggttgtattttctttgtatattataaacatttatttaacttgttgccgtttgaagtaaaaaatttccaaaatgtatgctcaacaataatcattaaaatgtttgcagcgta

SEQ ID NO: 451864 - DNA, 3987 bp, Homo sapiens
tttgtgtagatacttacaaggagattacgatttcggttggaacgtgcacctggtgaaactgcattgattgacaggactggcagaatgttgaagatggaacctttggctacagttgaatctctggaacagtaccttttgaaaatggtagcaaaacagtggtatgattttgaccgatcttcatttgtttttgttcgaaaattaagagaaggacaaaattttatatttcggcaccagcatgattttgatgaaaatggaatcatttactggattggaacaaatgcaaaaactgcttatgaatgggtaaatccagctgcctatggacttgtagtagtaacgtcatcagaaggaagaaatctaccttatggccgcttagaagacatactaagtcgtgataattcagctttaaattgtcatagcaatgatgataagaatgcctggtttgccatagatctgggtctctgggtgataccatcagcatatacacttcgtcatgctcgtggttatggaaggtctgcactgagaaattgggttttccaggtatccaaagatggacagaactggacttctttgtatacccatgttgatgactgcagtctcaatgaaccagggtcaactgcaacttggcctcttgatccaccaaaggatgagaaacaagggtggagacatgtgagaattaaacagatggggaaaaatgccagtggacaaacacactacctctcattatctggattcgaactttatggcactgtaaatggagtatgtgaagatcagctagggaaagcagctaaagaagcagaagctaatcttagacggcagagacgtctagtacgttcccaggttctgaaatacatggttccaggagctcgtgttatcagaggcctggattggaaatggcgagatcaggatggcagcccacagggagaaggcactgtcacaggagaactacacaatggcacaacgcaatcatggagcagcttggtgaaaaacaactgtccagacaagacatctgctgctgcaggctcctcaagtagaaaaggaagcagcagttctgtgtgtagcgtggccagtagcagcgacatcagcttgggttcgaccaaaacggaacggagatcagaaattgtaatggaacacagtatagtttcaggagctgatgtccatgaaccaattgttgttctttcatctgctgaaaacgtccctcaaacagaagtagggtcatcttccagtgcaagcaccagcaccttaacagcggaaacgggaagtgaaaatgctgaaaggaagttaggccctgatagttctgttcgtactcctggggagtctagtgcaatatccatgggaattgtcagtgttagttctcctgatgttagttcagtatctgaattaactaataaagaagcagcttcacaacgacctcttagctcttcagcaagtaacagactgtcagtgagttctttgttggctgctggggcccctatgagctctagtgcaagtgtacctaacctgtcctcaagagaaacatctagcttggagagttttgtaaggagagtggcaaacatagcacggactaatgccacgaacaacatgaatctaagccgaagcagcagtgataacaacactaatactttggggaggaatgtgatgagcacagcaacttctcctcttatgggtgctcagagtttccctaatttgaccacacctggtactacatcaacagtgactatgtcaacatccagtgttactagcagcagcaatgtagctacagcaacaacagttttatcagttggtcaatctttaagtaacactttaaccaccagcctcacatcaacttccagtgagagtgacacaggtcaggaagcagaatattccttatatgatttccttgatagctgccgtgccagtactctattggctgagctcgatgatgatgaggacttacctgagccagatgaagaagatgatgagaatgaagatgacaatcaggaggaccaagaatacgaggaggttatgattctgagacgcccatccctgcaacgtcgagctggctcccgctctgatgtaacgcatcatgctgttacctcgcagctaccacaggtacctgctggagcagggagccgacctattggggagcaggaagaagaagagtacgaaactaaaggaggacgccggagaacatgggatgatgattatgtgctaaagagacagttttctgcattggttcctgcttttgatcctagacctggtcgtactaatgtccagcagacaactgatctagaaataccacccccagggacccctcattcagagctcttggaagaagtcgaatgtactccgtcacctcgattagctctcactttgaaagtaacaggtcttggaacgactcgtgaagttgaattaccactcaccaatttcagatcaaccatcttttactatgtacaaaaattgcttcaattgtcctgtaatggcaatgtgaaatcagataaacttaggcgtatttgggagcccacatacacaatcatgtacagagaaatgaaggattctgataaagaaaaggaaaatggaaaaatgggttgctggtctatagagcatgtggagcagtaccttggcactgatgaattaccaaagaatgacttgataacctacctgcagaagaatgcagacgctgctttcctgcgccactggaaattaactggcactaataaaagtattaggaaaaacagaaattgttctcagctcatagctgcatataaggatttttgtgagcatggaacaaagtctgggttaaaccagggggccatttctactcttcaaagtagtgatattcttaatttaacaaaagaacaacctcaggccaaagcaggcaatggacagaactcttgtggagtagaagatgtccttcagcttctgcgtattctgtatatagttgcaagtgacccttattcaagaatatcccaggaagatggtgatgaacagcctcagtttacttttccaccagatgaattcactagcaaaaaaattacaacaaaaatattacagcagattgaggaaccattggcactggcaagtggggctctgccagactggtgtgaacaattaaccagcaaatgtccttttctaataccatttgaaactagacagctttatttcacatgtacagcatttggcgcctcaagagcaatagtatggttacagaaccgacgtgaagccactgtggagcgaacgagaaccacaagcagtgttaggcgagatgaccctggagagtttcgagttggtcgtctcaagcatgaaagagtaaaagttccacgtggcgagtcactgatggaatgggctgagaatgtcatgcaaatacatgcagatcggaaatcagttcttgaggtaatctcatataaaattagatttagggaacaggaatgacacttagggaaccagcccaatgtgtatcttcactgcattaaaaactgtggtaggtaaacatgaagaggggttttcctgttctgtaggcagaagccttctcctctggcagagcatctttttcataagaggatgtcagtccacctccttaggggttaggtcttgtgccattaatgagcaacaaagaagatctccactcttgaggtggcaaagtgcttgttctgcttgagggcttctacccatttcataacaaagttggactaaaatagtagtactcacaagggattcttttttacttttacattaaactgtgctgtttgatattttgggagcacctggttttgtaatattgtttcacttgaattgtgcttggtattatatcactggtctgtgttgagacatgttatagcaaatggtagtatgacatttaatatatttagtttagaaatgttactgtggacattgttggttttatttcatatacacagtattccctatatgaggaagagtggaaatacgtctcctgtcacaggggtgaatccaactggtttgtttttaacttttggatcataaactaattgc

SEQ ID NO: 451865 - DNA, 2247 bp, Homo sapiens
tttgtgtagatacttacaaggagattacgatttcggttggaacgtgcacctggtgaaactgcattgattgacaggactggcagaatgttgaagatggaacctttggctacagttgaatctctggaacagtaccttttgaaaatggtagcaaaacagtggtatgattttgaccgatcttcatttgtttttgttcgaaaattaagagaaggacaaaattttatatttcggcaccagcatgattttgatgaaaatggaatcatttactggattggaacaaatgcaaaaactgcttatgaatgggtaaatccagctgcctatggacttgtagtagtaacgtcatcagaaggaagaaatctaccttatggccgcttagaagacatactaagtcgtgataattcagctttaaattgtcatagcaatgatgataagaatgcctggtttgccatagatctgggtctctgggtgataccatcagcatatacacttcgtcatgctcgtggttatggaaggtctgcactgagaaattgggttttccaggtatccaaagatggacagaactggacttctttgtatacccatgttgatgactgcagtctcaatgaaccagggtcaactgcaacttggcctcttgatccaccaaaggatgagaaacaagggtggagacatgtgagaattaaacagatggggaaaaatgccagtggacaaacacactacctctcattatctggattcgaactttatggcactgtaaatggagtatgtgaagatcagctagggaaagcagctaaagaagcagaagctaatcttagacggcagagacgtctagtacgttcccaggttctgaaatacatggttccaggagctcgtgttatcagaggcctggattggaaatggcgagatcaggatggcagcccacagggagaaggcactgtcacaggagaactacacaatggcacaacgcaatcatggagcagcttggtgaaaaacaactgtccagacaagacatctgctgctgcaggctcctcaagtagaaaaggaagcagcagttctgtgtgtagcgtggccagtagcagcgacatcagcttgggttcgaccaaaacggaacggagatcagaaattgtaatggaacacagtatagtttcaggagctgatgtccatgaaccaattgttgttctttcatctgctgaaaacgtccctcaaacagaagtagggtcatcttccagtgcaagcaccagcaccttaacagcggaaacgggaagtgaaaatgctgaaaggaagttaggccctgatagttctgttcgtactcctggggagtctagtgcaatatccatgggaattgtcagtgttagttctcctgatgttagttcagtatctgaattaactaataaagaagcagcttcacaacgacctcttagctcttcagcaagtaacagactgtcagtgagttctttgttggctgctggggcccctatgagctctagtgcaagtgtacctaacctgtcctcaagagaaacatctagcttggagagttttgtaaggagagtggcaaacatagcacggactaatgccacgaacaacatgaatctaagccgaagcagcagtgataacaacactaatactttggggaggaatgtgatgagcacagcaacttctcctcttatgggtgctcagagtttccctaatttgaccacacctggtactacatcaacagtgactatgtcaacatccagtgttactagcagcagcaatgtagctacagcaacaacagttttatcagttggtcaatctttaagtaacactttaaccaccagcctcacatcaacttccagtgagagtgacacagatttccttgatagctgccgtgccagtactctattggctgagctcgatgatgatgaggacttacctgagccagatgaagaagatgatgagaatgaagatgacaatcaggaggaccaagaatacgaggaggttatgattctgagacgcccatccctgcaacgtcgagctggctcccgctctgatgtaacgcatcatgctgttacctcgcagctaccacaggtacctgctggagcagggagccgacctattggggagcaggaagaagaagagtacgaaactaacgaagacatcatggagaggataaatagattggcaagccttttctatgtcttttccaatgctgtctggaatctatttatgaccactctttcaagtcatttgtctgcacctctggtcaactcgccc

SEQ ID NO: 451866 - DNA, 712 bp, Homo sapiens
tttgtgtagatacttacaaggagattacgatttcggttggaacgtgcacctggtgaaactgcattgattgacaggactggcagaatgttgaagatggaacctttggctacagttgaatctctggaacagtaccttttgaaaatggtagcaaaacagtggtatgattttgaccgatcttcatttgtttttgttcgaaaattaagagaaggacaaaattttatatttcggcaccagcatgattttgatgaaaatggaatcatttactggattggaacaaatgcaaaaactgcttatgaatgggtaaatccagctgcctatggacttgtagtagtaacgtcatcagaaggaagaaatctaccttatggccgcttagaagacatactaagtcgtgataattcagctttaaattgtcatagcaatgatgataagaatgcctggtttgccatagatctgggtctctgggtgataccatcagcatatacacttcgtcatgctcgtggttatggaagagtgcacttttgaaaagtgcactccttagtatgatctagatgctcagaaataatgtcttagccaggctgtctgggcatcccgcagcccactcaagttgaccacaaggttgaatcatcatagtggtctacaggggaaagatgctgagggaaattttttttgcagttctagagaatcaattaccagtagaatactgtagatatag

SEQ ID NO: 451867 - DNA, 788 bp, Homo sapiens
gaggaatgtgatgagcacagcaagtaagtgagcttttccttctggaatccgatgctttttccacttggagggatgcaaaatagggtctcttgttctggctgcagtttttaactagatcattaaccatgttagataaagctacatcaaatttagcagttcaggaatatgaagttctctagaatcataatatttgcagaattcagactaggtgtgataaagaacctcttattttagaagcataaaacagtacttctgattttcactcctttatgatacatcattaagcaaagttgcatgaggaaatagatgactattaaatattatcatagtgcagtgaaaccaaagcatcatataagtatagcttttgtttagactctacattgatcttagcttctgaaagttaaattccaatttaagctgctaacaggtcaaagtaattatataatagtgctataaaaagaatttttagttggatttcagttgggttcccaaagttgttgcttttcaggaaccattttattattagtgtgttttatgacctcactctttaaaaaataaaaaacttggtttttctgaggtttctacaatctcacctatttgtactgatttgcttcatttttgtctttagcttctcctcttatgggtgctcagagtttccctaatttgaccacacctggtactacatcaacagtgactatgtcaacatccagtgttactagcagcagcaatgtagctacagcaacaacagttttatcagttggtcaatctttaagtaacactttaaccac

SEQ ID NO: 451868 - DNA, 417 bp, Homo sapiens
accatttgaaactagacagctttatttcacatgtacagcatttggcgcctcaaggtaagaagccttttttttatgtttttagaataagtatgcttttatgttatgtaagttgaaaatgtacaactatactgtcaagactgatagagggaatatattatcttgtattcttataaagaatagtcagcattgccttttggcctgaactaccaatcttctagtaattcgccaaaatgactaatccaaaggaaaggaggagagatacccgatagatgttttctaggtcttttagaaaacatggagttgttcctttggccacgtatatgcaaatctaaaagagaggtgatactgtagacattaagggaatgggtactgttcaaaaaggaatgccccacaagtgttaccgtggctaaactggaa

SEQ ID NO: 451869 - DNA, 601 bp, Homo sapiens
atagtaaaactaacacagtattgcagttgaacgttgaagggaataatgactaacatggaattctttagattagaccaagtgcatgatcttaaagctacctcatgtaatgcatgtgaaatatcatagactttataattgggaaaggccaacatttggtttttcctgttgtagggttgctggtctatagagcatgtggagcagtaccttggcactgatgaattaccaaagaatgacttgataacctacctgcagaagaatgcagacgctgctttcctgcgccactggaaattaactggcactaataaaagtattaggaaaaacagaaattgttctcagctcatagctgcatataaggtatatattggcatcaaaacactattttgattgcaaatggcttcgtgctttgttttgcagctttggaagcttcttaaggaacagcagttcattgagacataattttaaaaatgaggttgaattaacactgttaatgcacaaattctaaaatttcaaatatggctggtagcattggatctgaatgcagactttgaccatggcttagagtggttatattttatttgggaattttaatggtttagaatgc

SEQ ID NO: 451870 - DNA, 459 bp, Homo sapiens
gttcatagttctattatgtttatagttaataaatccaaatctcagttgttttagggtatatcattttttacaattctgagacagaaaccaagacgttttccagagtattttgatcgtttttgtgtagatacttacaaggagattacgatttcggttggaacgtgcacctggtgaaactgcattgattgacaggactggcagaatgttgaagatggaacctttggctacagttgaatctctggaacagtaccttttgaaaatggtgagtttctggcaagggcacggtgaaataagcattctgagctgtggtttagccttttaggacaataatttgggaagtatatatccagagttatggtaatacagtttggcccagtaattccattttagaactgatttctacatgaagatgtttattataattttgtaatattgaaatagtaaacaaaaaccttaatt

SEQ ID NO: 451871 - DNA, 1189 bp, Homo sapiens
ggcacgaggctcaggaaaccagggctgtcacgtgtataacctcaggtttgtcacgtgtataacctcaggaaaccagggctgtcacgtgtataaccctggtttcctgaggtttgtgagggttttatgtggcatgtcttctgatgaaaggaaagcattcttgcagtttaccactggttgttcaactctacccccaggtggactggctaacctgcatcccaggctcacggttgtacgcaaggttgatgctactgatgcaagctatccatcagtcaatacatgtgtgcattaccttaagttgcctgaatattcttccgaggagatcatgagagagcgcctgctagctgctacaatggagaaaggctttcatctcaattgagctttgaagtgcaatgggagacatcagagactttaaaaatactagtgaagcctcttgtgtttgtgtgcagagaagtatatgatccaccatgctaatgacacttgcctttttttccaccattaaggctttaagaacatgtggaataagttttttagctgctaatgacaaaacaaatcctgtaactacccagccagcaagtatatagcacagaacactgtgttactttacaagggcttatgtgactggaataaggtggtcccacttgactgttccaaagagcagcttctcagatcttcagtgttcactggtaaatttctaacagtgtatttgtgtaaagtttgtcatttcatactccatacactacagttgctgtcactgatccctgttttgctggcttttaagctacttggtcaaaaatcctgcttccttaaaacatagagaattaatgagcatctcaagctttttcttttcctttttaatgatgcctgcactatcaagagtattctagtgttctctctttgtttggcatataatcatgcaccaaactttttatttctttaaggtgggagtatatttttatttcctaaatgccatactatgaagatcaaagtcttaagtgtgtttgcagctcaaaaataaagatgtattaaggggggaaaacctggtctaagtgcaaggcacacttacagcgagttttactttcggttgtattttctttgtatattataaacatttatttaacttgttgccgtttgaagtaaaaaatttccaaaatgtatgctcaacaataatcattaaaatgtttgcagcgta

SEQ ID NO: 451872 - DNA, 5535 bp, Homo sapiens
tttgtgtagatacttacaaggagattacgatttcggttggaacgtgcacctggtgaaactgcattgattgacaggactggcagaatgttgaagatggaacctttggctacagttgaatctctggaacagtaccttttgaaaatggtagcaaaacagtggtatgattttgaccgatcttcatttgtttttgttcgaaaattaagagaaggacaaaattttatatttcggcaccagcatgattttgatgaaaatggaatcatttactggattggaacaaatgcaaaaactgcttatgaatgggtaaatccagctgcctatggacttgtagtagtaacgtcatcagaaggaagaaatctaccttatggccgcttagaagacatactaagtcgtgataattcagctttaaattgtcatagcaatgatgataagaatgcctggtttgccatagatctgggtctctgggtgataccatcagcatatacacttcgtcatgctcgtggttatggaaggtctgcactgagaaattgggttttccaggtatccaaagatggacagaactggacttctttgtatacccatgttgatgactgcagtctcaatgaaccagggtcaactgcaacttggcctcttgatccaccaaaggatgagaaacaagggtggagacatgtgagaattaaacagatggggaaaaatgccagtggacaaacacactacctctcattatctggattcgaactttatggcactgtaaatggagtatgtgaagatcagctagggaaagcagctaaagaagcagaagctaatcttagacggcagagacgtctagtacgttcccaggttctgaaatacatggttccaggagctcgtgttatcagaggcctggattggaaatggcgagatcaggatggcagcccacagggagaaggcactgtcacaggagaactacacaatggcacaacgcaatcatggagcagcttggtgaaaaacaactgtccagacaagacatctgctgctgcaggctcctcaagtagaaaaggaagcagcagttctgtgtgtagcgtggccagtagcagcgacatcagcttgggttcgaccaaaacggaacggagatcagaaattgtaatggaacacagtatagtttcaggagctgatgtccatgaaccaattgttgttctttcatctgctgaaaacgtccctcaaacagaagtagggtcatcttccagtgcaagcaccagcaccttaacagcggaaacgggaagtgaaaatgctgaaaggaagttaggccctgatagttctgttcgtactcctggggagtctagtgcaatatccatgggaattgtcagtgttagttctcctgatgttagttcagtatctgaattaactaataaagaagcagcttcacaacgacctcttagctcttcagcaagtaacagactgtcagtgagttctttgttggctgctggggcccctatgagctctagtgcaagtgtacctaacctgtcctcaagagaaacatctagcttggagagttttgtaaggagagtggcaaacatagcacggactaatgccacgaacaacatgaatctaagccgaagcagcagtgataacaacactaatactttggggaggaatgtgatgagcacagcaacttctcctcttatgggtgctcagagtttccctaatttgaccacacctggtactacatcaacagtgactatgtcaacatccagtgttactagcagcagcaatgtagctacagcaacaacagttttatcagttggtcaatctttaagtaacactttaaccaccagcctcacatcaacttccagtgagagtgacacaggtcaggaagcagaatattccttatatgatttccttgatagctgccgtgccagtactctattggctgagctcgatgatgatgaggacttacctgagccagatgaagaagatgatgagaatgaagatgacaatcaggaggaccaagaatacgaggaggttatgattctgagacgcccatccctgcaacgtcgagctggctcccgctctgatgtaacgcatcatgctgttacctcgcagctaccacaggtacctgctggagcagggagccgacctattggggagcaggaagaagaagagtacgaaactaaaggaggacgccggagaacatgggatgatgattatgtgctaaagagacagttttctgcattggttcctgcttttgatcctagacctggtcgtactaatgtccagcagacaactgatctagaaataccacccccagggacccctcattcagagctcttggaagaagtcgaatgtactccgtcacctcgattagctctcactttgaaagtaacaggtcttggaacgactcgtgaagttgaattaccactcaccaatttcagatcaaccatcttttactatgtacaaaaattgcttcaattgtcctgtaatggcaatgtgaaatcagataaacttaggcgtatttgggagcccacatacacaatcatgtacagagaaatgaaggattctgataaagaaaaggaaaatggaaaaatgggttgctggtctatagagcatgtggagcagtaccttggcactgatgaattaccaaagaatgacttgataacctacctgcagaagaatgcagacgctgctttcctgcgccactggaaattaactggcactaataaaagtattaggaaaaacagaaattgttctcagctcatagctgcatataaggatttttgtgagcatggaacaaagtctgggttaaaccagggggccatttctactcttcaaagtagtgatattcttaatttaacaaaagaacaacctcaggccaaagcaggcaatggacagaactcttgtggagtagaagatgtccttcagcttctgcgtattctgtatatagttgcaagtgacccttattcaagaatatcccaggaagatggtgatgaacagcctcagtttacttttccaccagatgaattcactagcaaaaaaattacaacaaaaatattacagcagattgaggaaccattggcactggcaagtggggctctgccagactggtgtgaacaattaaccagcaaatgtccttttctaataccatttgaaactagacagctttatttcacatgtacagcatttggcgcctcaagagcaatagtatggttacagaaccgacgtgaagccactgtggagcgaacgagaaccacaagcagtgttaggcgagatgaccctggagagtttcgagttggtcgtctcaagcatgaaagagtaaaagttccacgtggcgagtcactgatggaatgggctgagaatgtcatgcaaatacatgcagatcggaaatcagttcttgaggttgaatttttaggagaagaaggaactggcttgggacccacattagagttttatgctctggtggcagcagaattccagagaactgacttgggagcttggctttgtgatgataattttccagatgatgaatctcgtcacgttgatcttggaggtggattgaaacctcctggatattatgtgcagaggtcatgtggactgttcacagcaccatttccacaggatagtgatgagcttgaaaggatcacgaaactgtttcatttccttggaattttcttggccaaatgcattcaagacaatagacttgtggacttacctatttctaaacctttttttaaacttatgtgtatgggtgacattaaaagcaatatgagtaaactgatttatgagtcacgaggtgatagagacttacactgtactgaaagtcagtctgaagcttctacagaagaaggtcatgattcactctcggtaggaagctttgaagaggattcaaaatcagaatttattcttgatccccctaaaccaaaacccccagcttggtttaatggaattttgacttgggaagactttgaattagtaaacccacacagagccagatttttaaaagaaattaaagaccttgctatcaagaggcgccaaattttaagcaacaaaggtctttctgaagatgagaagaacacaaaattacaggaactagtgctgaagaatccatcaggttctgggcctccacttagcatagaggatttaggtttaaatttccagttttgcccttcctcaagaatatatggttttacagctgtggatctcaagccaagtggtgaagatgagatgataacaatggataatgcagaagaatatgtggatttgatgtttgacttttgtatgcatacgggtattcagaaacaaatggaagcctttagagatgggtttaataaagtttttccaatggagaaattaagttccttcagccatgaagaagtccaaatgattctttgtggaaaccagtcaccatcctgggcagcagaggatattatcaattacactgaacctaagctgggttatacacgtgacagccctggtttcctgaggtttgtgagggttttatgtggcatgtcttctgatgaaaggaaagcattcttgcagtttaccactggttgttcaactctacccccaggtggactggctaacctgcatcccaggctcacggttgtacgcaaggttgatgctactgatgcaagctatccatcagtcaatacatgtgtgcattaccttaagttgcctgaatattcttccgaggagatcatgagagagcgcctgctagctgctacaatggagaaaggctttcatctcaattgagctttgaagtgcaatgggagacatcagagactttaaaaatactagtgaagcctcttgtgtttgtgtgcagagaagtatatgatccaccatgctaatgacacttgcctttttttccaccattaaggctttaagaacatgtggaataagttttttagctgctaatgacaaaacaaatcctgtaactacccagccagcaagtatatagcacagaacactgtgttactttacaagggcttatgtgactggaataaggtggtcccacttgactgttccaaagagcagcttctcagatcttcagtgttcactggtaaatttctaacagtgtatttgtgtaaagtttgtcatttcatactccatacactacagttgctgtcactgatccctgttttgctggcttttaagctacttggtcaaaaatcctgcttccttaaaacatagagaattaatgagcatctcaagctttttcttttcctttttaatgatgcctgcactatcaagagtattctagtgttctctctttgtttggcatataatcatgcaccaaactttttatttctttaaggtgggagtatatttttatttcctaaatgccatactatgaagatcaaagtcttaagtgtgtttgcagctcaaaaataaagatgtattaaggggggaaaacctggtctaagtgcaaggcacacttacagcgagttttactttcggttgtattttctttgtatattataaacatttatttaacttgttgccgtttgaagtaaaaaatttccaaaatgtatgctcaacaataatcattaaaatgtttgcagcgta

SEQ ID NO: 451873 - DNA, 5978 bp, Homo sapiens
tttgtgtagatacttacaaggagattacgatttcggttggaacgtgcacctggtgaaactgcattgattgacaggactggcagaatgttgaagatggaacctttggctacagttgaatctctggaacagtaccttttgaaaatggtagcaaaacagtggtatgattttgaccgatcttcatttgtttttgttcgaaaattaagagaaggacaaaattttatatttcggcaccagcatgattttgatgaaaatggaatcatttactggattggaacaaatgcaaaaactgcttatgaatgggtaaatccagctgcctatggacttgtagtagtaacgtcatcagaaggaagaaatctaccttatggccgcttagaagacatactaagtcgtgataattcagctttaaattgtcatagcaatgatgataagaatgcctggtttgccatagatctgggtctctgggtgataccatcagcatatacacttcgtcatgctcgtggttatggaaggtctgcactgagaaattgggttttccaggtatccaaagatggacagaactggacttctttgtatacccatgttgatgactgcagtctcaatgaaccagggtcaactgcaacttggcctcttgatccaccaaaggatgagaaacaagggtggagacatgtgagaattaaacagatggggaaaaatgccagtggacaaacacactacctctcattatctggattcgaactttatggcactgtaaatggagtatgtgaagatcagctagggaaagcagctaaagaagcagaagctaatcttagacggcagagacgtctagtacgttcccaggttctgaaatacatggttccaggagctcgtgttatcagaggcctggattggaaatggcgagatcaggatggcagcccacagggagaaggcactgtcacaggagaactacacaatggcacaacgcaatcatggagcagcttggtgaaaaacaactgtccagacaagacatctgctgctgcaggctcctcaagtagaaaaggaagcagcagttctgtgtgtagcgtggccagtagcagcgacatcagcttgggttcgaccaaaacggaacggagatcagaaattgtaatggaacacagtatagtttcaggagctgatgtccatgaaccaattgttgttctttcatctgctgaaaacgtccctcaaacagaagtagggtcatcttccagtgcaagcaccagcaccttaacagcggaaacgggaagtgaaaatgctgaaaggaagttaggccctgatagttctgttcgtactcctggggagtctagtgcaatatccatgggaattgtcagtgttagttctcctgatgttagttcagtatctgaattaactaataaagaagcagcttcacaacgacctcttagctcttcagcaagtaacagactgtcagtgagttctttgttggctgctggggcccctatgagctctagtgcaagtgtacctaacctgtcctcaagagaaacatctagcttggagagttttgtaaggagagtggcaaacatagcacggactaatgccacgaacaacatgaatctaagccgaagcagcagtgataacaacactaatactttggggaggaatgtgatgagcacagcaacttctcctcttatgggtgctcagagtttccctaatttgaccacacctggtactacatcaacagtgactatgtcaacatccagtgttactagcagcagcaatgtagctacagcaacaacagttttatcagttggtcaatctttaagtaacactttaaccaccagcctcacatcaacttccagtgagagtgacacaggtcaggaagcagaatattccttatatgatttccttgatagctgccgtgccagtactctattggctgagctcgatgatgatgaggacttacctgagccagatgaagaagatgatgagaatgaagatgacaatcaggaggaccaagaatacgaggaggttatgattctgagacgcccatccctgcaacgtcgagctggctcccgctctgatgtaacgcatcatgctgttacctcgcagctaccacaggtacctgctggagcagggagccgacctattggggagcaggaagaagaagagtacgaaactaaaggaggacgccggagaacatgggatgatgattatgtgctaaagagacagttttctgcattggttcctgcttttgatcctagacctggtcgtactaatgtccagcagacaactgatctagaaataccacccccagggacccctcattcagagctcttggaagaagtcgaatgtactccgtcacctcgattagctctcactttgaaagtaacaggtcttggaacgactcgtgaagttgaattaccactcaccaatttcagatcaaccatcttttactatgtacaaaaattgcttcaattgtcctgtaatggcaatgtgaaatcagataaacttaggcgtatttgggagcccacatacacaatcatgtacagagaaatgaaggattctgataaagaaaaggaaaatggaaaaatgggttgctggtctatagagcatgtggagcagtaccttggcactgatgaattaccaaagaatgacttgataacctacctgcagaagaatgcagacgctgctttcctgcgccactggaaattaactggcactaataaaagtattaggaaaaacagaaattgttctcagctcatagctgcatataaggatttttgtgagcatggaacaaagtctgggttaaaccagggggccatttctactcttcaaagtagtgatattcttaatttaacaaaagaacaacctcaggccaaagcaggcaatggacagaactcttgtggagtagaagatgtccttcagcttctgcgtattctgtatatagttgcaagtgacccttattcaagaatatcccaggaagatggtgatgaacagcctcagtttacttttccaccagatgaattcactagcaaaaaaattacaacaaaaatattacagcagattgaggaaccattggcactggcaagtggggctctgccagactggtgtgaacaattaaccagcaaatgtccttttctaataccatttgaaactagacagctttatttcacatgtacagcatttggcgcctcaagagcaatagtatggttacagaaccgacgtgaagccactgtggagcgaacgagaaccacaagcagtgttaggcgagatgaccctggagagtttcgagttggtcgtctcaagcatgaaagagtaaaagttccacgtggcgagtcactgatggaatgggctgagaatgtcatgcaaatacatgcagatcggaaatcagttcttgaggttgaatttttaggagaagaaggaactggcttgggacccacattagagttttatgctctggtggcagcagaattccagagaactgacttgggagcttggctttgtgatgataattttccagatgatgaatctcgtcacgttgatcttggaggtggattgaaacctcctggatattatgtgcagaggtcatgtggactgttcacagcaccatttccacaggatagtgatgagcttgaaaggatcacgaaactgtttcatttccttggaattttcttggccaaatgcattcaagacaatagacttgtggacttacctatttctaaacctttttttaaacttatgtgtatgggtgacattaaaagcaatatgagtaaactgatttatgagtcacgaggtgatagagacttacactgtactgaaagtcagtctgaagcttctacagaagaaggtcatgattcactctcggtaggaagctttgaagaggattcaaaatcagaatttattcttgatccccctaaaccaaaacccccagcttggtttaatggaattttgacttgggaagactttgaattagtaaacccacacagagccagatttttaaaagaaattaaagaccttgctatcaagaggcgccaaattttaagcaacaaaggtctttctgaagatgagaagaacacaaaattacaggaactagtgctgaagaatccatcaggttctgggcctccacttagcatagaggatttaggtttaaatttccagttttgcccttcctcaagaatatatggttttacagctgtggatctcaagccaagtggtgaagatgagatgataacaatggataatgcagaagaatatgtggatttgatgtttgacttttgtatgcatacgggtattcagaaacaaatggaagcctttagagatgggtttaataaagtttttccaatggagaaattaagttccttcagccatgaagaagtccaaatgattctttgtggaaaccagtcaccatcctgggcagcagaggatattatcaattacactgaacctaagctgggttatacacgtgacagccctggtttcctgaggtttgtgagggttttatgtggcatgtcttctgatgaaaggaaagcattcttgcagtttaccactggttgttcaactctacccccaggtggactggctaacctgcatcccaggctcacggttgtacgcaaggttgatgctactgatgcaagctatccatcagtcaatacatgtgtgcattaccttaagttgcctgaatattcttccgaggagatcatgagagagcgcctgctagctgctacaatggagaaaggctttcatctcaattgagctttgaagtgcaatgggagacatcagagactttaaaaatactagtgaagcctcttgtgtttgtgtgcagagaagtatatgatccaccatgctaatgacacttgcctttttttccaccattaaggctttaagaacatgtggaataagttttttagctgctaatgacaaaacaaatcctgtaactacccagccagcaagtatatagcacagaacactgtgttactttacaagggcttatgtgactggaataaggtggtcccacttgactgttccaaagagcagcttctcagatcttcagtgttcactggtaaatttctaacagtgtatttgtgtaaagtttgtcatttcatactccatacactacagttgctgtcactgatccctgttttgctggcttttaagctacttggtcaaaaatcctgcttccttaaaacatagagaattaatgagcatctcaagctttttcttttcctttttaatgatgcctgcactatcaagagtattctagtgttctctctttgtttggcatataatcatgcaccaaactttttatttctttaaggtgggagtatatttttatttcctaaatgccatactatgaagatcaaagtcttaagtgtgtttgcagctcaaaaataaagatgtattaaggggggaaaacctggtctaagtgcaaggcacacttacagcgagttttactttcggttgtattttctttgtatattataaacatttatttaacttgttgccgtttgaagtaaaaaatttccaaaatgtatgctcaacaataatcattaaaatgtttgcagcgtaaaaaaaaaaaagaaaaagaaaaaaaaaaaaaaaaaaaaagaaaaagaaaaaaagacgtgaaggaaaaaaaagaggggggggagagttggaggaggggggtataagatgtcatacttggaccacgacatcgcatgcatccacaatcgccattcattccaacaccgtcgccgcgcgtatcacacgcacagccttcaacccggcgaagcaactctgtggtgagagacccacacactgacgcaagcacagagagcatcacgacactgcgcaataatgacacgtcagcgatgaatctcccacagtgtagcttgcggcggctgatacatgggcatcagtgagaactgtatacaatagacaaaatgagatagacgcaacacgctcgactcggatcagagactccatgcaacagtcacactcagcggccgtgctatcctccgtcccccagg

SEQ ID NO: 451874 - DNA, 5533 bp, Homo sapiens
tttgtgtagatacttacaaggagattacgatttcggttggaacgtgcacctggtgaaactgcattgattgacaggactggcagaatgttgaagatggaacctttggctacagttgaatctctggaacagtaccttttgaaaatggtagcaaaacagtggtatgattttgaccgatcttcatttgtttttgttcgaaaattaagagaaggacaaaattttatatttcggcaccagcatgattttgatgaaaatggaatcatttactggattggaacaaatgcaaaaactgcttatgaatgggtaaatccagctgcctatggacttgtagtagtaacgtcatcagaaggaagaaatctaccttatggccgcttagaagacatactaagtcgtgataattcagctttaaattgtcatagcaatgatgataagaatgcctggtttgccatagatctgggtctctgggtgataccatcagcatatacacttcgtcatgctcgtggttatggaaggtctgcactgagaaattgggttttccaggtatccaaagatggacagaactggacttctttgtatacccatgttgatgactgcagtctcaatgaaccagggtcaactgcaacttggcctcttgatccaccaaaggatgagaaacaagggtggagacatgtgagaattaaacagatggggaaaaatgccagtggacaaacacactacctctcattatctggattcgaactttatggcactgtaaatggagtatgtgaagatcagctagggaaagcagctaaagaagcagaagctaatcttagacggcagagacgtctagtacgttcccaggttctgaaatacatggttccaggagctcgtgttatcagaggcctggattggaaatggcgagatcaggatggcagcccacagggagaaggcactgtcacaggagaactacacaatggcacaacgcaatcatggagcagcttggtgaaaaacaactgtccagacaagacatctgctgctgcaggctcctcaagtagaaaaggaagcagcagttctgtgtgtagcgtggccagtagcagcgacatcagcttgggttcgaccaaaacggaacggagatcagaaattgtaatggaacacagtatagtttcaggagctgatgtccatgaaccaattgttgttctttcatctgctgaaaacgtccctcaaacagaagtagggtcatcttccagtgcaagcaccagcaccttaacagcggaaacgggaagtgaaaatgctgaaaggaagttaggccctgatagttctgttcgtactcctggggagtctagtgcaatatccatgggaattgtcagtgttagttctcctgatgttagttcagtatctgaattaactaataaagaagcagcttcacaacgacctcttagctcttcagcaagtaacagactgtcagtgagttctttgttggctgctggggcccctatgagctctagtgcaagtgtacctaacctgtcctcaagagaaacatctagcttggagagttttgtaaggagagtggcaaacatagcacggactaatgccacgaacaacatgaatctaagccgaagcagcagtgataacaacactaatactttggggaggaatgtgatgagcacagcaacttctcctcttatgggtgctcagagtttccctaatttgaccacacctggtactacatcaacagtgactatgtcaacatccagtgttactagcagcagcaatgtagctacagcaacaacagttttatcagttggtcaatctttaagtaacactttaaccaccagcctcacatcaacttccagtgagagtgacacaggtcaggaagcagaatattccttatatgatttccttgatagctgccgtgccagtactctattggctgagctcgatgatgatgaggacttacctgagccagatgaagaagatgatgagaatgaagatgacaatcaggaggaccaagaatacgaggaggttatgattctgagacgcccatccctgcaacgtcgagctggctcccgctctgatgtaacgcatcatgctgttacctcgcagctaccacaggtacctgctggagcagggagccgacctattggggagcaggaagaagaagagtacgaaactaaaggaggacgccggagaacatgggatgatgattatgtgctaaagagacagttttctgcattggttcctgcttttgatcctagacctggtcgtactaatgtccagcagacaactgatctagaaataccacccccagggacccctcattcagagctcttggaagaagtcgaatgtactccgtcacctcgattagctctcactttgaaagtaacaggtcttggaacgactcgtgaagttgaattaccactcaccaatttcagatcaaccatcttttactatgtacaaaaattgcttcaattgtcctgtaatggcaatgtgaaatcagataaacttaggcgtatttgggagcccacatacacaatcatgtacagagaaatgaaggattctgataaagaaaaggaaaatggaaaaatgggttgctggtctatagagcatgtggagcagtaccttggcactgatgaattaccaaagaatgacttgataacctacctgcagaagaatgcagacgctgctttcctgcgccactggaaattaactggcactaataaaagtattaggaaaaacagaaattgttctcagctcatagctgcatataaggatttttgtgagcatggaacaaagtctgggttaaaccagggggccatttctactcttcaaagtagtgatattcttaatttaacaaaagaacaacctcaggccaaagcaggcaatggacagaactcttgtggagtagaagatgtccttcagcttctgcgtattctgtatatagttgcaagtgacccttattcaagaatatcccaggaagatggtgatgaacagcctcagtttacttttccaccagatgaattcactagcaaaaaaattacaacaaaaatattacagcagattgaggaaccattggcactggcaagtggggctctgccagactggtgtgaacaattaaccagcaaatgtccttttctaataccatttgaaactagacagctttatttcacatgtacagcatttggcgcctcaagagcaatagtatggttacagaaccgacgtgaagccactgtggagcgaacgagaaccacaagcagtgttaggcgagatgaccctggagagtttcgagttggtcgtctcaagcatgaaagagtaaaagttccacgtggcgagtcactgatggaatgggctgagaatgtcatgcaaatacatgcagatcggaaatcagttcttgaggttgaatttttaggagaagaaggaactggcttgggacccacattagagttttatgctctggtggcagcagaattccagagaactgacttgggagcttggctttgtgatgataattttccagatgatgaatctcgtcacgttgatcttggaggtggattgaaacctcctggatattatgtgcagaggtcatgtggactgttcacagcaccatttccacaggatagtgatgagcttgaaaggatcacgaaactgtttcatttccttggaattttcttggccaaatgcattcaagacaatagacttgtggacttacctatttctaaacctttttttaaacttatgtgtatgggtgacattaaaagcaatatgagtaaactgatttatgagtcacgaggtgatagagacttacactgtactgaaagtcagtctgaagcttctacagaagaaggtcatgattcactctcggtaggaagctttgaagaggattcaaaatcagaatttattcttgatccccctaaaccaaaacccccagcttggtttaatggaattttgacttgggaagactttgaattagtaaacccacacagagccagatttttaaaagaaattaaagaccttgctatcaagaggcgccaaattttaagcaacaaaggtctttctgaagatgagaagaacacaaaattacaggaactagtgctgaagaatccatcaggttctgggcctccacttagcatagaggatttaggtttaaatttccagttttgcccttcctcaagaatatatggttttacagctgtggatctcaagccaagtggtgaagatgagatgataacaatggataatgcagaagaatatgtggatttgatgtttgacttttgtatgcatacgggtattcagaaacaaatggaagcctttagagatgggtttaataaagtttttccaatggagaaattaagttccttcagccatgaagaagtccaaatgattctttgtggaaaccagtcaccatcctgggcagcagaggatattatcaattacactgaacctaagctgggttatacacgtgacagccctggtttcctgaggtttgtgagggttttatgtggcatgtcttctgatgaaaggaaagcattcttgcagtttaccactggttgttcaactctacccccaggtggactggctaacctgcatcccaggctcacggttgtacgcaaggttgatgctactgatgcaagctatccatcagtcaatacatgtgtgcattaccttaagttgcctgaatattcttccgaggagatcatgagagagcgcctgctagctgctacaatggagaaaggctttcatctcaattgagctttgaagtgcaatgggagacatcagagactttaaaaatactagtgaagcctcttgtgtttgtgtgcagagaagtatatgatccaccatgctaatgacacttgcctttttttccaccattaaggctttaagaacatgtggaataagttttttagctgctaatgacaaaacaaatcctgtaactacccagccagcaagtatatagcacagaacactgtgttactttacaagggcttatgtgactggaataaggtggtcccacttgactgttccaaagagcagcttctcagatcttcagtgttcactggtaaatttctaacagtgtatttgtgtaaagtttgtcatttcatactccatacactacagttgctgtcactgatccctgttttgctggcttttaagctacttggtcaaaaatcctgcttccttaaaacatagagaattaatgagcatctcaagctttttcttttcctttttaatgatgcctgcactatcaagagtattctagtgttctctctttgtttggcatataatcatgcaccaaactttttatttctttaaggtgggagtatatttttatttcctaaatgccatactatgaagatcaaagtcttaagtgtgtttgcagctcaaaaataaagatgtattaaggggggaaaacctggtctaagtgcaaggcacacttacagcgagttttactttcggttgtattttctttgtatattataaacatttgctgaccttccctccactattgtcctatgaccctgccaaatccccctctgcgagaaacacccaagaatgatcaata

SEQ ID NO: 451875 - DNA, 5502 bp, Homo sapiens
tttgtgtagatacttacaaggagattacgatttcggttggaacgtgcacctggtgaaactgcattgattgacaggactggcagaatgttgaagatggaacctttggctacagttgaatctctggaacagtaccttttgaaaatggtagcaaaacagtggtatgattttgaccgatcttcatttgtttttgttcgaaaattaagagaaggacaaaattttatatttcggcaccagcatgattttgatgaaaatggaatcatttactggattggaacaaatgcaaaaactgcttatgaatgggtaaatccagctgcctatggacttgtagtagtaacgtcatcagaaggaagaaatctaccttatggccgcttagaagacatactaagtcgtgataattcagctttaaattgtcatagcaatgatgataagaatgcctggtttgccatagatctgggtctctgggtgataccatcagcatatacacttcgtcatgctcgtggttatggaaggtctgcactgagaaattgggttttccaggtatccaaagatggacagaactggacttctttgtatacccatgttgatgactgcagtctcaatgaaccagggtcaactgcaacttggcctcttgatccaccaaaggatgagaaacaagggtggagacatgtgagaattaaacagatggggaaaaatgccagtggacaaacacactacctctcattatctggattcgaactttatggcactgtaaatggagtatgtgaagatcagctagggaaagcagctaaagaagcagaagctaatcttagacggcagagacgtctagtacgttcccaggttctgaaatacatggttccaggagctcgtgttatcagaggcctggattggaaatggcgagatcaggatggcagcccacagggagaaggcactgtcacaggagaactacacaatggcacaacgcaatcatggagcagcttggtgaaaaacaactgtccagacaagacatctgctgctgcaggctcctcaagtagaaaaggaagcagcagttctgtgtgtagcgtggccagtagcagcgacatcagcttgggttcgaccaaaacggaacggagatcagaaattgtaatggaacacagtatagtttcaggagctgatgtccatgaaccaattgttgttctttcatctgctgaaaacgtccctcaaacagaagtagggtcatcttccagtgcaagcaccagcaccttaacagcggaaacgggaagtgaaaatgctgaaaggaagttaggccctgatagttctgttcgtactcctggggagtctagtgcaatatccatgggaattgtcagtgttagttctcctgatgttagttcagtatctgaattaactaataaagaagcagcttcacaacgacctcttagctcttcagcaagtaacagactgtcagtgagttctttgttggctgctggggcccctatgagctctagtgcaagtgtacctaacctgtcctcaagagaaacatctagcttggagagttttgtaaggagagtggcaaacatagcacggactaatgccacgaacaacatgaatctaagccgaagcagcagtgataacaacactaatactttggggaggaatgtgatgagcacagcaacttctcctcttatgggtgctcagagtttccctaatttgaccacacctggtactacatcaacagtgactatgtcaacatccagtgttactagcagcagcaatgtagctacagcaacaacagttttatcagttggtcaatctttaagtaacactttaaccaccagcctcacatcaacttccagtgagagtgacacaggtcaggaagcagaatattccttatatgatttccttgatagctgccgtgccagtactctattggctgagctcgatgatgatgaggacttacctgagccagatgaagaagatgatgagaatgaagatgacaatcaggaggaccaagaatacgaggaggttatgattctgagacgcccatccctgcaacgtcgagctggctcccgctctgatgtaacgcatcatgctgttacctcgcagctaccacaggtacctgctggagcagggagccgacctattggggagcaggaagaagaagagtacgaaactaaaggaggacgccggagaacatgggatgatgattatgtgctaaagagacagttttctgcattggttcctgcttttgatcctagacctggtcgtactaatgtccagcagacaactgatctagaaataccacccccagggacccctcattcagagctcttggaagaagtcgaatgtactccgtcacctcgattagctctcactttgaaagtaacaggtcttggaacgactcgtgaagttgaattaccactcaccaatttcagatcaaccatcttttactatgtacaaaaattgcttcaattgtcctgtaatggcaatgtgaaatcagataaacttaggcgtatttgggagcccacatacacaatcatgtacagagaaatgaaggattctgataaagaaaaggaaaatggaaaaatgggttgctggtctatagagcatgtggagcagtaccttggcactgatgaattaccaaagaatgacttgataacctacctgcagaagaatgcagacgctgctttcctgcgccactggaaattaactggcactaataaaagtattaggaaaaacagaaattgttctcagctcatagctgcatataaggatttttgtgagcatggaacaaagtctgggttaaaccagggggccatttctactcttcaaagtagtgatattcttaatttaacaaaagaacaacctcaggccaaagcaggcaatggacagaactcttgtggagtagaagatgtccttcagcttctgcgtattctgtatatagttgcaagtgacccttattcaagaatatcccaggaagatggtgatgaacagcctcagtttacttttccaccagatgaattcactagcaaaaaaattacaacaaaaatattacagcagattgaggaaccattggcactggcaagtggggctctgccagactggtgtgaacaattaaccagcaaatgtccttttctaataccatttgaaactagacagctttatttcacatgtacagcatttggcgcctcaagagcaatagtatggttacagaaccgacgtgaagccactgtggagcgaacgagaaccacaagcagtgttaggcgagatgaccctggagagtttcgagttggtcgtctcaagcatgaaagagtaaaagttccacgtggcgagtcactgatggaatgggctgagaatgtcatgcaaatacatgcagatcggaaatcagttcttgaggttgaatttttaggagaagaaggaactggcttgggacccacattagagttttatgctctggtggcagcagaattccagagaactgacttgggagcttggctttgtgatgataattttccagatgatgaatctcgtcacgttgatcttggaggtggattgaaacctcctggatattatgtgcagaggtcatgtggactgttcacagcaccatttccacaggatagtgatgagcttgaaaggatcacgaaactgtttcatttccttggaattttcttggccaaatgcattcaagacaatagacttgtggacttacctatttctaaacctttttttaaacttatgtgtatgggtgacattaaaagcaatatgagtaaactgatttatgagtcacgaggtgatagagacttacactgtactgaaagtcagtctgaagcttctacagaagaaggtcatgattcactctcggtaggaagctttgaagaggattcaaaatcagaatttattcttgatccccctaaaccaaaacccccagcttggtttaatggaattttgacttgggaagactttgaattagtaaacccacacagagccagatttttaaaagaaattaaagaccttgctatcaagaggcgccaaattttaagcaacaaaggtctttctgaagatgagaagaacacaaaattacaggaactagtgctgaagaatccatcaggttctgggcctccacttagcatagaggatttaggtttaaatttccagttttgcccttcctcaagaatatatggttttacagctgtggatctcaagccaagtggtgaagatgagatgataacaatggataatgcagaagaatatgtggatttgatgtttgacttttgtatgcatacgggtattcagaaacaaatggaagcctttagagatgggtttaataaagtttttccaatggagaaattaagttccttcagccatgaagaagtccaaatgattctttgtggaaaccagtcaccatcctgggcagcagaggatattatcaattacactgaacctaagctgggttatacacgtgacagccctggtttcctgaggtttgtgagggttttatgtggcatgtcttctgatgaaaggaaagcattcttgcagtttaccactggttgttcaactctacccccaggtggactggctaacctgcatcccaggctcacggttgtacgcaaggttgatgctactgatgcaagctatccatcagtcaatacatgtgtgcattaccttaagttgcctgaatattcttccgaggagatcatgagagagcgcctgctagctgctacaatggagaaaggctttcatctcaattgagctttgaagtgcaatgggagacatcagagactttaaaaatactagtgaagcctcttgtgtttgtgtgcagagaagtatatgatccaccatgctaatgacacttgcctttttttccaccattaaggctttaagaacatgtggaataagttttttagctgctaatgacaaaacaaatcctgtaactacccagccagcaagtatatagcacagaacactgtgttactttacaagggcttatgtgactggaataaggtggtcccacttgactgttccaaagagcagcttctcagatcttcagtgttcactggtaaatttctaacagtgtatttgtgtaaagtttgtcatttcatactccatacactacagttgctgtcactgatccctgttttgctggcttttaagctacttggtcaaaaatcctgcttccttaaaacatagagaattaatgatgcctgcactatcaagagtattctagtgttctctctttgtttggcatataatcatgcaccaaactttttatttctttaaggtgggagtatatttttatttcctaaatgccatactatgaagatcaaagtcttaagtgtgtttgcagctcaaaaataaagatgtattaaggggggaaaacctggtctaagtgcaaggcacacttacagcgagttttactttcggttgtattttctttgtatattataaacatttatttaacttgttgccgtttgaagtaaaaaatttccaaaatgtatgctcaacaataatcattaaaatgtttgcagcgta

SEQ ID NO: 451876 - DNA, 4605 bp, Homo sapiens
tttgtgtagatacttacaaggagattacgatttcggttggaacgtgcacctggtgaaactgcattgattgacaggactggcagaatgttgaagatggaacctttggctacagttgaatctctggaacagtaccttttgaaaatggtagcaaaacagtggtatgattttgaccgatcttcatttgtttttgttcgaaaattaagagaaggacaaaattttatatttcggcaccagcatgattttgatgaaaatggaatcatttactggattggaacaaatgcaaaaactgcttatgaatgggtaaatccagctgcctatggacttgtagtagtaacgtcatcagaaggaagaaatctaccttatggccgcttagaagacatactaagtcgtgataattcagctttaaattgtcatagcaatgatgataagaatgcctggtttgccatagatctgggtctctgggtgataccatcagcatatacacttcgtcatgctcgtggttatggaaggtctgcactgagaaattgggttttccaggtatccaaagatggacagaactggacttctttgtatacccatgttgatgactgcagtctcaatgaaccagggtcaactgcaacttggcctcttgatccaccaaaggatgagaaacaagggtggagacatgtgagaattaaacagatggggaaaaatgccagtggacaaacacactacctctcattatctggattcgaactttatggcactgtaaatggagtatgtgaagatcagctagggaaagcagctaaagaagcagaagctaatcttagacggcagagacgtctagtacgttcccaggttctgaaatacatggttccaggagctcgtgttatcagaggcctggattggaaatggcgagatcaggatggcagcccacagggagaaggcactgtcacaggagaactacacaatggcacaacgcaatcatggagcagcttggtgaaaaacaactgtccagacaagacatctgctgctgcaggctcctcaagtagaaaaggaagcagcagttctgtgtgtagcgtggccagtagcagcgacatcagcttgggttcgaccaaaacggaacggagatcagaaattgtaatggaacacagtatagtttcaggagctgatgtccatgaaccaattgttgttctttcatctgctgaaaacgtccctcaaacagaagtagggtcatcttccagtgcaagcaccagcaccttaacagcggaaacgggaagtgaaaatgctgaaaggaagttaggccctgatagttctgttcgtactcctggggagtctagtgcaatatccatgggaattgtcagtgttagttctcctgatgttagttcagtatctgaattaactaataaagaagcagcttcacaacgacctcttagctcttcagcaagtaacagactgtcagtgagttctttgttggctgctggggcccctatgagctctagtgcaagtgtacctaacctgtcctcaagagaaacatctagcttggagagttttgtaaggagagtggcaaacatagcacggactaatgccacgaacaacatgaatctaagccgaagcagcagtgataacaacactaatactttggggaggaatgtgatgagcacagcaacttctcctcttatgggtgctcagagtttccctaatttgaccacacctggtactacatcaacagtgactatgtcaacatccagtgttactagcagcagcaatgtagctacagcaacaacagttttatcagttggtcaatctttaagtaacactttaaccaccagcctcacatcaacttccagtgagagtgacacaggtcaggaagcagaatattccttatatgatttccttgatagctgccgtgccagtactctattggctgagctcgatgatgatgaggacttacctgagccagatgaagaagatgatgagaatgaagatgacaatcaggaggaccaagaatacgaggaggttatgattctgagacgcccatccctgcaacgtcgagctggctcccgctctgatgtaacgcatcatgctgttacctcgcagctaccacaggtacctgctggagcagggagccgacctattggggagcaggaagaagaagagtacgaaactaaaggaggacgccggagaacatgggatgatgattatgtgctaaagagacagttttctgcattggttcctgcttttgatcctagacctggtcgtactaatgtccagcagacaactgatctagaaataccacccccagggacccctcattcagagctcttggaagaagtcgaatgtactccgtcacctcgattagctctcactttgaaagtaacaggtcttggaacgactcgtgaagttgaattaccactcaccaatttcagatcaaccatcttttactatgtacaaaaattgcttcaattgtcctgtaatggcaatgtgaaatcagataaacttaggcgtatttgggagcccacatacacaatcatgtacagagaaatgaaggattctgataaagaaaaggaaaatggaaaaatgggttgctggtctatagagcatgtggagcagtaccttggcactgatgaattaccaaagaatgacttgataacctacctgcagaagaatgcagacgctgctttcctgcgccactggaaattaactggcactaataaaagtattaggaaaaacagaaattgttctcagctcatagctgcatataaggatttttgtgagcatggaacaaagtctgggttaaaccagggggccatttctactcttcaaagtagtgatattcttaatttaacaaaagaacaacctcaggccaaagcaggcaatggacagaactcttgtggagtagaagatgtccttcagcttctgcgtattctgtatatagttgcaagtgacccttattcaagaatatcccaggaagatggtgatgaacagcctcagtttacttttccaccagatgaattcactagcaaaaaaattacaacaaaaatattacagcagattgaggaaccattggcactggcaagtggggctctgccagactggtgtgaacaattaaccagcaaatgtccttttctaataccatttgaaactagacagctttatttcacatgtacagcatttggcgcctcaagagcaatagtatggttacagaaccgacgtgaagccactgtggagcgaacgagaaccacaagcagtgttaggcgagatgaccctggagagtttcgagttggtcgtctcaagcatgaaagagtaaaagttccacgtggcgagtcactgatggaatgggctgagaatgtcatgcaaatacatgcagatcggaaatcagttcttgaggttgaatttttaggagaagaaggaactggcttgggacccacattagagttttatgctctggtggcagcagaattccagagaactgacttgggagcttggctttgtgatgataattttccagatgatgaatctcgtcacgttgatcttggaggtggattgaaacctcctggatattatgtgcagaggtcatgtggactgttcacagcaccatttccacaggatagtgatgagcttgaaaggatcacgaaactgtttcatttccttggaattttcttggccaaatgcattcaagacaatagacttgtggacttacctatttctaaacctttttttaaacttatgtgtatgggtgacattaaaagcaatatgagtaaactgatttatgagtcacgaggtgatagagacttacactgtactgaaagtcagtctgaagcttctacagaagaaggtcatgattcactctcggtaggaagctttgaagaggattcaaaatcagaatttattcttgatccccctaaaccaaaacccccagcttggtttaatggaattttgacttgggaagactttgaattagtaaacccacacagagccagatttttaaaagaaattaaagaccttgctatcaagaggcgccaaattttaagcaacaaaggtctttctgaagatgagaagaacacaaaattacaggaactagtgctgaagaatccatcaggttctgggcctccacttagcatagaggatttaggtttaaatttccagttttgcccttcctcaagaatatatggttttacagctgtggatctcaagccaagtggtgaagatgagctacttggtcaaaaatcctgcttccttaaaacatagagaattaatgagcatctcaagctttttcttttcctttttaatgatgcctgcactatcaagagtattctagtgttctctctttgtttggcatataatcatgcaccaaactttttatttctttaaggtgggagtatatttttatttcctaaatgccatactatgaagatcaaagtcttaagtgtgtttgcagctcaaaaataaagatgtattaaggggggaaaacctggtctaagtgcaaggcacacttacagcgagttttactttcggttgtattttctttgtatattataaacatttatttaacttgttgccgtttgaagtaaaaaatttccaaaatgtatgctcaacaataatcattaaaatgtttgcagcgta

SEQ ID NO: 451877 - DNA, 2864 bp, Homo sapiens
tttgtgtagatacttacaaggagattacgatttcggttggaacgtgcacctggtgaaactgcattgattgacaggactggcagaatgttgaagatggaacctttggctacagttgaatctctggaacagtaccttttgaaaatggtagcaaaacagtggtatgattttgaccgatcttcatttgtttttgttcgaaaattaagagaaggacaaaattttatatttcggcaccagcatgattttgatgaaaatggaatcatttactggattggaacaaatgcaaaaactgcttatgaatgggtaaatccagctgcctatggacttgtagtagtaacgtcatcagaaggaagaaatctaccttatggccgcttagaagacatactaagtcgtgataattcagctttaaattgtcatagcaatgatgataagaatgcctggtttgccatagatctgggtctctgggtgataccatcagcatatacacttcgtcatgctcgtggttatggaaggtctgcactgagaaattgggttttccaggtatccaaagatggacagaactggacttctttgtatacccatgttgatgactgcagtctcaatgaaccagggtcaactgcaacttggcctcttgatccaccaaaggatgagaaacaagggtggagacatgtgagaattaaacagatggggaaaaatgccagtggacaaacacactacctctcattatctggattcgaactttatggcactgtaaatggagtatgtgaagatcagctagggaaagcagctaaagaagcagaagctaatcttagacggcagagacgtctagtacgttcccaggttctgaaatacatggttccaggagctcgtgttatcagaggcctggattggaaatggcgagatcaggatggcagcccacagggagaaggcactgtcacaggagaactacacaatggcacaacgcaatcatggagcagcttggtgaaaaacaactgtccagacaagacatctgctgctgcaggctcctcaagtagaaaaggaagcagcagttctgtgtgtagcgtggccagtagcagcgacatcagcttgggttcgaccaaaacggaacggagatcagaaattgtaatggaacacagtatagtttcaggagctgatgtccatgaaccaattgttgttctttcatctgctgaaaacgtccctcaaacagaagtagggtcatcttccagtgcaagcaccagcaccttaacagcggaaacgggaagtgaaaatgctgaaaggaagttaggccctgatagttctgttcgtactcctggggagtctagtgcaatatccatgggaattgtcagtgttagttctcctgatgttagttcagtatctgaattaactaataaagaagcagcttcacaacgacctcttagctcttcagcaagtaacagactgtcagtgagttctttgttggctgctggggcccctatgagctctagtgcaagtgtacctaacctgtcctcaagagaaacatctagcttggagagttttgtaaggagagtggcaaacatagcacggactaatgccacgaacaacatgaatctaagccgaagcagcagtgataacaacactaatactttggggaggaatgtgatgagcacagcaacttctcctcttatgggtgctcagagtttccctaatttgaccacacctggtactacatcaacagtgactatgtcaacatccagtgttactagcagcagcaatgtagctacagcaacaacagttttatcagttggtcaatctttaagtaacactttaaccaccagcctcacatcaacttccagtgagagtgacacaggtcaggaagcagaatattccttatatgatttccttgatagctgccgtgccagtactctattggctgagctcgatgatgatgaggacttacctgagccagatgaagaagatgatgagaatgaagatgacaatcaggaggaccaagaatacgaggaggttatgattctgagacgcccatccctgcaacgtcgagctggctcccgctctgatgtaacgcatcatgctgttacctcgcagctaccacaggtacctgctggagcagggagccgacctattggggagcaggaagaagaagagtacgaaactaaaggaggacgccggagaacatgggatgatgattatgtgctaaagagacagttttctgcattggttcctgcttttgatcctagacctggtcgtactaatgtccagcagacaactgatctagaaataccacccccagggacccctcattcagagctcttggaagaagtcgaatgtactccgtcacctcgattagctctcactttgaaagtaacaggtcttggaacgactcgtgaagttgaattaccactcaccaatttcagatcaaccatcttttactatgtacaaaaattgcttcaattgtcctgtaatggcaatgtgaaatcagataaacttaggcgtatttgggagcccacatacacgtaagaaattttaacttaatgttttggtagataatgtcctagtgtagagccaagaagcattgcatttattttggattataggaacagaaaagattttgtttttattctgttggcttacaggaacagataatagtgtttgggactcttggtgtggaatgattaagttttagaagtagaaggacatttacagtctatactagcttcttacgtaattgttgaaaagagcgtcatttgaattctttgtctaagatcgtgtatgagtactaactatcttctttctgttcttgattttgggggtgtgtgggttaacacctgcctttctttgtacaaataatcataatagatttagggttgatt

SEQ ID NO: 451878 - DNA, 2120 bp, Homo sapiens
tttgtgtagatacttacaaggagattacgatttcggttggaacgtgcacctggtgaaactgcattgattgacaggactggcagaatgttgaagatggaacctttggctacagttgaatctctggaacagtaccttttgaaaatggtagcaaaacagtggtatgattttgaccgatcttcatttgtttttgttcgaaaattaagagaaggacaaaattttatatttcggcaccagcatgattttgatgaaaatggaatcatttactggattggaacaaatgcaaaaactgcttatgaatgggtaaatccagctgcctatggacttgtagtagtaacgtcatcagaaggaagaaatctaccttatggccgcttagaagacatactaagtcgtgataattcagctttaaattgtcatagcaatgatgataagaatgcctggtttgccatagatctgggtctctgggtgataccatcagcatatacacttcgtcatgctcgtggttatggaaggtctgcactgagaaattgggttttccaggtatccaaagatggacagaactggacttctttgtatacccatgttgatgactgcagtctcaatgaaccagggtcaactgcaacttggcctcttgatccaccaaaggatgagaaacaagggtggagacatgtgagaattaaacagatggggaaaaatgccagtggacaaacacactacctctcattatctggattcgaactttatggcactgtaaatggagtatgtgaagatcagctagggaaagcagctaaagaagcagaagctaatcttagacggcagagacgtctagtacgttcccaggttctgaaatacatggttccaggagctcgtgttatcagaggcctggattggaaatggcgagatcaggatggcagcccacagggagaaggcactgtcacaggagaactacacaatggcacaacgcaatcatggagcagcttggtgaaaaacaactgtccagacaagacatctgctgctgcaggctcctcaagtagaaaaggaagcagcagttctgtgtgtagcgtggccagtagcagcgacatcagcttgggttcgaccaaaacggaacggagatcagaaattgtaatggaacacagtatagtttcaggagctgatgtccatgaaccaattgttgttctttcatctgctgaaaacgtccctcaaacagaagtagggtcatcttccagtgcaagcaccagcaccttaacagcggaaacgggaagtgaaaatgctgaaaggaagttaggccctgatagttctgttcgtactcctggggagtctagtgcaatatccatgggaattgtcagtgttagttctcctgatgttagttcagtatctgaattaactaataaagaagcagcttcacaacgacctcttagctcttcagcaagtaacagactgtcagtgagttctttgttggctgctggggcccctatgagctctagtgcaagtgtacctaacctgtcctcaagagaaacatctagcttggagagttttgtaaggagagtggcaaacatagcacggactaatgccacgaacaacatgaatctaagccgaagcagcagtgataacaacactaatactttggggaggaatgtgatgagcacagcaacttctcctcttatgggtgctcagagtttccctaatttgaccacacctggtactacatcaacagtgactatgtcaacatccagtgttactagcagcagcaatgtagctacagcaacaacagttttatcagttggtcaatctttaagtaacactttaaccaccagcctcacatcaacttccagtgagagtgacacaggtcaggaagcagaatattccttatatggtaagttgtaatttaaaatgaaagtatttagatactttcataatgatgcttttattatgttttctcctgatattttaaacttttgtttaaagagaattattctctcttcttataaatatgaaatcttcgggccaggcacagtagctcacacctgtaatcccagcactttgggaggccgaggcaggtggatcagttgaggtcaggagttcgagaccagcctgaccaacatggtaaaaccccatttctacta

SEQ ID NO: 451879 - DNA, 442 bp, Homo sapiens
aataaataaattcggggccgcgtcgacaatgaggaaggacacagactctgcccccactctgccctgggatctcctgtgctagcggccaatgacaaatccagtcattggccaccagccacctctgcagtggggaccacactagcagccctgactccacactcctcctggggacccaagaggcagtgttgctgtctgcgtgtccaccttggaatctggctgaactggctgggaggaccaagactgcggctggggtgggcagggaagggaagccgggggctgctgtgagggatcttggagcttccctgtagcccaccttccccttgcttcatgtttgtagaggaaccttgtgccggccaggcccagtttccttgtgtgatacactaatgtatttgctttttttggaaatagagaaaatcaataaattgctagtgtttctttgaac

SEQ ID NO: 451880 - DNA, 328 bp, Homo sapiens
ggggtggtgcagggcaggggtggtatatcctgtctgacggagggcgggcctcgccagtgccagagagggacgaaccagggtggaagcgccaggagcagctgcagggagccctcacgcggaccaagactgcggctggggtgggcagggaagggaagccgggggctgctgtgagggatcttggagcttccctgtagcccaccttccccttgcttcatgtttgtagaggaaccttgtgccggccaggcccagtttccttgtgtgatacactaatgtatttgctttttttggaaatagagaaaatcaataaattgctagtgtttctttgaac

SEQ ID NO: 451881 - DNA, 5382 bp, Homo sapiens
ggggtggtgcagggcaggggtggtatatcctgtctgacggagggcgggcctcgccagtgccagagagggacgaaccagggtggaagcgccaggagcagctgcagggagccctcacgcggacctcgcactctatggccgtagggagccgctgagagcgagaagagcacgctcctgcccgcccgctgcaccgcacctcgcctcgcctctctgctctcctaggccccggccgcgcgccacccgcctcccgccaccatgaaccactcgccgctcaagaccgccttggcgtacgaatgcttccaggaccaggacaactccacgttggctttgccgtcggaccaaaagatgaaaacaggcacgtctggcaggcagcgcgtgcaggagcaggtgatgatgaccgtcaagcggcagaagtccaagtcttcccagtcgtccaccctgagccactccaatcgaggttccatgtatgatggcttggctgacaattacaactatgggaccaccagcaggagcagctactactccaagttccaggcagggaatggctcatggggatatccgatctacaatggaaccctcaagcgggagcctgacaacaggcgcttcagctcctacagccagatggagaactggagccggcactacccccggggcagctgtaacaccaccggcgcaggcagcgacatctgcttcatgcagaaaatcaaggcgagccgcagtgagcccgacctctactgtgacccacggggcaccctgcgcaagggcacgctgggcagcaagggccagaagaccacccagaaccgctacagcttttacagcacctgcagtggtcagaaggccataaagaagtgccctgtgcgcccgccctcttgtgcctccaagcaggaccctgtgtatatcccgcccatctcctgcaacaaggacctgtcctttggccactctagggccagctccaagatctgcagtgaggacatcgagtgcagtgggctgaccatccccaaggctgtgcagtacctgagctcccaggatgagaagtaccaggccattggggcctattacatccagcatacctgcttccaggatgaatctgccaagcaacaggtctatcagctgggaggcatctgcaagctggtggacctcctccgcagccccaaccagaacgtccagcaggccgcggcaggggccctgcgcaacctggtgttcaggagcaccaccaacaagctggagacccggaggcagaatgggatccgcgaggcagtcagcctcctgaggagaaccgggaacgccgagatccagaagcagctgactgggctgctctggaacctgtcttccactgacgagctgaaggaggaactcattgccgacgccctgcctgttctggccgaccgcgtcatcattcccttctctggctggtgcgatggcaatagcaacatgtcccgggaagtggtggaccctgaggtcttcttcaatgccacaggctgcttgaggaacctgagctcggccgatgcaggccgccagaccatgcgtaactactcagggctcattgattccctcatggcctatgtccagaactgtgtagcggccagccgctgtgacgacaagtctgtggaaaactgcatgtgtgttctgcacaacctctcctaccgcctggacgccgaggtgcccacccgctaccgccagctggagtataacgcccgcaacgcctacaccgagaagtcctccactggctgcttcagcaacaagagcgacaagatgatgaacaacaactatgactgccccctgcctgaggaagagaccaaccccaagggcagcggctggttgtaccattcagatgccatccgcacctacctgaacctcatgggcaagagcaagaaagatgctaccctggaggcctgtgctggtgccctgcagaacctgacagccagcaaggggctgatgtccagtggcatgagccagttgattgggctgaaggaaaagggcctgccacaaattgcccgcctcctgcaatctggcaactctgatgtggtgcggtccggagcctccctcctgagcaacatgtcccgccaccctctgctgcacagagtgatggggaaccaggtgttcccggaggtgaccaggctcctcaccagccacactggcaataccagcaactccgaagacatcttgtcctcggcctgctacactgtgaggaacctgatggcctcgcagccacaactggccaagcagtacttctccagcagcatgctcaacaacatcatcaacctgtgccgaagcagtgcctcacccaaggccgcagaagctgcccggcttctcctgtctgacatgtggtccagcaaggaactgcagggtgtcctcagacagcaaggtttcgataggaacatgctgggaaccttagctggggccaacagcctcaggaacttcacctcccgattctaagaagagactgtccaagcaagttaggcttgcaggaagatatgacccagctgagaagccctcaggcctcgctggatggggttttctgtccatcctgtgcagtatttgggaaagttcacaagaaactgagaagaaacctaaaaactgtggatagtggaaagatttttagattttttttttccttggggaaactggcaggcaatgggggttagggaggttggggcggggggggctttcttgagttaaaggggcttatatgtgatgtcaatatttcttcctctgagaaatggtatatatatgtgtctaatgtaagtgtgtgcatgcatgtgcgcgtgcatgtgtgtgtgtgtgagtgtcttaaagcataaccacaaactgcaaaaagctaggtaagctattttgttgcagctcataaggtggtgaaaaggactctcctgtgtttcttactcataggcaaggacaacatgtgctttttggtgagctgctcataattcctgaaatgtgtggtgccagggcaagggggccatcactgcagtcaggccctcagaggagtcctgcaggcttcctaccagtggtctccaggggtgcaggagtaactggggctgggccagcctccccccttacaaggctgctttccaggaagggaggtctggtgtatctcatgggagaatctggggtgtctgtagtgtcacccctccagcagcgccacaaggactgaggttgggtaggtgtgaggttccagaggacagcaggacactctcgcatactttgccaaatgaggcctgctcagaggagtaggagctgaaagatggtgccttccaccctcttgggctgtgtgcccatcagagcaggctcagcctgcaaaggccctgcattcagaggtcttgtaatctacttgttgcaggagaaagaaggtaaaaaatgatttttttaagaaaagctattttattgcagctctttcccaagagctgttctgggaatggctggtcttcatattcccagtggagaggggaacaagtggggctgggcatatatctattccggcttctagtgggatggagttggggtatagaaattaaccaggaagatgtttccaccaagcctgctgtgagtcaattgagggagtgtttggggtcccaggagacttggacggggggagtttgggtagactaggaaaggaaagtgccatatcagggtaccggtaccggcaagctcacatctcagccaggggccatgccccacttcccctgaccccagctgtcttgtctccactctgtgaaacccacaggggatgtgataaacagggctattaggggtatcagccacgtcgagcccccagactctgtgcacttcagaccagcagcagcaggagggctcccgagggccttatgagaaaacctgtgtggacatcccttggtgtacactaagacagagcagagcccagcgctcccaagccttcctccttccagcttctacctccatgctagcattgctggtgttagagaggaattaacttcctggtctgtgcccttctctagaagaatataagatgctcctcctcctcaccccttctcagcctcctcccaagtcttcctcttctgcaccacccccgagtccaaacccacctcttgccccagcattcaggctggaaaacactgatgtggactcagtatgacaactgagatgggggaagccagacatgtgaggacgctgtcctccgagaggtgtccccggctgttagccagctgtgctgtggtgctgtgggtctgtcataccctcccttgcttctgttcacactgggaggcccactcctggctcacctctccctctcagggacccacgtgggagcctggatccctggactgtcctgggcataggtttcaggggcctcctttgttgtcatcagaacccagaggaattcttctcctaaaaaatacgtatggcataccaatctgtgcggggcagtgtcctaagcacttagactacatcagggaagaacacagaccacatccctgtcctcatgcggcttatgttttctggaggaaagtggagacacaagtccttggctttagggctcccccggctgggggctgtgcagtccggtcagggcgggaggggaaatgcaccgctgcatgtgaaccttaccagcccaggcggatgccccttccccttagcactaccctggcctcctgcatcccctcgcctcatgttcctcccaccttcaaagaatgaagagccccatgggcccagcccctgccctgggaaccaggcagccttccagacctcaggggctgaggcagactattagggcagggctgactttggtgacactgcccattccctctcaggccagctcaggtcacccgggcctctgacccaggcctgtcactttgagaggggcaaaactgagaggggcttttcctagagaaagagaacaaggagcttgccaggcttcatgtagccgacacacgtctcaggattttaagtccacattggcctcacactaccagggccaatgcccaaaataaggagttccaatttggggccaaatgaggaaggacacagactctgccctgggatctcctgtgctagcggccaatgacaaatccagtcattggccaccagccacctctgcagtggggaccacactagcagccctgactccacactcctcctggggacccaagaggcagtgttgctgtctgcgtgtccaccttggaatctggctgaactggctgggaggaccaagactgcggctggggtgggcagggaagggaagccgggggctgctgtgagggatcttggagcttccctgtagcccaccttccccttgcttcatgtttgtagaggaaccttgtgccggccaggcccagtttccttgtgtgatacactaatgtatttgctttttttggaaatagagaaaatcaataaattgctagtgtttctttgaac

SEQ ID NO: 451882 - DNA, 4604 bp, Homo sapiens
ggggtggtgcagggcaggggtggtatatcctgtctgacggagggcgggcctcgccagtgccagagagggacgaaccagggtggaagcgccaggagcagctgcagggagccctcacgcggacctcgcactctatggccgtagggagccgctgagagcgagaagagcacgctcctgcccgcccgctgcaccgcacctcgcctcgcctctctgctctcctaggccccggccgcgcgccacccgcctcccgccaccatgaaccactcgccgctcaagaccgccttggcgtacgaatgcttccaggaccaggacaactccacgttggctttgccgtcggaccaaaagatgaaaacaggcacgtctggcaggcagcgcgtgcaggagcaggtgatgatgaccgtcaagcggcagaagtccaagtcttcccagtcgtccaccctgagccactccaatcgaggttccatgtatgatggcttggctgacaattacaactatgggaccaccagcaggagcagctactactccaagttccaggcagggaatggctcatggggatatccgatctacaatggaaccctcaagcgggagcctgacaacaggcgcttcagctcctacagccagatggagaactggagccggcactacccccggggcagctgtaacaccaccggcgcaggcagcgacatctgcttcatgcagaaaatcaaggcgagccgcagtgagcccgacctctactgtgacccacggggcaccctgcgcaagggcacgctgggcagcaagggccagaagaccacccagaaccgctacagcttttacagcacctgcagtggtcagaaggccataaagaagtgccctgtgcgcccgccctcttgtgcctccaagcaggaccctgtgtatatcccgcccatctcctgcaacaaggacctgtcctttggccactctagggccagctccaagatctgcagtgaggacatcgagtgcagtgggctgaccatccccaaggctgtgcagtacctgagctcccaggatgagaagtaccaggccattggggcctattacatccagcatacctgcttccaggatgaatctgccaagcaacaggtctatcagctgggaggcatctgcaagctggtggacctcctccgcagccccaaccagaacgtccagcaggccgcggcaggggccctgcgcaacctggtgttcaggagcaccaccaacaagctggagacccggaggcagaatgggatccgcgaggcagtcagcctcctgaggagaaccgggaacgccgagatccagaagcagctgactgggctgctctggaacctgtcttccactgacgagctgaaggaggaactcattgccgacgccctgcctgttctggccgaccgcgtcatcattcccttctctggctggtgcgatggcaatagcaacatgtcccgggaagtggtggaccctgaggtcttcttcaatgccacaggctgcttgaggaacctgagctcggccgatgcaggccgccagaccatgcgtaactactcagggctcattgattccctcatggcctatgtccagaactgtgtagcggccagccgctgtgacgacaagtctgtggaaaactgcatgtgtgttctgcacaacctctcctaccgcctggacgccgaggtgcccacccgctaccgccagctggagtataacgcccgcaacgcctacaccgagaagtcctccactggctgcttcagcaacaagagcgacaagatgatgaacaacaactatgactgccccctgcctgaggaagagaccaaccccaagggcagcggctggttgtaccattcagatgccatccgcacctacctgaacctcatgggcaagagcaagaaagatgctaccctggaggcctgtgctggtgccctgcagaacctgacagccagcaaggggctgatgtccagtggcatgagccagttgattgggctgaaggaaaagggcctgccacaaattgcccgcctcctgcaatctggcaactctgatgtggtgcggtccggagcctccctcctgagcaacatgtcccgccaccctctgctgcacagagtgatggggaaccaggtgttcccggaggtgaccaggctcctcaccagccacactggcaataccagcaactccgaagacatcttgtcctcggcctgctacactgtgaggaacctgatggcctcgcagccacaactggccaagcagtacttctccagcagcatgctcaacaacatcatcaacctgtgccgaagcagtgcctcacccaaggccgcagaagctgcccggcttctcctgtctgacatgtggtccagcaaggaactgcagggtgtcctcagacagcaaggtttcgataggaacatgctgggaaccttagctggggccaacagcctcaggaacttcacctcccgattctaagaagagactgtccaagcaagttaggcttgcaggaagatatgacccagctgagaagccctcaggcctcgctggatggggttttctgtccatcctgtgcagtatttgggaaagttcacaagaaactgagaagaaacctaaaaactgtggatagtggaaagatttttagattttttttttccttggggaaactggcaggcaatgggggttagggaggttggggcggggggggctttcttgagttaaaggggcttatatgtgatgtcaatatttcttcctctgagaaatggtatatatatgtgtctaatgtaagtgtgtgcatgcatgtgcgcgtgcatgtgtgtgtgtgtgagtgtcttaaagcataaccacaaactgcaaaaagctaggtaagctattttgttgcagctcataaggtggtgaaaaggactctcctgtgtttcttactcataggcaaggacaacatgtgctttttggtgagctgctcataattcctgaaatgtgtggtgccagggcaagggggccatcactgcagtcaggccctcagaggagtcctgcaggcttcctaccagtggtctccaggggtgcaggagtaactggggctgggccagcctccccccttacaaggctgctttccaggaagggaggtctggtgtatctcatgggagaatctggggtgtctgtagtgtcacccctccagcagcgccacaaggactgaggttgggtaggtgtgaggttccagaggacagcaggacactctcgcatactttgccaaatgaggcctgctcagaggagtaggagctgaaagatggtgccttccaccctcttgggctgtgtgcccatcagagcaggctcagcctgcaaaggccctgcattcagaggtcttgtaatctacttgttgcaggagaaagaaggtaaaaaatgatttttttaagaaaagctattttattgcagctctttcccaagagctgttctgggaatggctggtcttcatattcccagtggagaggggaacaagtggggctgggcatatatctattccggcttctagtgggatggagttggggtatagaaattaaccaggaagatgtttccaccaagcctgctgtgagtcaattgagggagtgtttggggtcccaggagacttggacggggggagtttgggtagactaggaaaggaaagtgccatatcagggtaccggtaccggcaagctcacatctcagccaggggccatgccccacttcccctgaccccagctgtcttgtctccactctgtgaaacccacaggggatgtgataaacagggctattaggggtatcagccacgtcgagcccccagactctgtgcacttcagaccagcagcagcaggagggctcccgagggccttatgagaaaacctgtcctggcctcctgcatcccctcgcctcatgttcctcccaccttcaaagaatgaagagccccatgggcccagcccctgccctgggaaccaggcagccttccagacctcaggggctgaggcagactattagggcagggctgactttggtgacactgcccattccctctcaggccagctcaggtcacccgggcctctgacccaggcctgtcactttgagaggggcaaaactgagaggggcttttcctagagaaagagaacaaggagcttgccaggcttcatgtagccgacacacgtctcaggattttaagtccacattggcctcacactaccagggccaatgcccaaaataaggagttccaatttggggccaaatgaggaaggacacagactctgccctgggatctcctgtgctagcggccaatgacaaatccagtcattggccaccagccacctctgcagtggggaccacactagcagccctgactccacactcctcctggggacccaagaggcagtgttgctgtctgcgtgtccaccttggaatctggctgaactggctgggaggaccaagactgcggctggggtgggcagggaagggaagccgggggctgctgtgagggatcttggagcttccctgtagcccaccttccccttgcttcatgtttgtagaggaaccttgtgccggccaggcccagtttccttgtgtgatacactaatgtatttgctttttttggaaatagagaaaatcaataaattgctagtgtttctttgaac

SEQ ID NO: 451883 - DNA, 3576 bp, Homo sapiens
  misc_feature (3556)..(3556): n is a, c, g, or t
ggggtggtgcagggcaggggtggtatatcctgtctgacggagggcgggcctcgccagtgccagagagggacgaaccagggtggaagcgccaggagcagctgcagggagccctcacgcggacctcgcactctatggccgtagggagccgctgagagcgagaagagcacgctcctgcccgcccgctgcaccgcacctcgcctcgcctctctgctctcctaggccccggccgcgcgccacccgcctcccgccaccatgaaccactcgccgctcaagaccgccttggcgtacgaatgcttccaggaccaggacaactccacgttggctttgccgtcggaccaaaagatgaaaacaggcacgtctggcaggcagcgcgtgcaggagcaggtgatgatgaccgtcaagcggcagaagtccaagtcttcccagtcgtccaccctgagccactccaatcgaggttccatgtatgatggcttggctgacaattacaactatgggaccaccagcaggagcagctactactccaagttccaggcagggaatggctcatggggatatccgatctacaatggaaccctcaagcgggagcctgacaacaggcgcttcagctcctacagccagatggagaactggagccggcactacccccggggcagctgtaacaccaccggcgcaggcagcgacatctgcttcatgcagaaaatcaaggcgagccgcagtgagcccgacctctactgtgacccacggggcaccctgcgcaagggcacgctgggcagcaagggccagaagaccacccagaaccgctacagcttttacagcacctgcagtggtcagaaggccataaagaagtgccctgtgcgcccgccctcttgtgcctccaagcaggaccctgtgtatatcccgcccatctcctgcaacaaggacctgtcctttggccactctagggccagctccaagatctgcagtgaggacatcgagtgcagtgggctgaccatccccaaggctgtgcagtacctgagctcccaggatgagaagtaccaggccattggggcctattacatccagcatacctgcttccaggatgaatctgccaagcaacaggtctatcagctgggaggcatctgcaagctggtggacctcctccgcagccccaaccagaacgtccagcaggccgcggcaggggccctgcgcaacctggtgttcaggagcaccaccaacaagctggagacccggaggcagaatgggatccgcgaggcagtcagcctcctgaggagaaccgggaacgccgagatccagaagcagctgactgggctgctctggaacctgtcttccactgacgagctgaaggaggaactcattgccgacgccctgcctgttctggccgaccgcgtcatcattcccttctctggctggtgcgatggcaatagcaacatgtcccgggaagtggtggaccctgaggtcttcttcaatgccacaggctgcttgaggaacctgagctcggccgatgcaggccgccagaccatgcgtaactactcagggctcattgattccctcatggcctatgtccagaactgtgtagcggccagccgctgtgacgacaagtctgtggaaaactgcatgtgtgttctgcacaacctctcctaccgcctggacgccgaggtgcccacccgctaccgccagctggagtataacgcccgcaacgcctacaccgagaagtcctccactggctgcttcagcaacaagagcgacaagatgatgaacaacaactatgactgccccctgcctgaggaagagaccaaccccaagggcagcggctggttgtaccattcagatgccatccgcacctacctgaacctcatgggcaagagcaagaaagatgctaccctggaggcctgtgctggtgccctgcagaacctgacagccagcaaggggctgatgtccagtggcatgagccagttgattgggctgaaggaaaagggcctgccacaaattgcccgcctcctgcaatctggcaactctgatgtggtgcggtccggagcctccctcctgagcaacatgtcccgccaccctctgctgcacagagtgatggggaaccaggtgttcccggaggtgaccaggctcctcaccagccacactggcaataccagcaactccgaagacatcttgtcctcggcctgctacactgtgaggaacctgatggcctcgcagccacaactggccaagcagtacttctccagcagcatgctcaacaacatcatcaacctgtgccgaagcagtgcctcacccaaggccgcagaagctgcccggcttctcctgtctgacatgtggtccagcaaggaactgcagggtgtcctcagacagcaaggtttcgataggaacatgctgggaaccttagctggggccaacagcctcaggaacttcacctcccgattctaagaagagactgtccaagcaagttaggcttgcaggaagatatgacccagctgagaagccctcaggcctcgctggatggggttttctgtccatcctgtgcagtatttgggaaagttcacaagaaactgagaagaaacctaaaaactgtggatagtggaaagatttttagattttttttttccttggggaaactggcaggcaatgggggttagggaggttggggcggggggggctttcttgagttaaaggggcttatatgtgatgtcaatatttcttcctctgagaaatggtatatatatgtgtctaatgtaagtgtgtgcatgcatgtgcgcgtgcatgtgtgtgtgtgtgagtgtcttaaagcataaccacaaactgcaaaaagctaggtaagctattttgttgcagctcataaggtggtgaaaaggactctcctgtgtttcttactcataggcaaggacaacatgtgctttttggtgagctgctcataattcctgaaatgtgtggtgccagggcaagggggccatcactgcagtcaggccctcagaggagtcctgcaggcttcctaccagtggtctccaggggtgcaggagtaactggggctgggccagcctccccccttacaaggctgctttccaggaagggaggtctggtgtatctcatgggagaatctggggtgtctgtagtgtcacccctccagcagcgccacaaggactgaggttgggtaggtgtgaggttccagaggacagcaggacactctcgcatactttgccaaatgaggcctgctcagaggagtaggagctgaaagatggtgccttccaccctcttgggctgtgtgcccatcagagcaggctcagcctgcaaaggccctgcattcagaggtcttgtaatctacttgttgcaggagaaagaaggtaaaaaatgatttttttaagaaaagctattttattgcagctctttcccaagagctgttctgggaatggctggtcttcatattcccagtggagaggggaacaagtggggctgggcatatatctattccggcttctagtgggatggagttggggtatagaaattaaccaggaagatgtttccaccaagcctgctgtgagtccttgtgggcatnacggtaccgagctcgatata

SEQ ID NO: 451884 - DNA, 3178 bp, Homo sapiens
ctgaggccagtctttcgccctgacacatgtacttagtgataagagagaggctgtgtgagccgaggttgctctgggagggcagtggacagtgtctgaccccacagcaagccccacacagttttgtgtcatttggttgctgtttctccctttgcagcaaggtttcgataggaacatgctgggaaccttagctggggccaacagcctcaggaacttcacctcccgattctaagaagagactgtccaagcaagttaggcttgcaggaagatatgacccagctgagaagccctcaggcctcgctggatggggttttctgtccatcctgtgcagtatttgggaaagttcacaagaaactgagaagaaacctaaaaactgtggatagtggaaagatttttagattttttttttccttggggaaactggcaggcaatgggggttagggaggttggggcggggggggctttcttgagttaaaggggcttatatgtgatgtcaatatttcttcctctgagaaatggtatatatatgtgtctaatgtaagtgtgtgcatgcatgtgcgcgtgcatgtgtgtgtgtgtgagtgtcttaaagcataaccacaaactgcaaaaagctaggtaagctattttgttgcagctcataaggtggtgaaaaggactctcctgtgtttcttactcataggcaaggacaacatgtgctttttggtgagctgctcataattcctgaaatgtgtggtgccagggcaagggggccatcactgcagtcaggccctcagaggagtcctgcaggcttcctaccagtggtctccaggggtgcaggagtaactggggctgggccagcctccccccttacaaggctgctttccaggaagggaggtctggtgtatctcatgggagaatctggggtgtctgtagtgtcacccctccagcagcgccacaaggactgaggttgggtaggtgtgaggttccagaggacagcaggacactctcgcatactttgccaaatgaggcctgctcagaggagtaggagctgaaagatggtgccttccaccctcttgggctgtgtgcccatcagagcaggctcagcctgcaaaggccctgcattcagaggtcttgtaatctacttgttgcaggagaaagaaggtaaaaaatgatttttttaagaaaagctattttattgcagctctttcccaagagctgttctgggaatggctggtcttcatattcccagtggagaggggaacaagtggggctgggcatatatctattccggcttctagtgggatggagttggggtatagaaattaaccaggaagatgtttccaccaagcctgctgtgagtcaattgagggagtgtttggggtcccaggagacttggacggggggagtttgggtagactaggaaaggaaagtgccatatcagggtaccggtaccggcaagctcacatctcagccaggggccatgccccacttcccctgaccccagctgtcttgtctccactctgtgaaacccacaggggatgtgataaacagggctattaggggtatcagccacgtcgagcccccagactctgtgcacttcagaccagcagcagcaggagggctcccgagggccttatgagaaaacctgtgtggacatcccttggtgtacactaagacagagcagagcccagcgctcccaagccttcctccttccagcttctacctccatgctagcattgctggtgttagagaggaattaacttcctggtctgtgcccttctctagaagaatataagatgctcctcctcctcaccccttctcagcctcctcccaagtcttcctcttctgcaccacccccgagtccaaacccacctcttgccccagcattcaggctggaaaacactgatgtggactcagtatgacaactgagatgggggaagccagacatgtgaggacgctgtcctccgagaggtgtccccggctgttagccagctgtgctgtggtgctgtgggtctgtcataccctcccttgcttctgttcacactgggaggcccactcctggctcacctctccctctcagggacccacgtgggagcctggatccctggactgtcctgggcataggtttcaggggcctcctttgttgtcatcagaacccagaggaattcttctcctaaaaaatacgtatggcataccaatctgtgcggggcagtgtcctaagcacttagactacatcagggaagaacacagaccacatccctgtcctcatgcggcttatgttttctggaggaaagtggagacacaagtccttggctttagggctcccccggctgggggctgtgcagtccggtcagggcgggaggggaaatgcaccgctgcatgtgaaccttaccagcccaggcggatgccccttccccttagcactaccctggcctcctgcatcccctcgcctcatgttcctcccaccttcaaagaatgaagagccccatgggcccagcccctgccctgggaaccaggcagccttccagacctcaggggctgaggcagactattagggcagggctgactttggtgacactgcccattccctctcaggccagctcaggtcacccgggcctctgacccaggcctgtcactttgagaggggcaaaactgagaggggcttttcctagagaaagagaacaaggagcttgccaggcttcatgtagccgacacacgtctcaggattttaagtccacattggcctcacactaccagggccaatgcccaaaataaggagttccaatttggggccaaatgaggaaggacacagactctgccctgggatctcctgtgctagcggccaatgacaaatccagtcattggccaccagccacctctgcagtggggaccacactagcagccctgactccacactcctcctggggacccaagaggcagtgttgctgtctgcgtgtccaccttggaatctggctgaactggctgggaggaccaagactgcggctggggtgggcagggaagggaagccgggggctgctgtgagggatcttggagcttccctgtagcccaccttccccttgcttcatgtttgtagaggaaccttgtgccggccaggcccagtttccttgtgtgatacactaatgtatttgctttttttggaaatagagaaaatcaataaattgctagtgtttctttgaac

SEQ ID NO: 451885 - DNA, 825 bp, Homo sapiens
aagtgggtgatctagcaggagcttttttgcggtgcctttccccttagcactatcctggcctcctgcatcccctcgcctcatgttcctcccaccttcaaagaatgaagagccccatgggcccagcccctgccctgggaaccaggcagccttccagacctcaggggctgaggcagactattagggcagggctgactttggtgacactgcccattccctctcaggccagctcaggtcacccgggcctctgacccaggcctgtcactttgagaggggcaaaactgagaggggcttttcctagagaaagagaacaaggagcttgccaggcttcatgtagccgacacacgtctcaggattttaagtccacattggcctcacactaccagggccaatgcccaaaataaggagttccaatttggggccaaatgaggaaggacacagactctgccctgggatctcctgtgctagcggccaatgacaaatccagtcattggccaccagccacctctgcagtggggaccacactagcagccctgactccacactcctcctggggacccaagaggcagtgttgctgtctgcgtgtccaccttggaatctggctgaactggctgggaggaccaagactgcggctggggtgggcagggaagggaagccgggggctgctgtgagggatcttggagcttccctgtagcccaccttccccttgcttcatgtttgtagaggaaccttgtgccggccaggcccagtttccttgtgtgatacactaatgtatttgctttttttggaaatagagaaaatcaataaattgctagtgtttctttgaac

SEQ ID NO: 451886 - DNA, 5599 bp, Homo sapiens
ggggtggtgcagggcaggggtggtatatcctgtctgacggagggcgggcctcgccagtgccagagagggacgaaccagggtggaagcgccaggagcagctgcagggagccctcacgcggacctcgcactctatggccgtagggagccgctgagagcgagaagagcacgctcctgcccgcccgctgcaccgcacctcgcctcgcctctctgctctcctaggccccggccgcgcgccacccgcctcccgccaccatgaaccactcgccgctcaagaccgccttggcgtacgaatgcttccaggaccaggacaactccacgttggctttgccgtcggaccaaaagatgaaaacaggcacgtctggcaggcagcgcgtgcaggagcaggtgatgatgaccgtcaagcggcagaagtccaagtcttcccagtcgtccaccctgagccactccaatcgaggttccatgtatgatggcttggctgacaattacaactatgggaccaccagcaggagcagctactactccaagttccaggcagggaatggctcatggggatatccgatctacaatggaaccctcaagcgggagcctgacaacaggcgcttcagctcctacagccagatggagaactggagccggcactacccccggggcagctgtaacaccaccggcgcaggcagcgacatctgcttcatgcagaaaatcaaggcgagccgcagtgagcccgacctctactgtgacccacggggcaccctgcgcaagggcacgctgggcagcaagggccagaagaccacccagaaccgctacagcttttacagcacctgcagtggtcagaaggccataaagaagtgccctgtgcgcccgccctcttgtgcctccaagcaggaccctgtgtatatcccgcccatctcctgcaacaaggacctgtcctttggccactctagggccagctccaagatctgcagtgaggacatcgagtgcagtgggctgaccatccccaaggctgtgcagtacctgagctcccaggatgagaagtaccaggccattggggcctattacatccagcatacctgcttccaggatgaatctgccaagcaacaggtctatcagctgggaggcatctgcaagctggtggacctcctccgcagccccaaccagaacgtccagcaggccgcggcaggggccctgcgcaacctggtgttcaggagcaccaccaacaagctggagacccggaggcagaatgggatccgcgaggcagtcagcctcctgaggagaaccgggaacgccgagatccagaagcagctgactgggctgctctggaacctgtcttccactgacgagctgaaggaggaactcattgccgacgccctgcctgttctggccgaccgcgtcatcattcccttctctggctggtgcgatggcaatagcaacatgtcccgggaagtggtggaccctgaggtcttcttcaatgccacaggctgcttgaggaacctgagctcggccgatgcaggccgccagaccatgcgtaactactcagggctcattgattccctcatggcctatgtccagaactgtgtagcggccagccgctgtgacgacaagtctgtggaaaactgcatgtgtgttctgcacaacctctcctaccgcctggacgccgaggtgcccacccgctaccgccagctggagtataacgcccgcaacgcctacaccgagaagtcctccactggctgcttcagcaacaagagcgacaagatgatgaacaacaactatgactgccccctgcctgaggaagagaccaaccccaagggcagcggctggttgtaccattcagatgccatccgcacctacctgaacctcatgggcaagagcaagaaagatgctaccctggaggcctgtgctggtgccctgcagaacctgacagccagcaaggggctgatgtccagtggcatgagccagttgattgggctgaaggaaaagggcctgccacaaattgcccgcctcctgcaatctggcaactctgatgtggtgcggtccggagcctccctcctgagcaacatgtcccgccaccctctgctgcacagagtgatggggaaccaggtgttcccggaggtgaccaggctcctcaccagccacactggcaataccagcaactccgaagacatcttgtcctcggcctgctacactgtgaggaacctgatggcctcgcagccacaactggccaagcagtacttctccagcagcatgctcaacaacatcatcaacctgtgccgaagcagtgcctcacccaaggccgcagaagctgcccggcttctcctgtctgacatgtggtccagcaaggaactgcagggtgtcctcagacagcaaggtttcgataggaacatgctgggaaccttagctggggccaacagcctcaggaacttcacctcccgattctaagaagagactgtccaagcaagttaggcttgcaggaagatatgacccagctgagaagccctcaggcctcgctggatggggttttctgtccatcctgtgcagtatttgggaaagttcacaagaaactgagaagaaacctaaaaactgtggatagtggaaagatttttagattttttttttccttggggaaactggcaggcaatgggggttagggaggttggggcggggggggctttcttgagttaaaggggcttatatgtgatgtcaatatttcttcctctgagaaatggtatatatatgtgtctaatgtaagtgtgtgcatgcatgtgcgcgtgcatgtgtgtgtgtgtgagtgtcttaaagcataaccacaaactgcaaaaagctaggtaagctattttgttgcagctcataaggtggtgaaaaggactctcctgtgtttcttactcataggcaaggacaacatgtgctttttggtgagctgctcataattcctgaaatgtgtggtgccagggcaagggggccatcactgcagtcaggccctcagaggagtcctgcaggcttcctaccagtggtctccaggggtgcaggagtaactggggctgggccagcctccccccttacaaggctgctttccaggaagggaggtctggtgtatctcatgggagaatctggggtgtctgtagtgtcacccctccagcagcgccacaaggactgaggttgggtaggtgtgaggttccagaggacagcaggacactctcgcatactttgccaaatgaggcctgctcagaggagtaggagctgaaagatggtgccttccaccctcttgggctgtgtgcccatcagagcaggctcagcctgcaaaggccctgcattcagaggtcttgtaatctacttgttgcaggagaaagaaggtaaaaaatgatttttttaagaaaagctattttattgcagctctttcccaagagctgttctgggaatggctggtcttcatattcccagtggagaggggaacaagtggggctgggcatatatctattccggcttctagtgggatggagttggggtatagaaattaaccaggaagatgtttccaccaagcctgctgtgagtcaattgagggagtgtttggggtcccaggagacttggacggggggagtttgggtagactaggaaaggaaagtgccatatcagggtaccggtaccggcaagctcacatctcagccaggggccatgccccacttcccctgaccccagctgtcttgtctccactctgtgaaacccacaggggatgtgataaacagggctattaggggtatcagccacgtcgagcccccagactctgtgcacttcagaccagcagcagcaggagggctcccgagggccttatgagaaaacctgtgtggacatcccttggtgtacactaagacagagcagagcccagcgctcccaagccttcctccttccagcttctacctccatgctagcattgctggtgttagagaggaattaacttcctggtctgtgcccttctctagaagaatataagatgctcctcctcctcaccccttctcagcctcctcccaagtcttcctcttctgcaccacccccgagtccaaacccacctcttgccccagcattcaggctggaaaacactgatgtggactcagtatgacaactgagatgggggaagccagacatgtgaggacgctgtcctccgagaggtgtccccggctgttagccagctgtgctgtggtgctgtgggtctgtcataccctcccttgcttctgttcacactgggaggcccactcctggctcacctctccctctcagggacccacgtgggagcctggatccctggactgtcctgggcataggtttcaggggcctcctttgttgtcatcagaacccagaggaattcttctcctaaaaaatacgtatggcataccaatctgtgcggggcagtgtcctaagcacttagactacatcagggaagaacacagaccacatccctgtcctcatgcggcttatgttttctggaggaaagtggagacacaagtccttggctttagggctcccccggctgggggctgtgcagtccggtcagggcgggaggggaaatgcaccgctgcatgtgaaccttaccagcccaggcggatgccccttccccttagcactaccctggcctcctgcatcccctcgcctcatgttcctcccaccttcaaagaatgaagagccccatgggcccagcccctgccctgggaaccaggcagccttccagacctcaggggctgaggcagactattagggcagggctgactttggtgacactgcccattccctctcaggccagctcaggtcacccgggcctctgacccaggcctgtcactttgagaggggcaaaactgagaggggcttttcctagagaaagagaacaaggagcttgccaggcttcatgtagccgacacacgtctcaggattttaagtccacattggcctcacactaccagggccaatgcccaaaataaggagttccaatttggggccaaatgaggaaggacacagactctgccctgggatctcctgtgctagcggccaatgacaaatccagtcattggccaccagccacctctgcagtggggaccacactagcagccctgactccacactcctcctggggacccaagaggcagtgttgctgtctgcgtgtccaccttggaatctggctgaactggctgggaggaccaagactgcggctggggtgggcagggaagggaagccgggggctgctgtgagggatcttggagcttccctgtagcccaccttccccttgcttcatgtttgtagaggaaccttgtgccggccaggcccagtttccttgtgtgatacactaatgtatttgctttttttggaaatagagaaaatcaataaattgctagtgtttctttgaacaacacacaacataccaaaaacaataaataaaaaaacaagttgttgctgggccgaactagggccctaggaagaaagtttttgtaaaaccaattctggtttggaggccgaggggcccccaatctagtatacgtggaaccgttggccacaaagggggtcccctagggaaaaccgggggaccaagaatagggtgtgggattctcccagaataaaaagcccg

SEQ ID NO: 451887 - DNA, 3527 bp, Homo sapiens
gcggccgcctactactactaaattcgcggccgcgtcgacctggtgccctgcagaacctgacagccagcaaggggctgatgtccagtggcatgagccagttgattgggctgaaggaaaagggcctgccacaaattgcccgcctcctgcaatctggcaactctgatgtggtgcggtccggagcctccctcctgagcaacatgtcccgccaccctctgctgcacagagtgatggggaaccaggtgttcccggaggtgaccaggctcctcaccagccacactggcaataccagcaactccgaagacatcttgtcctcggcctgctacactgtgaggaacctgatggcctcgcagccacaactggccaagcagtacttctccagcagcatgctcaacaacatcatcaacctgtgccgaagcagtgcctcacccaaggccgcagaagctgcccggcttctcctgtctgacatgtggtccagcaaggaactgcagggtgtcctcagacagcaaggtttcgataggaacatgctgggaaccttagctggggccaacagcctcaggaacttcacctcccgattctaagaagagactgtccaagcaagttaggcttgcaggaagatatgacccagctgagaagccctcaggcctcgctggatggggttttctgtccatcctgtgcagtatttgggaaagttcacaagaaactgagaagaaacctaaaaactgtggatagtggaaagatttttagattttttttttccttggggaaactggcaggcaatgggggttagggaggttggggcggggggggctttcttgagttaaaggggcttatatgtgatgtcaatatttcttcctctgagaaatggtatatatatgtgtctaatgtaagtgtgtgcatgcatgtgcgcgtgcatgtgtgtgtgtgtgagtgtcttaaagcataaccacaaactgcaaaaagctaggtaagctattttgttgcagctcataaggtggtgaaaaggactctcctgtgtttcttactcataggcaaggacaacatgtgctttttggtgagctgctcataattcctgaaatgtgtggtgccagggcaagggggccatcactgcagtcaggccctcagaggagtcctgcaggcttcctaccagtggtctccaggggtgcaggagtaactggggctgggccagcctccccccttacaaggctgctttccaggaagggaggtctggtgtatctcatgggagaatctggggtgtctgtagtgtcacccctccagcagcgccacaaggactgaggttgggtaggtgtgaggttccagaggacagcaggacactctcgcatactttgccaaatgaggcctgctcagaggagtaggagctgaaagatggtgccttccaccctcttgggctgtgtgcccatcagagcaggctcagcctgcaaaggccctgcattcagaggtcttgtaatctacttgttgcaggagaaagaaggtaaaaaatgatttttttaagaaaagctattttattgcagctctttcccaagagctgttctgggaatggctggtcttcatattcccagtggagaggggaacaagtggggctgggcatatatctattccggcttctagtgggatggagttggggtatagaaattaaccaggaagatgtttccaccaagcctgctgtgagtcaattgagggagtgtttggggtcccaggagacttggacggggggagtttgggtagactaggaaaggaaagtgccatatcagggtaccggtaccggcaagctcacatctcagccaggggccatgccccacttcccctgaccccagctgtcttgtctccactctgtgaaacccacaggggatgtgataaacagggctattaggggtatcagccacgtcgagcccccagactctgtgcacttcagaccagcagcagcaggagggctcccgagggccttatgagaaaacctgtgtggacatcccttggtgtacactaagacagagcagagcccagcgctcccaagccttcctccttccagcttctacctccatgctagcattgctggtgttagagaggaattaacttcctggtctgtgcccttctctagaagaatataagatgctcctcctcctcaccccttctcagcctcctcccaagtcttcctcttctgcaccacccccgagtccaaacccacctcttgccccagcattcaggctggaaaacactgatgtggactcagtatgacaactgagatgggggaagccagacatgtgaggacgctgtcctccgagaggtgtccccggctgttagccagctgtgctgtggtgctgtgggtctgtcataccctcccttgcttctgttcacactgggaggcccactcctggctcacctctccctctcagggacccacgtgggagcctggatccctggactgtcctgggcataggtttcaggggcctcctttgttgtcatcagaacccagaggaattcttctcctaaaaaatacgtatggcataccaatctgtgcggggcagtgtcctaagcacttagactacatcagggaagaacacagaccacatccctgtcctcatgcggcttatgttttctggaggaaagtggagacacaagtccttggctttagggctcccccggctgggggctgtgcagtccggtcagggcgggaggggaaatgcaccgctgcatgtgaaccttaccagcccaggcggatgccccttccccttagcactaccctggcctcctgcatcccctcgcctcatgttcctcccaccttcaaagaatgaagagccccatgggcccagcccctgccctgggaaccaggcagccttccagacctcaggggctgaggcagactattagggcagggctgactttggtgacactgcccattccctctcaggccagctcaggtcacccgggcctctgacccaggcctgtcactttgagaggggcaaaactgagaggggcttttcctagagaaagagaacaaggagcttgccaggcttcatgtagccgacacacgtctcaggattttaagtccacattggcctcacactaccagggccaatgcccaaaataaggagttccaatttggggccaaatgaggaaggacacagactctgccctgggatctcctgtgctagcggccaatgacaaatccagtcattggccaccagccacctctgcagtggggaccacactagcagccctgactccacactcctcctggggacccaagaggcagtgttgctgtctgcgtgtccaccttggaatctggctgaactggctgggaggaccaagactgcggctggggtgggcagggaagggaagccgggggctgctgtgagggatcttggagcttccctgtagcccaccttccccttgcttcatgtttgtagaggaaccttgtgccggccaggcccagtttccttgtgtgatacactaatgtatttgctttttttggaaatagagaaaatcaataaattgctagtgtttctttgaac

SEQ ID NO: 451888 - DNA, 867 bp, Homo sapiens
  misc_feature (780)..(780): n is a, c, g, or t
gtcctactttctctctcaaactggctttttctcattcctttgactccgccagacttcctcgcccccatgacctggtgttgtgtctgatcaccccaacattcctggctgcccaatgtggggcaatgaagaccccagtgaaggaatgctagagtgtgtgaaagtggaggacgcatcgtcaaaggacacctgaggacgtctcaaagaagctcggcgggagagctgagcgctcggaagaaccaagaatcatctcttttgaaaaatcgattcatcaaatgaatcttcagccaacaactgttcaagaaggattcaaatatcacaggttccgagaagtaaagctttggaggtcacaaaattagcaatagaagctgggttccgccatatagattctgctcatttatacaataatgaggagcaggttggactggccatccgaagcaagattgcagatggcagtgtgaagagagaagacatattctacacttcaaagctttggtccacttttcatcgaccagagttggtccgaccagccttggaaaactcactgaaaaaagctcaattggactatgttgacctctatcttattcattctccaatgtctctaaagccaggtgaggaactttcaccaacagatgaaaatggaaaagtaatatttgacatagtggatctctgtaccacctgggaggccatggagaagtgtaaggatgcaggattggccaagtccattggggtgtcaaacttcaaccgcaggcagctggagatgatcctcaacaagccaggatncagttcagccggcttgcacaggtgaagttcggttaacgggggaatggggattgggggaaaaagtgggggaaggcggggcgaaaaggg

SEQ ID NO: 451889 - DNA, 615 bp, Homo sapiens
agcagctcaaggctcatggtcatcaccataagacaactcctctgggtctcccaacttctgctgaccctatgtgattcacagtcctgcccaaagactatcaatggatatcaaggtatttccaaatcaaagagaggtacttcaatagaggaaattataagggcggaataaagtgacataagtcaactgtgaaacttgattaagacctagaaaatggtccttttccatgcatataatatttgtaagagattagaggaagcctgtctcctgaatacattccttataccttcatatgtaaaacacttagcacatatcactttctggagcattgtaccacctgtctcatggaggattagtgtccttaaaggtacctggggttacagctatgagtggagaaattaatttgtgacatcattaaaatgactgcttctatttcagccaggtgaggaactttcaccaacagatgaaaatggaaaagtaatatttgacatagtggatctctgtaccacctgggaggtgagtgcttggcggagaggacacagagaaggatgacaaaaagagaaaatctgtttcccaggttcaataggaaagaatggaatatgcaccattagatctaga

SEQ ID NO: 451890 - DNA, 1807 bp, Homo sapiens
ccctcatcaggattacagctttatcaggactgcatcttcttcagaaatgaatatttctcttacaacgcaaagaaagaaaaatcaaaataaattttctgattgaaaatgtaaaaaggcaaatatttttacagttttaactttaattttttattgaggaccaactatttgaaaaattctcattagtcattcctttaaattatgtgtatgtgagagaaagacgtaagatggttaattatttcaaatgatgcagtataaagaaggggcattatcacggcagaaacgaaaaaagatatttgtagctggaggtttttatagtctaacatatggttgctatttgttctacaaatccttttgaataatttaatatagagatttagaatagaaaataatactttagatagaaattaatgagtttattataaccatatattataataatttacttaggaattctctttgataagaaacaaatgaactgaatgcaattttctccacagaccatataagactgcctatgtacctcctcctacatgccattggttaaccatcagtcagtttgcaggggtggggggaggggtttcctggcccattgtttttgtaatctctgaggagaagcagcagcaaacatttgctagtcagacaagtgacagggaatggattccaaacagcagtgtgtaaagctaaatgatggccacttcatgcctgtattgggatttggcacctatgcacctccagaggttccgagaagtaaagctttggaggtcacaaaattagcaatagaagctgggttccgccatatagattctgctcatttatacaataatgaggagcaggttggactggccatccgaagcaagattgcagatggcagtgtgaagagagaagacatattctacacttcaaagctttggtccacttttcatcgaccagagttggtccgaccagccttggaaaactcactgaaaaaagctcaattggactatgttgacctctatcttattcattctccaatgtctctaaagccaggtgaggaactttcaccaacagatgaaaatggaaaagtaatatttgacatagtggatctctgtaccacctgggaggccatggagaagtgtaaggatgcaggattggccaagtccattggggtgtcaaacttcaaccgcaggcagctggagatgatcctcaacaagccaggactcaagtacaagcctgtctgcaaccaggtagaatgtcatccgtatttcaaccggagtaaattgctagatttctgcaagtcgaaagatattgttctggttgcctatagtgctctgggatctcaacgagacaaacgatgggtggacccgaactccccggtgctcttggaggacccagtcctttgtgccttggcaaaaaagcacaagcgaaccccagccctgattgccctgcgctaccagctgcagcgtggggttgtggtcctggccaagagctacaatgagcagcgcatcagacagaacgtgcaggtttttgagttccagttgactgcagaggacatgaaagccatagatggcctagacagaaatctccactattttaacagtgatagttttgctagccaccctaattatccatattcagatgaatattaacatggagagctttgcctgatgtctaccagaagccctgtgtgtggatggtgacgcagaggacgtctctatgccggtgactggacatatcacctctacttaaatccgtcctgtttagcgacttcagtcaactacagctgagtccataggccagaaagacaataaatttttatcattttgaaata

SEQ ID NO: 451891 - DNA, 1616 bp, Homo sapiens
ccctcatcaggattacagctttatcaggactgcatcttcttcagaaatgaatatttctcttacaacgcaaagaaagaaaaatcaaaataaattttctgattgaaaatgtaaaaaggcaaatatttttacagttttaactttaattttttattgaggaccaactatttgaaaaattctcattagtcattcctttaaattatgtgtatgtgagagaaagacgtaagatggttaattatttcaaatgatgcagtataaagaaggggcattatcacggcagaaacgaaaaaagatatttgtagctggaggtttttatagtctaacatatggttgctatttgttctacaaatccttttgaataatttaatatagagatttagaatagaaaataatactttagatagaaattaatgagtttattataaccatatattataataatttacttaggaattctctttgataagaaacaaatgaactgaatgcaattttctccacagaccatataagactgcctatgtacctcctcctacatgccattggttaaccatcagtcagtttgcaggggtggggggaggggtttcctggcccattgtttttgtaatctctgaggagaagcagcagcaaacatttgctagtcagacaagtgacagggaatggattccaaacagcagtgtgtaaagctaaatgatggccacttcatgcctgtattgggatttggcacctatgcacctccagaggttccgagaagtaaagctttggaggtcacaaaattagcaatagaagctgggttccgccatatagattctgctcatttatacaataatgaggagcaggttggactggccatccgaagcaagattgcagatggcagtgtgaagagagaagacatattctacacttcaaagctttggtccacttttcatcgaccagagttggtccgaccagccttggaaaactcactgaaaaaagctcaattggactatgttgacctctatcttattcattctccaatgtctctaaagccaggtgaggaactttcaccaacagatgaaaatggaaaagtaatatttgacatagtggatctctgtaccacctgggaggccatggagaagtgtaaggatgcaggattggccaagtccattggggtgtcaaacttcaaccgcaggcagctggagatgatcctcaacaagccaggactcaagtacaagcctgtctgcaaccaggtagaatgtcatccgtatttcaaccggagtaaattgctagatttctgcaagtcgaaagatattgttctggttgcctatagtgctctgggatctcaacgagacaaacgatgggtggacccgaactccccggtgctcttggaggacccagtcctttgtgccttggcaaaaaagcacaagcgaaccccagccctgattgccctgcgctaccagctgcagcgtggggttgtggtcctggccaaagtaaagagggggctcaaaaacggggttgggcacgtgagagtaaacaaggtgagaatccttagaattgggccaataaaaaaaaagagagcgttacacacgtggggggaaccaggacaacggcaccaacaaaaaagagcctggtggtccgcccgg

SEQ ID NO: 451892 - DNA, 1457 bp, Homo sapiens
gcttattgtgagtcaacattcaggacacagttgtttcttcagacagagttcactctatgaaaacactatgagcaagacttcctcgcccccatgacctggtgttgtgtctgatcaccccaacattcctggctgcccaatgtggggcaatgaagaccccagtgaaggaatgctagagtgtgtgaaagtggaggacgcatcgtcaaaggacacctgaggacgtctcaaagaagctcggcgggagagctgagcgctcggaagaaccaagttatttctaaacagaactaagatcagaattctttgaatcatcagaatcatctcttttgaaaaatcgattcatcaaatgaatcttcagccaacaactgttcaagaaggattcaaatatcacaggttccgagaagtaaagctttggaggtcacaaaattagcaatagaagctgggttccgccatatagattctgctcatttatacaataatgaggagcaggttggactggccatccgaagcaagattgcagatggcagtgtgaagagagaagacatattctacacttcaaagctttggtccacttttcatcgaccagagttggtccgaccagccttggaaaactcactgaaaaaagctcaattggactatgttgacctctatcttattcattctccaatgtctctaaagccaggtgaggaactttcaccaacagatgaaaatggaaaagtaatatttgacatagtggatctctgtaccacctgggaggccatggagaagtgtaaggatgcaggattggccaagtccattggggtgtcaaacttcaaccgcaggcagctggagatgatcctcaacaagccaggactcaagtacaagcctgtctgcaaccaggtagaatgtcatccgtatttcaaccggagtaaattgctagatttctgcaagtcgaaagatattgttctggttgcctatagtgctctgggatctcaacgagacaaacgatgggtggacccgaactccccggtgctcttggaggacccagtcctttgtgccttggcaaaaaagcacaagcgaaccccagccctgattgccctgcgctaccagctgcagcgtggggttgtggtcctggccaagagctacaatgagcagcgcatcagacagaacgtgcaggtttttgagttccagttgactgcagaggacatgaaagccatagatggcctagacagaaatctccactattttaacagtgatagttttgctagccaccctaattatccatattcagatgaatattaacatggagagctttgcctgatgtctaccagaagccctgtgtgtggatggtgacgcagaggacgtctctatgccggtgactggacatatcacctctacttaaatccgtcctgtttagcgacttcagtcaactacagctgagtccataggccagaaagacaataaatttttatcattttgaaata

SEQ ID NO: 451893 - DNA, 1389 bp, Homo sapiens
gtcctactttctctctcaaactggctttttctcattcctttgactccgccagacttcctcgcccccatgacctggtgttgtgtctgatcaccccaacattcctggctgcccaatgtggggcaatgaagaccccagtgaaggaatgctagagtgtgtgaaagtggaggacgcatcgtcaaaggacacctgaggacgtctcaaagaagctcggcgggagagctgagcgctcggaagaaccaagaatcatctcttttgaaaaatcgattcatcaaatgaatcttcagccaacaactgttcaagaaggattcaaatatcacaggttccgagaagtaaagctttggaggtcacaaaattagcaatagaagctgggttccgccatatagattctgctcatttatacaataatgaggagcaggttggactggccatccgaagcaagattgcagatggcagtgtgaagagagaagacatattctacacttcaaagctttggtccacttttcatcgaccagagttggtccgaccagccttggaaaactcactgaaaaaagctcaattggactatgttgacctctatcttattcattctccaatgtctctaaagccaggtgaggaactttcaccaacagatgaaaatggaaaagtaatatttgacatagtggatctctgtaccacctgggaggccatggagaagtgtaaggatgcaggattggccaagtccattggggtgtcaaacttcaaccgcaggcagctggagatgatcctcaacaagccaggactcaagtacaagcctgtctgcaaccaggtagaatgtcatccgtatttcaaccggagtaaattgctagatttctgcaagtcgaaagatattgttctggttgcctatagtgctctgggatctcaacgagacaaacgatgggtggacccgaactccccggtgctcttggaggacccagtcctttgtgccttggcaaaaaagcacaagcgaaccccagccctgattgccctgcgctaccagctgcagcgtggggttgtggtcctggccaagagctacaatgagcagcgcatcagacagaacgtgcaggtttttgagttccagttgactgcagaggacatgaaagccatagatggcctagacagaaatctccactattttaacagtgatagttttgctagccaccctaattatccatattcagatgaatattaacatggagagctttgcctgatgtctaccagaagccctgtgtgtggatggtgacgcagaggacgtctctatgccggtgactggacatatcacctctacttaaatccgtcctgtttagcgacttcagtcaactacagctgagtccataggccagaaagacaataaatttttatcattttgaaata

SEQ ID NO: 451894 - DNA, 1761 bp, Homo sapiens
ccctcatcaggattacagctttatcaggactgcatcttcttcagaaatgaatatttctcttacaacgcaaagaaagaaaaatcaaaataaattttctgattgaaaatgtaaaaaggcaaatatttttacagttttaactttaattttttattgaggaccaactatttgaaaaattctcattagtcattcctttaaattatgtgtatgtgagagaaagacgtaagatggttaattatttcaaatgatgcagtataaagaaggggcattatcacggcagaaacgaaaaaagatatttgtagctggaggtttttatagtctaacatatggttgctatttgttctacaaatccttttgaataatttaatatagagatttagaatagaaaataatactttagatagaaattaatgagtttattataaccatatattataataatttacttaggaattctctttgataagaaacaaatgaactgaatgcaattttctccacagaccatataagactgcctatgtacctcctcctacatgccattggttaaccatcagtcagtttgcaggggtggggggaggggtttcctggcccattgtttttgtaatctctgaggagaagcagcagcaaacatttgctagtcagacaagtgacagggaatggattccaaacagcagtgtgtaaagctaaatgatggccacttcatgcctgtattgggatttggcacctatgcacctccagaggttccgagaagtaaagctttggaggtcacaaaattagcaatagaagctgggttccgccatatagattctgctcatttatacaataatgaggagcaggttggactggccatccgaagcaagattgcagatggcagtgtgaagagagaagacatattctacacttcaaagctttggtccacttttcatcgaccagagttggtccgaccagccttggaaaactcactgaaaaaagctcaattggactatgttgacctctatcttattcattctccaatgtctctaaagccaggtgaggaactttcaccaacagatgaaaatggaaaagtaatatttgacatagtggatctctgtaccacctgggaggccatggagaagtgtaaggatgcaggattggccaagtccattggggtgtcaaacttcaaccgcaggcagctggagatgatcctcaacaagccaggactcaagtacaagcctgtctgcaaccaggtagaatgtcatccgtatttcaaccggagtaaattgctagatttctgcaagtcgaaagatattgttctggttgcctatagtgctctgggatctcaacgagacaaacgatgggtggacccgaactccccggtgctcttggaggacccagtcctttgtgccttggcaagcagcgtggggttgtggtcctggccaagagctacaatgagcagcgcatcagacagaacgtgcaggtttttgagttccagttgactgcagaggacatgaaagccatagatggcctagacagaaatctccactattttaacagtgatagttttgctagccaccctaattatccatattcagatgaatattaacatggagagctttgcctgatgtctaccagaagccctgtgtgtggatggtgacgcagaggacgtctctatgccggtgactggacatatcacctctacttaaatccgtcctgtttagcgacttcagtcaactacagctgagtccataggccagaaagacaataaatttttatcattttgaaata

SEQ ID NO: 451895 - DNA, 1141 bp, Homo sapiens
ccctcatcaggattacagctttatcaggactgcatcttcttcagaaatgaatatttctcttacaacgcaaagaaagaaaaatcaaaataaattttctgattgaaaatgtaaaaaggcaaatatttttacagttttaactttaattttttattgaggaccaactatttgaaaaattctcattagtcattcctttaaattatgtgtatgtgagagaaagacgtaagatggttaattatttcaaatgatgcagtataaagaaggggcattatcacggcagaaacgaaaaaagatatttgtagctggaggtttttatagtctaacatatggttgctatttgttctacaaatccttttgaataatttaatatagagatttagaatagaaaataatactttagatagaaattaatgagtttattataaccatatattataataatttacttaggaattctctttgataagaaacaaatgaactgaatgcaattttctccacagaccatataagactgcctatgtacctcctcctacatgccattggttaaccatcagtcagtttgcaggggtggggggaggggtttcctggcccattgtttttgtaatctctgaggagaagcagcagcaaacatttgctagtcagacaagtgacagggaatggattccaaacagcagtgtgtaaagctaaatgatggccacttcatgcctgtattgggatttggcacctatgcacctccagaggttccgagaagtaaagctttggaggtcacaaaattagcaatagaagctgggttccgccatatagattctgctcatttatacaataatgaggagcaggttggactggccatccgaagcaagattgcagatggcagtgtgaagagagaagacatattctacacttcaaagctttggtccacttttcatcgaccagagttggtccgaccagccttggaaaactcactgaaaaaagctcaattggactatgttgacctctatcttattcattctccaatgtctctaaagccggcggacaaaccctcaccaacatgactcgtgcaggtgcgactgttagaggatgcaccttatggcgagtctctgtagacaccgagtcgtgcttggtcacgtatgaactgatgcacagc

SEQ ID NO: 451896 - DNA, 753 bp, Homo sapiens
tgtaaaagaaaggaagagtagcgagcatgagtaattcttatcatccattaaaaatgtaataagttggtgtttatctgttcctttatatttcatgttatttctatataagaatttttaatgcactgtagctccttggatattagaccctatatcatatataacaatttacatttctgaatcttacaaaatatattgcatacagtagacagtagcaggtaataagtaaagtaacaaaagaaagtataatcagagtatctctgctctgctgacagatgtacaggaatatacttgaatatttgactttgtgtgttttacgtgttaacttccagataagggaatatgattgaataatttattattttgaaaatactgtattatgaagccatgttcataaaggtaagaaaggcagattctacaactagtcagacaacttaacattcatactaatgacagcttcattgaaatcactttactactcccctagtaatggagtcattgcatttatattatacattattctcttttcagttttgctagccaccctaattatccatattcagatgaatattaacatggagagctttgcctgatgtctaccagaagccctgtgtgtggatggtgacgcagaggacgtctctatgccggtgactggacatatcacctctacttaaatccgtcctgtttagcgacttcagtcaactacagctgagtccataggccagaaagacaataaatttttatcattttgaaata

SEQ ID NO: 451897 - DNA, 1691 bp, Homo sapiens
ccctcatcaggattacagctttatcaggactgcatcttcttcagaaatgaatatttctcttacaacgcaaagaaagaaaaatcaaaataaattttctgattgaaaatgtaaaaaggcaaatatttttacagttttaactttaattttttattgaggaccaactatttgaaaaattctcattagtcattcctttaaattatgtgtatgtgagagaaagacgtaagatggttaattatttcaaatgatgcagtataaagaaggggcattatcacggcagaaacgaaaaaagatatttgtagctggaggtttttatagtctaacatatggttgctatttgttctacaaatccttttgaataatttaatatagagatttagaatagaaaataatactttagatagaaattaatgagtttattataaccatatattataataatttacttaggaattctctttgataagaaacaaatgaactgaatgcaattttctccacagaccatataagactgcctatgtacctcctcctacatgccattggttaaccatcagtcagtttgcaggggtggggggaggggtttcctggcccattgtttttgtaatctctgaggagaagcagcagcaaacatttgctagtcagacaagtgacagggaatggattccaaacagcagtgtgtaaagctaaatgatggccacttcatgcctgtattgggatttggcacctatgcacctccagaggtaagaataattccttttagttttcggatttcaaaagaataaacctagtagaagtgaaacccgtattgggttgtaaggttcgtgttcctaccttactctggatgactcactggtctaggtttcctaggctaggagaaaaaagtaggcaatccttgttctgcattgaggtccattcctatggtcacgtactgcttatttttcgtttgtgcactgtttctttcttctgttcatgtctagttcccagcttggcagaatatgtaaaactcagtattgaagaacactgttggtcatctccctctggtggagattaattgcaataggagtgatttctctgtttctacaactgaagaaatctttccatcttccaagaacatacgatccagagaaatacttatagcaaaaattactggatatggtgtgcacaaaactgtcggcagagtatcactgttctgatgggcggcagtgagtgccacccagtattaccggacctggactagagtttccactgtactatttcacttttaaaaagaacttcctgaaagaaaaaaataccacctcattttaagtaaaatctagaacctaacaaaggaaagtctaaattcttagtccttttttgtatgcatcatatttgtatcaaagtggtaggagtggtcttctgacacaaaaatgaacaaaatggagacctcattttctagatagaacttgtattccaagactgtcctcaggctactaagtgtgtgaataggaactaattattgaaatttgagtctctcactttatcgataagttgtgatgatctacaaggatacattttctagaccagtgacaaaagtggtttaatttttaatataaattggcatgggcaggaaatgaaaataacgacacaactgaagctccagccttggtaaacctttgagtgttggcacacttaaagactgctctcaaaaaagattt

SEQ ID NO: 451898 - DNA, 515 bp, Homo sapiens
ttgttgctctcacagttctgtcttgcatttaccgtgatttgcagccaactgcacaaataattcctcacaacccctttctccacagggccatggagaagtgtaaggatgcaggattggccaagtccattggggtgtcaaacttcaaccgcaggcagctggagatgatcctcaacaagccaggactcaagtacaagcctgtctgcaaccaggtgagctcccttggccttctctcctttcggttcttcatgccccctcttcctgtcctattgccaaatatctgtttgttttgtcccagttatctttgtgaagtagaagattatctagagagcaaagcttctgtcaagaaaggcgtgaagatttcttgtttgtaccctgcttggaaaagtattagggaaaaattggaatgagtttaatgctgaatcgtgtgtaatatttaggggaggtccatttgatcagggaggcctggaatcatcaattagaactcaaggaaaggtggacttacctctaagctatga

SEQ ID NO: 451899 - DNA, 1408 bp, Homo sapiens
ccctcatcaggattacagctttatcaggactgcatcttcttcagaaatgaatatttctcttacaacgcaaagaaagaaaaatcaaaataaattttctgattgaaaatgtaaaaaggcaaatatttttacagttttaactttaattttttattgaggaccaactatttgaaaaattctcattagtcattcctttaaattatgtgtatgtgagagaaagacgtaagatggttaattatttcaaatgatgcagtataaagaaggggcattatcacggcagaaacgaaaaaagatatttgtagctggaggtttttatagtctaacatatggttgctatttgttctacaaatccttttgaataatttaatatagagatttagaatagaaaataatactttagatagaaattaatgagtttattataaccatatattataataatttacttaggaattctctttgataagaaacaaatgaactgaatgcaattttctccacagaccatataagactgcctatgtacctcctcctacatgccattggttaaccatcagtcagtttgcaggggtggggggaggggtttcctggcccattgtttttgtaatctctgaggagaagcagcagcaaacatttgctagtcagacaagtgacagggaatggattccaaacagcagtgtgtaaagctaaatgatggccacttcatgcctgtattgggatttggcacctatgcacctccagaggttccgagaagtaaagctttggaggtcacaaaattagcaatagaagctgggttccgccatatagattctgctcatttatacaataatgaggagcaggttggactggccatccgaagcaagattgcagatggcagtgtgaagagagaagacatattctacacttcaaagctttggtccacttttcatcgaccagagttggtccgaccagccttggaaaactcactgaaaaaagctcaattggactatgttgacctctatcttattcattctccaatgtctctaaagccaggtgaggaactttcaccaacagatgaaaatggaaaagtaatatttgacatagtggatctctgtaccacctgggaggccatggagaagtgtaaggatgcaggattggccaagtccattggggtgtcaaacttcaaccgcaggcagctggagatgatcctcaacaagccaggactcaagtacaagcctgtctgcaaccaggtagaatgtcatccgtatttcaaccggagtaaattgctagatttctgcaagtcgaaagatattgttctggttgcctatagtgctctgggatctcaacgagacaaacgatgggacccaacttcccggggccttttggaggacccatccttttggccctgggagcacaagggcccgcctggttgccc

SEQ ID NO: 451900 - DNA, 1841 bp, Homo sapiens
ccctcatcaggattacagctttatcaggactgcatcttcttcagaaatgaatatttctcttacaacgcaaagaaagaaaaatcaaaataaattttctgattgaaaatgtaaaaaggcaaatatttttacagttttaactttaattttttattgaggaccaactatttgaaaaattctcattagtcattcctttaaattatgtgtatgtgagagaaagacgtaagatggttaattatttcaaatgatgcagtataaagaaggggcattatcacggcagaaacgaaaaaagatatttgtagctggaggtttttatagtctaacatatggttgctatttgttctacaaatccttttgaataatttaatatagagatttagaatagaaaataatactttagatagaaattaatgagtttattataaccatatattataataatttacttaggaattctctttgataagaaacaaatgaactgaatgcaattttctccacagaccatataagactgcctatgtacctcctcctacatgccattggttaaccatcagtcagtttgcaggggtggggggaggggtttcctggcccattgtttttgtaatctctgaggagaagcagcagcaaacatttgctagtcagacaagtgacagggaatggattccaaacagcagtgtgtaaagctaaatgatggccacttcatgcctgtattgggatttggcacctatgcacctccagaggttccgagaagtaaagctttggaggtcacaaaattagcaatagaagctgggttccgccatatagattctgctcatttatacaataatgaggagcaggttggactggccatccgaagcaagattgcagatggcagtgtgaagagagaagacatattctacacttcaaagctttggtccacttttcatcgaccagagttggtccgaccagccttggaaaactcactgaaaaaagctcaattggactatgttgacctctatcttattcattctccaatgtctctaaagccaggtgaggaactttcaccaacagatgaaaatggaaaagtaatatttgacatagtggatctctgtaccacctgggaggccatggagaagtgtaaggatgcaggattggccaagtccattggggtgtcaaacttcaaccgcaggcagctggagatgatcctcaacaagccaggactcaagtacaagcctgtctgcaaccaggtagaatgtcatccgtatttcaaccggagtaaattgctagatttctgcaagtcgaaagatattgttctggttgcctatagtgctctgggatctcaacgagacaaacgatgggtggacccgaactccccggtgctcttggaggacccagtcctttgtgccttggcaaaaaagcacaagcgaaccccagccctgattgccctgcgctaccagctgcagcgtggggttgtggtcctggccaagagctacaatgagcagcgcatcagacagaacgtgcaggtttttgagttccagttgactgcagaggacatgaaagccatagatggcctagacagaaatctccactattttaacagtgatagttttgctagccaccctaattatccatattcagatgaatattaacatggagagctttgcctgatgtctaccagaagccctgtgtgtggatggtgacgcagaggacgtctctatgccggtgactggacatatcacctctacttaaatccgtcctgtttagcgacttcagtcaactacagctgagtccataggccagaaagacaataaatttttatcattttgaaataaattgaatgttttcctcaaagattctttacctac

SEQ ID NO: 451901 - DNA, 1278 bp, Homo sapiens
tgagggaagaagaaagaaacatttgctagccagctgagtgacagtgatggattcaaaacatcagtgtttgaagctaaatgatggtcacttcatgcctgtcctgggatttggcacctatgcacctccagagaatcatctcttttgaaaaatcgattcatcaaatgaatcttcagccaacaactgttcaagaaggattcaaatatcacaggttccgagaagtaaagctttggaggtcacaaaattagcaatagaagctgggttccgccatatagattctgctcatttatacaataatgaggagcaggttggactggccatccgaagcaagattgcagatggcagtgtgaagagagaagacatattctacacttcaaagctttggtccacttttcatcgaccagagttggtccgaccagccttggaaaactcactgaaaaaagctcaattggactatgttgacctctatcttattcattctccaatgtctctaaagccaggtgaggaactttcaccaacagatgaaaatggaaaagtaatatttgacatagtggatctctgtaccacctgggaggccatggagaagtgtaaggatgcaggattggccaagtccattggggtgtcaaacttcaaccgcaggcagctggagatgatcctcaacaagccaggactcaagtacaagcctgtctgcaaccaggtagaatgtcatccgtatttcaaccggagtaaattgctagatttctgcaagtcgaaagatattgttctggttgcctatagtgctctgggatctcaacgagacaaacgatgggtggacccgaactccccggtgctcttggaggacccagtcctttgtgccttggcaaaaaagcacaagcgaaccccagccctgattgccctgcgctaccagctgcagcgtggggttgtggtcctggccaagagctacaatgagcagcgcatcagacagaacgtgcaggtttttgagttccagttgactgcagaggacatgaaagccatagatggcctagacagaaatctccactattttaacagtgatagttttgctagccaccctaattatccatattcagatgaatattaacatggagagctttgcctgatgtctaccagaagccctgtgtgtggatggtgacgcagaggacgtctctatgccggtgactggacatatcacctctacttaaatccgtcctgtttagcgacttcagtcaactacagctgagtccataggccagaaagacaataaatttttatcattttgaaata

SEQ ID NO: 451902 - DNA, 1117 bp, Homo sapiens
tctcagccacagtgatcaccagatactacctttggttgctcctccaggttccgagaagtaaagctttggaggtcacaaaattagcaatagaagctgggttccgccatatagattctgctcatttatacaataatgaggagcaggttggactggccatccgaagcaagattgcagatggcagtgtgaagagagaagacatattctacacttcaaagctttggtccacttttcatcgaccagagttggtccgaccagccttggaaaactcactgaaaaaagctcaattggactatgttgacctctatcttattcattctccaatgtctctaaagccaggtgaggaactttcaccaacagatgaaaatggaaaagtaatatttgacatagtggatctctgtaccacctgggaggccatggagaagtgtaaggatgcaggattggccaagtccattggggtgtcaaacttcaaccgcaggcagctggagatgatcctcaacaagccaggactcaagtacaagcctgtctgcaaccaggtagaatgtcatccgtatttcaaccggagtaaattgctagatttctgcaagtcgaaagatattgttctggttgcctatagtgctctgggatctcaacgagacaaacgatgggtggacccgaactccccggtgctcttggaggacccagtcctttgtgccttggcaaaaaagcacaagcgaaccccagccctgattgccctgcgctaccagctgcagcgtggggttgtggtcctggccaagagctacaatgagcagcgcatcagacagaacgtgcaggtttttgagttccagttgactgcagaggacatgaaagccatagatggcctagacagaaatctccactattttaacagtgatagttttgctagccaccctaattatccatattcagatgaatattaacatggagagctttgcctgatgtctaccagaagccctgtgtgtggatggtgacgcagaggacgtctctatgccggtgactggacatatcacctctacttaaatccgtcctgtttagcgacttcagtcaactacagctgagtccataggccagaaagacaataaatttttatcattttgaaata

SEQ ID NO: 451903 - DNA, 1765 bp, Homo sapiens
ccctcatcaggattacagctttatcaggactgcatcttcttcagaaatgaatatttctcttacaacgcaaagaaagaaaaatcaaaataaattttctgattgaaaatgtaaaaaggcaaatatttttacagttttaactttaattttttattgaggaccaactatttgaaaaattctcattagtcattcctttaaattatgtgtatgtgagagaaagacgtaagatggttaattatttcaaatgatgcagtataaagaaggggcattatcacggcagaaacgaaaaaagatatttgtagctggaggtttttatagtctaacatatggttgctatttgttctacaaatccttttgaataatttaatatagagatttagaatagaaaataatactttagatagaaattaatgagtttattataaccatatattataataatttacttaggaattctctttgataagaaacaaatgaactgaatgcaattttctccacagaccatataagactgcctatgtacctcctcctacatgccattggttaaccatcagtcagtttgcaggggtggggggaggggtttcctggcccattgtttttgtaatctctgaggagaagcagcagcaaacatttgctagtcagacaagtgacagggaatggattccaaacagcagtgtgtaaagctaaatgatggccacttcatgcctgtattgggatttggcacctatgcacctccagaggttccgagaagtaaagctttggaggtcacaaaattagcaatagaagctgggttccgccatatagattctgctcatttatacaataatgaggagcaggttggactggccatccgaagcaagattgcagatggcagtgtgaagagagaagacatattctacacttcaaagctttggtccacttttcatcgaccagagttggtccgaccagccttggaaaactcactgaaaaaagctcaattggactatgttgacctctatcttattcattctccaatgtctctaaagccaggtgaggaactttcaccaacagatgaaaatggagccatggagaagtgtaaggatgcaggattggccaagtccattggggtgtcaaacttcaaccgcaggcagctggagatgatcctcaacaagccaggactcaagtacaagcctgtctgcaaccaggtagaatgtcatccgtatttcaaccggagtaaattgctagatttctgcaagtcgaaagatattgttctggttgcctatagtgctctgggatctcaacgagacaaacgatgggtggacccgaactccccggtgctcttggaggacccagtcctttgtgccttggcaaaaaagcacaagcgaaccccagccctgattgccctgcgctaccagctgcagcgtggggttgtggtcctggccaagagctacaatgagcagcgcatcagacagaacgtgcaggtttttgagttccagttgactgcagaggacatgaaagccatagatggcctagacagaaatctccactattttaacagtgatagttttgctagccaccctaattatccatattcagatgaatattaacatggagagctttgcctgatgtctaccagaagccctgtgtgtggatggtgacgcagaggacgtctctatgccggtgactggacatatcacctctacttaaatccgtcctgtttagcgacttcagtcaactacagctgagtccataggccagaaagacaataaatttttatcattttgaaata

SEQ ID NO: 451904 - DNA, 1281 bp, Homo sapiens
acaggtgcagggagcagtttctctccactcacagcctgaagcatacccggcaggggctgtccccaggcccaacaagcaaagggcccagtagcgagggccactggagcccatctccggggggctgggcaggaagtagggtggggtttggggtagggatctggtaccctgggactgctgcaactcaaactaaccaacccactgggagaagatgcctgggggtccaggagtcctccaagctctgcctgccaccatcttcctcctcttcctgctgtctgctgtctacctgggccctgggtgccaggccctgtggatgcacaaggtcccagcatcattgatggtgagcctgggggaagacgcccacttccaatgcccgcacaatagcagcaacaacgccaacgtcacctggtggcgcgtcctccatggcaactacacgtggccccctgagttcttgggcccgggcgaggaccccaatggtacgctgatcatccagaatgtgaacaagagccatgggggcatatacgtgtgccgggtccaggagggcaacgagtcataccagcagtcctgcggcacctacctccgcgtgcgccagccgccccccaggcccttcctggacatgggggagggcaccaagaaccgaatcatcacagccgaggggatcatcctcctgttctgcgcggtggtgcctgggacgctgctgctgttcaggaaacgatggcagaacgagaagctcgggttggatgccggggatgaatatgaagatgaaaacctttatgaaggcctgaacctggacgactgctccatgtatgaggacatctcccggggcctccagggcacctaccaggatgtgggcagcctcaacataggagatgtccagctggagaagccgtgacacccctactcctgccaggctgcccccgcctgctgtgcacccagctccagtgtctcagctcacttccctgggacattctcctttcagcccttctgggggcttccttagtcatattcccccagtggggggtgggagggtaacctcactcttctccaggccaggcctccttggactcccctgggggtgtcccactcttcttccctctaaactgccccacctcctaacctaatccccccgccccgctgcctttcccaggctcccctcaccccagcgggtaatgagcccttaatcgctgcctctaggggagctgattgtagcagcctcgttagtgtcaccccctcctccctgatctgtcagggccacttagtgataataaattcttcccaactgca

SEQ ID NO: 451905 - DNA, 888 bp, Homo sapiens
aaaactaggctaggtacgaggctgggtggtgtagtcctccaagctctgcctgccaccatcttcctcctcttcctgctgtctgctgtctacctgggccctgggtgccaggccctgtggatgcacaaggtcccagcatcattgatggtgagcctgggggaagacgcccacttccaatgcccgcacaatagcagcaacaacgccaacgtcacctggtggcgcgtcctccatggcaactacacgtggccccctgagttcttgggcccgggcgaggaccccaatgagccgccccccaggcccttcctggacatgggggagggcaccaagaaccgaatcatcacagccgaggggatcatcctcctgttctgcgcggtggtgcctgggacgctgctgctgttcaggaaacgatggcagaacgagaagctcgggttggatgccggggatgaatatgaagatgaaaacctttatgaaggcctgaacctggacgactgctccatgtatgaggacatctcccggggcctccagggcacctaccaggatgtgggcagcctcaacataggagatgtccagctggagaagccgtgacacccctactcctgccaggctgcccccgcctgctgtgcacccagctccagtgtctcagctcacttccctgggacattctcctttcagcccttctgggggcttccttagtcatattcccccagtggggggtgggagggtaacctcactcttctccaggccaggcctccttggactcccctgggggtgtcccactcttcttccctctaaactgccccacctcctaacctaatccccccgccgtgctttccaggtccctaccaggggttatgcctaatcgtgcctaggctgttgtccccgttgtccctc

SEQ ID NO: 451906 - DNA, 1521 bp, Homo sapiens
  misc_feature (1291)..(1291): n is a, c, g, or t
  misc_feature (1294)..(1294): n is a, c, g, or t
  misc_feature (1296)..(1296): n is a, c, g, or t
  misc_feature (1300)..(1300): n is a, c, g, or t
  misc_feature (1308)..(1308): n is a, c, g, or t
acaggtgcagggagcagtttctctccactcacagcctgaagcatacccggcaggggctgtccccaggcccaacaagcaaagggcccagtagcgagggccactggagcccatctccggggggctgggcaggaagtagggtggggtttggggtagggatctggtaccctgggactgctgcaactcaaactaaccaacccactgggagaagatgcctgggggtccaggagtcctccaagctctgcctgccaccatcttcctcctcttcctgctgtctgctgtctacctgggccctgggtgccaggccctgtggatgcacaaggtcccagcatcattgatggtgagcctgggggaagacgcccacttccaatgcccgcacaatagcagcaacaacgccaacgtcacctggtggcgcgtcctccatggcaactacacgtggccccctgagttcttgggcccgggcgaggaccccaatggtacgctgatcatccagaatgtgaacaagagccatgggggcatatacgtgtgccgggtccaggagggcaacgagtcataccagcagtcctgcggcacctacctccgcgtgcgccagccgccccccaggcccttcctggacatgggggagggcaccaagaaccgaatcatcacagccgaggggatcatcctcctgttctgcgcggtggtgcctgggacgctgctgctgttcaggaaacgatggcagaacgagaagctcgggttggatgccggggatgaatatgaagatgaaaacctttatgaaggcctgaacctggacgactgctccatgtatgaggacatctcccggggcctccagggcacctaccaggatgtgggcagcctcaacataggagatgtccagctggagaagccgtgacacccctactcctgccaggctgcccccgcctgctgtgcacccagctccagtgtctcagctcacttccctgggacattctcctttcagcccttctgggggcttccttagtcatattcccccagtggggggtgggagggtaacctcactcttctccaggccaggcctccttggactcccctgggggtgtcccactcttcttccctctaaactgccccacctcctaacctaatccccccgccccgctgcctttcccaggctcccctcaccccagcgggtaatgagcccttaatcgctgcctctaggggagctgattgtagcagcctcgttagtgtcaccccctcctccctgatctgtcagggccacttagtgataataaattcttcccaactgcaaaaaaaaaanaananaaanaaaaaaanaaaccggggccctatctattctggggggcagcagaaaaacaacagagagtaaagaaaagacggagcaccagggcaccagaacccggtcccgagcccaccagccctatcgatgggcacacgagcgagcggaacactccgcgccgcccccacaacagggcaccgcgcattaaatgcacgacaaccaccggacacgcgctaaaaaccccgccgacc

SEQ ID NO: 451907 - DNA, 1095 bp, Homo sapiens
acaggtgcagggagcagtttctctccactcacagcctgaagcatacccggcaggggctgtccccaggcccaacaagcaaagggcccagtagcgagggccactggagcccatctccggggggctgggcaggaagtagggtggggtttggggtagggatctggtaccctgggactgctgcaactcaaactaaccaacccactgggagaagatgcctgggggtccaggagtcctccaagctctgcctgccaccatcttcctcctcttcctgctgtctgctgtctacctgggccctgggtgccaggccctgtggatgcacaaggtcccagcatcattgatggtgagcctgggggaagacgcccacttccaatgcccgcacaatagcagcaacaacgccaacgtcacctggtggcgcgtcctccatggcaactacacgtggccccctgagttcttgggcccgggcgaggaccccaatggtacgctgatcatccagaatgtgaacaagagccatgggggcatatacgtgtgccgggtccaggagggcaacgagtcataccagcagtcctgcggcacctacctccgcgtgcgccagccgccccccaggcccttcctggacatgggggagggcaccaagaaccgaatcatcacagccgaggggatcatcctcctgttctgcgcggtggtgcctgggacgctgctgctgttcaggaaacgatggcagaacgagaagctcgggttggatgccggggatgaatatgaagatgaaaacctttatgaaggcctgaacctggacgactgctccatgtatgaggacatctcccggggcctccagggcacctaccaggatgtgggcagcctcaacataggagatgtccagctggagaagccgtgacacccctactcctgccaggctgcccccgcctgctgtgcacccagctccagtgtctcagctcacttccctgggacattctcctttcagcccttctgggggcttccttagtcatattcccccagtggggggtgggaaccccccttctcaggccggctcttgacccggggtgtccctttccttaatggccccttatttccccccggtta

SEQ ID NO: 451908 - DNA, 1529 bp, Homo sapiens
acaggtgcagggagcagtttctctccactcacagcctgaagcatacccggcaggggctgtccccaggcccaacaagcaaagggcccagtagcgagggccactggagcccatctccggggggctgggcaggaagtagggtggggtttggggtagggatctggtaccctgggactgctgcaactcaaactaaccaacccactgggagaagatgcctgggggtccaggagtcctccaagctctgcctgccaccatcttcctcctcttcctgctgtctgctgtctacctgggccctgggtgccaggccctgtggatgcacaaggtcccagcatcattgatggtgagcctgggggaagacgcccacttccaatgcccgcacaatagcagcaacaacgccaacgtcacctggtggcgcgtcctccatggcaactacacgtggccccctgagttcttgggcccgggcgaggaccccaatggtacgctgatcatccagaatgtgaacaagagccatgggggcatatacgtgtgccgggtccaggagggcaacgagtcataccagcagtcctgcggcacctacctccgcgtgcgccgccgtgagtggcccagccctggcccctactcccactgtcccgctggggacactcggtttatctttgaagtggggatagagccagtaccttcaatgtgggtttcaaaccggcttggacagagggacggacattctcctctgcagagtggggtctctggggggtctggggccttgcaggaggtgggcggggccaggaggctagggagggcaagaggggccagggctctgagccatactacctccttgcagagccgccccccaggcccttcctggacatgggggagggcaccaagaaccgaatcatcacagccgaggggatcatcctcctgttctgcgcggtggtgcctgggacgctgctgctgttcaggaaacgatggcagaacgagaagctcgggttggatgccggggatgaatatgaagatgaaaacctttatgaaggcctgaacctggacgactgctccatgtatgaggacatctcccggggcctccagggcacctaccaggatgtgggcagcctcaacataggagatgtccagctggagaagccgtgacacccctactcctgccaggctgcccccgcctgctgtgcacccagctccagtgtctcagctcacttccctgggacattctcctttcagcccttctgggggcttccttagtcatattcccccagtggggggtgggagggtaacctcactcttctccaggccaggcctccttggactcccctgggggtgtcccactcttcttccctctaaactgccccacctcctaacctaatccccccgccccgctgcctttcccaggctcccctcaccccagcgggtaatgagcccttaatcgctgcctctaggggagctgattgtagcagcctcgttagtgtcaccccctcctccctgatctgtcagggccacttagtgataataaattcttcccaactgca

SEQ ID NO: 451909 - DNA, 1312 bp, Homo sapiens
  misc_feature (1082)..(1082): n is a, c, g, or t
  misc_feature (1085)..(1085): n is a, c, g, or t
  misc_feature (1087)..(1087): n is a, c, g, or t
  misc_feature (1091)..(1091): n is a, c, g, or t
  misc_feature (1099)..(1099): n is a, c, g, or t
acaggtgcagggagcagtttctctccactcacagcctgaagcatacccggcaggggctgtccccaggcccaacaagcaaagggcccagtagcgagggccactggagcccatctccggggggctgggcaggaagtagggtggggtttggggtagggatctggtaccctgggactgctgcaactcaaactaaccaacccactgggagaagatgcctgggggtccaggagtcctccaagctctgcctgccaccatcttcctcctcttcctgctgtctgctgtctacctgggccctgggtgccaggccctgtggatgcacaaggtcccagcatcattgatggtgagcctgggggaagacgcccacttccaatgcccgcacaatagcagcaacaacgccaacgtcacctggtggcgcgtcctccatggcaactacacgtggccccctgagttcttgggcccgggcgaggaccccaatggtacgctgatcatccagaatgtgaacaagagccatgggggcatatacgtgtgccgggtccaggagggcaacgagtcataccagcagtcctgcggcacctacctccgcgtgcgccagccgccccccaggcccttcctggacatgggggagggcaccaagaaccgaatcatcacagccgaggggatcatcctcctgttctgcgcggtggtgcctgggacgctgctgctgttcaggaaacgatggcagaacgagaagctcgggttggatgccggggatgaatatgaagatgaaaacctttatgaaggcctgaacctggacgactgctccatgtatgaggacatcgggtaacctcactcttctccaggccaggcctccttggactcccctgggggtgtcccactcttcttccctctaaactgccccacctcctaacctaatccccccgccccgctgcctttcccaggctcccctcaccccagcgggtaatgagcccttaatcgctgcctctaggggagctgattgtagcagcctcgttagtgtcaccccctcctccctgatctgtcagggccacttagtgataataaattcttcccaactgcaaaaaaaaaanaananaaanaaaaaaanaaaccggggccctatctattctggggggcagcagaaaaacaacagagagtaaagaaaagacggagcaccagggcaccagaacccggtcccgagcccaccagccctatcgatgggcacacgagcgagcggaacactccgcgccgcccccacaacagggcaccgcgcattaaatgcacgacaaccaccggacacgcgctaaaaaccccgccgacc

SEQ ID NO: 451910 - DNA, 753 bp, Homo sapiens
acaggtgcagggagcagtttctctccactcacagcctgaagcatacccggcaggggctgtccccaggcccaacaagcaaagggcccagtagcgagggccactggagcccatctccggggggctgggcaggaagtagggtggggtttggggtagggatctggtaccctgggactgctgcaactcaaactaaccaacccactgggagaagatgcctgggggtccaggagtcctccaagctctgcctgccaccatcttcctcctcttcctgctgtctgctgtctacctgggccctgggtgccaggccctgtggatgcacaaggtcccagcatcattgatggtgagcctgggggaagacgcccacttccaatgcccgcacaatagcagcaacaacgccaacgtcacctggtggcgcgtcctccatggcaactacacgtggccccctgagttcttgggcccgggcgaggaccccaatggtacgctgatcatccagaatgtgaacaagagccatgggggcatatacgtgtgccgggtccaggagggcaacgagtcataccagcagtcctgcggcacctacctccgcgtgcgccagccgccccccaggccctttcttggacatgggggaggggcacccaaaacccgaatttttacaccccgggggggtcaataccccctgatttggggggtggaagcctgggaagccctttggttccccctgaaaaccatgggagaaattggaagactttgggttggata

SEQ ID NO: 451911 - DNA, 1167 bp, Homo sapiens
acaggtgcagggagcagtttctctccactcacagcctgaagcatacccggcaggggctgtccccaggcccaacaagcaaagggcccagtagcgagggccactggagcccatctccggggggctgggcaggaagtagggtggggtttggggtagggatctggtaccctgggactgctgcaactcaaactaaccaacccactgggagaagatgcctgggggtccaggagtcctccaagctctgcctgccaccatcttcctcctcttcctgctgtctgctgtctacctgggccctgggtgccaggccctgtggatgcacaaggtcccagcatcattgatggtgagcctgggggaagacgcccacttccaatgcccgcacaatagcagcaacaacgccaacgtcacctggtggcgcgtcctccatggcaactacacgtggccccctgagttcttgggcccgggcgaggaccccaatgagccgccccccaggcccttcctggacatgggggagggcaccaagaaccgaatcatcacagccgaggggatcatcctcctgttctgcgcggtggtgcctgggacgctgctgctgttcaggaaacgatggcagaacgagaagctcgggttggatgccggggatgaatatgaagatgaaaacctttatgaaggcctgaacctggacgactgctccatgtatgaggacatctcccggggcctccagggcacctaccaggatgtgggcagcctcaacataggagatgtccagctggagaagccgtgacacccctactcctgccaggctgcccccgcctgctgtgcacccagctccagtgtctcagctcacttccctgggacattctcctttcagcccttctgggggcttccttagtcatattcccccagtggggggtgggagggtaacctcactcttctccaggccaggcctccttggactcccctgggggtgtcccactcttcttccctctaaactgccccacctcctaacctaatccccccgccccgctgcctttcccaggctcccctcaccccagcgggtaatgagcccttaatcgctgcctctaggggagctgattgtagcagcctcgttagtgtcaccccctcctccctgatctgtcagggccacttagtgataataaattcttcccaactgca

SEQ ID NO: 451912 - DNA, 1432 bp, Homo sapiens
acaggtgcagggagcagtttctctccactcacagcctgaagcatacccggcaggggctgtccccaggcccaacaagcaaagggcccagtagcgagggccactggagcccatctccggggggctgggcaggaagtagggtggggtttggggtagggatctggtaccctgggactgctgcaactcaaactaaccaacccactgggagaagatgcctgggggtccaggagtcctccaagctctgcctgccaccatcttcctcctcttcctgctgtctgctgtctacctgggccctgggtgccaggccctgtggatgcacaaggtcccagcatcattgatggtgagcctgggggaagacgcccacttccaatgcccgcacaatagcagcaacaacgccaacgtcacctggtggcgcgtcctccatggcaactacacgtggccccctgagttcttgggcccgggcgaggaccccaatggtacgctgatcatccagaatgtgaacaagagccatgggggcatatacgtgtgccgggtccaggagggcaacgagtcataccagcagtcctgcggcacctacctccgcgtgcgccagccgccccccaggcccttcctggacatgggggagggcaccaagaaccgaatcatcacagccgaggggatcatcctcctgttctgcgcggtggtgcctgggacgctgctgctgttcaggaaacgatggcagaacgagaagctcgggttggatgccggggatgaatatgaagatgaaaacctttatgaaggcctgaacctggacgactgctccatgtatgaggacatctcccggggcctccagggcacctaccaggatgtgggcagcctcaacataggagatgtccagctggagaagccgtgacacccctactcctgccaggctgcccccgcctgctgtgcacccagctccagtgtctcagctcacttccctgggacattctcctttcagcccttctgggggcttccttagtcatattcccccagtggggggtgggagggtaacctcactcttctccaggccaggcctccttggactcccctgggggtgtcccactcttcttccctctaaactgccccacctcctaacctaatccccccgccccgctgcctttcccaggctcccctcaccccagcgggtaatgagcccttaatcgctgcctctaggggagctgattgtagcagcctcgttagtgtcaccccctcctccctgatctgtcagggccacttagtgataataaattcttcccaactgcagtgcgaacaacaagaagagaaagaagacgaaaataaaacaaagaaaaaaagaaagaagagaagaacaagaagaaaagaaaccaagaaaacacagggaggccggggacagaaagagcagcacccgcgaagggcgcagaaagcagaaagcaca

SEQ ID NO: 451913 - DNA, 974 bp, Homo sapiens
aaaactaggctaggtacgaggctgggtggtgtagtcctccaagctctgcctgccaccatcttcctcctcttcctgctgtctgctgtctacctgggccctgggtgccaggccctgtggatgcacaaggtcccagcatcattgatggtgagcctgggggaagacgcccacttccaatgcccgcacaatagcagcaacaacgccaacgtcacctggtggcgcgtcctccatggcaactacacgtggccccctgagttcttgggcccgggcgaggaccccaatgagccgccccccaggcccttcctggacatgggggagggcaccaagaaccgaatcatcacagccgaggggatcatcctcctgttctgcgcggtggtgcctgggacgctgctgctgttcaggaaacgatggcagaacgagaagctcgggttggatgccggggatgaatatgaagatgaaaacctttatgaaggcctgaacctggacgactgctccatgtatgaggacatctcccggggcctccagggcacctaccaggatgtgggcagcctcaacataggagatgtccagctggagaagccgtgacacccctactcctgccaggctgcccccgcctgctgtgcacccagctccagtgtctcagctcacttccctgggacattctcctttcagcccttctgggggcttccttagtcatattcccccagtggggggtgggagggtaacctcactcttctccaggccaggcctccttggactcccctgggggtgtcccactcttcttccctctaaactgccccacctcctaacctaatccccccgccccgctgcctttcccaggctcccctcaccccagcgggtaatgagcccttaatcgctgcctctaggggagctgattgtagcagcctcgttagtgtcaccccctcctccctgatctgtcagggccacttagtgataataaattcttcccaactgca

SEQ ID NO: 451914 - DNA, 1081 bp, Homo sapiens
acaggtgcagggagcagtttctctccactcacagcctgaagcatacccggcaggggctgtccccaggcccaacaagcaaagggcccagtagcgagggccactggagcccatctccggggggctgggcaggaagtagggtggggtttggggtagggatctggtaccctgggactgctgcaactcaaactaaccaacccactgggagaagatgcctgggggtccaggagtcctccaagctctgcctgccaccatcttcctcctcttcctgctgtctgctgtctacctgggccctgggtgccaggccctgtggatgcacaaggtcccagcatcattgatggtgagcctgggggaagacgcccacttccaatgcccgcacaatagcagcaacaacgccaacgtcacctggtggcgcgtcctccatggcaactacacgtggccccctgagttcttgggcccgggcgaggaccccaatgagccgccccccaggcccttcctggacatgggggagggcaccaagaaccgaatcatcacagccgaggggatcatcctcctgttctgcgcggtggtgcctgggacgctgctgctgttcaggaaacgatggcagaacgagaagctcgggttggatgccggggatgaatatgaagatgaaaacctttatgaaggcctgaacctggacgactgctccatgtatgaggacatctcccggggcctccagggcacctaccaggatgtgggcagcctcaacataggagatgtccagctggagaagccgtgacacccctactcctgccaggctgcccccgcctgctgtgcacccagctccagtgtctcagctcacttccctgggacattctcctttcagcccttctgggggcttccttagtcatattcccccagtggggggtgggagggtaacctcactcttctccaggccaggcctccttggactcccctgggggtgtcccactcttcttccctctaaactgccccacctcctaacctaatccccccgccgtgctttccaggtccctaccaggggttatgcctaatcgtgcctaggctgttgtccccgttgtccctc

SEQ ID NO: 451915 - DNA, 1374 bp, Homo sapiens
  misc_feature (629)..(629): n is a, c, g, or t
ttaattcagaaatttaggtgatgctggttaaaaagtctgcctggtgtggggcctcgtccatgcactgtccctgttcagctgcatcccctctgttcccctagcttcagtttgtgctgacaatcatccagaccagctgcggggtcatctggccgtgcacattccctcttggttggttgtatttccagattggatacatgatttccctgattgctctcttcacaaacttctacattcaggtaaatctcacccttctctgggacttggaatctggggcctttaccaacaaaggccctcatctatttacttaatgggcatgtggagcccttgctgggtgacaggctctggcctctaatggagtcactatgacaagagcagcccctgcctctggggggctcacagctcactggaagacactagaatcctgttctagagcctgggtgaggaagtcttgggattcccctgggaaatggaaaactgtgcagcaggaccctatgttgcttccctctgacctgcagcagagacgtgagaggtgatttcaatcagaaatctctcagttcactaccctgaacgtcatggccaaatgaaatttcagaagagatttttatcacagtcctcagatatggagatcngcttttttgtcccagctttcttatacattcagtcttcaggtgtgaggattcggttcattcctaagcatatgatgtggtgatgtaggtctttgctcacagaaagatccatttagggcagataatttccagtggagcctgaccacgttgcagccactgctgattctcctgccatgcgtcaccccccagatgacatgtgtcctgcctttgttgccagtgcctggtagccataaggcctgctgatctgggcaaaacacggaggtcaggagcaagggcagaggctgcaagtcccgaggctcagacatttgtcctttcttcttctgtgcccacaagcacctgtgtgtggcatgttgagtttcagtggaagtcatatacttctgggcttcatagtttatggctgcactgtgggacatacaccagctacaaggaaggtgaaaggataggacccgatgaagctgaaatcacatttattctaactacttatagcagcatagcactttgttcatgaaggctgagatagtcgctgaggcagtgaggaacttttgaagacgaacaagggatgtgggtgtcaagagagctgctgccaggtgggaaagaccaatttggccacataacccctgtcatctgccatccagatactaaaaggcaaagcaaagtgtaaattgaattttctatgtgacattttaaatagtatttctgctgcagcctgtgattcagttaacttacctcaggctaagctcaaaaaaaa

SEQ ID NO: 451916 - DNA, 2850 bp, Homo sapiens
ggccggcgccattgtgacgtcacggtcagcccacgttctgattgtagatagccggcgccttcctcttcccatcgcgcgggtcctagccaccggtgtctccttctacatccgcctctgcgccggctgccacccgcgctccctccgccgccgccgccttgctgctgctcaaagctgctgccgccccttgggctaaaaggttttcaaatggaacattttgatgcatcacttagtacctatttcaaggcattgctaggccctcgagatactagagtaaaaggatggtttcttctggacaattatatacccacatttatctgctctgtcatatatttactaattgtatggctgggaccaaaatacatgaggaataaacagccattctcttgccgggggattttagtggtgtataaccttggactcacactgctgtctctgtatatgttctgtgagttagtaacaggagtatgggaaggcaaatacaacttcttctgtcagggcacacgcaccgcaggagaatcagatatgaagattatccgtgtcctctggtggtactacttctccaaactcatagaatttatggacactttcttcttcatcctgcgcaagaacaaccaccagatcacggtcctgcacgtctaccaccatgcctcgatgctgaacatctggtggtttgtgatgaactgggtcccctgcggccactcttattttggtgccacacttaatagcttcatccacgtcctcatgtactcttactatggtttgtcgtcagtcccttccatgcgtccatacctctggtggaagaagtacatcactcaggggcagctgcttcagtttgtgctgacaatcatccagaccagctgcggggtcatctggccgtgcacattccctcttggttggttgtatttccagattggatacatgatttccctgattgctctcttcacaaacttctacattcagacctacaacaagaaaggggcctcccgaaggaaagaccacctgaaggaccaccagaatgggtccatggctgctgtgaatggacacaccaacagcttttcacccctggaaaacaatgtgaagccaaggaagctgcggaaggattgaagtcaaagaattgaaaccctccaaaccacgtcatctgattgtaagcacaatatgagttgtgccccaatgctcgttaacagctgctgtaactagtctggcctacaatagtgtgattcatgtaggacttctttcatcaattcaaaacccctagaaaacgtatacagattatataagtagggataagatttctaacatttctgggctctctgacccctgcgctagactgtggaaagggagtattattatagtatacaacactgctgttgccttattagttataacatgataggtgctgaattgtgattcacaatttaaaaacactgtaatccaaacttttttttttaactgtagatcatgcatgtgattgtaaatgtaaatttgtacaatgttgttatggtagagaaacacacatgccttaaaatttaaaaagcagggcccaaagcttattagtttaaattagggtatgtttcaagtttgtattaatttgtaatagctctgtttagaaaaaatcaaagaccatgatttatgaaactaatgtgacataatttccagtgacttgttgatgtgaaatcagacacggcaccttcagttttgtactattggctttgaatcaagcaggctcaaatctagtggaacagtcagtttaactttttaacagatcttatttttttattttgagtgccactattaatgtaaaaaggggggggctctacagcagtcgtgatgaaacttaaatatatattctttgtcctcgagattttaggaagggtgtagggtgagtaggccatttttaatttctgaagtgctaagtgtttttatacagcaaacaaaaagtcaattttgctttccaccagtgcgagagaggatgtatacttttcaagagagatgattgcctatttaccgtttgacagagtcccgtagatgagcaatggggaactggttgccagggtctaaatttggattgatttatgcactgttatctgttttgacacagatttccttgtaaaatgtgcctagtttaccaaaattaacaaagggggggaaaggaccttagaactttttaaggtaaaatcaaatatagctacagcataagagaatcgagaaatttgatagaggtaacttgtttaatgtaaatctaatagtacttgtaatttctttctgcttagaatctaaagatgtgtttagaacctcttgtttaaaaataatagactgcttatcataaaatcacatctcacacatttgaggcagtggtcaaacaggtaaagcctatgatgtgtgtcattttaaagtgtcggaatttagcctctgaataccttctccattgggggaaagatattcttggaaccactcatgacatatcttagaaggtcattgacaatgtataaactaattgttggtttgatatttatgtaaatatcagtttaccatgctttaattttgcacattcgtactatagggagcctattggttctctattagtcttgtgggttttctgtttgaaaaggagtcatggcatctgtttacatttaccttatcaaacctagaatgtgtatatttataaatgtatgtcttcattgctaggtactaatttgcagatgtctttacatatttcaatacagaaactataacattcaatagtgtgctgtcaaagtgtgcttagctcacctggatatacctacattgttaaatgtctaaacagtaatcattaaaacatttttgattattacctgtgcctgcattttacat

SEQ ID NO: 451917 - DNA, 3155 bp, Homo sapiens
ggccggcgccattgtgacgtcacggtcagcccacgttctgattgtagatagccggcgccttcctcttcccatcgcgcgggtcctagccaccggtgtctccttctacatccgcctctgcgccggctgccacccgcgctccctccgccgccgccgccttgctgctgctcaaagctgctgccgccccttgggctaaaaggttttcaaatggaacattttgatgcatcacttagtacctatttcaaggcattgctaggccctcgagatactagagtaaaaggatggtttcttctggacaattatatacccacatttatctgctctgtcatatatttactaattgtatggctgggaccaaaatacatgaggaataaacagccattctcttgccgggggattttagtggtgtataaccttggactcacactgctgtctctgtatatgttctgtgagaatgaagtcagtttaattagactccaagatggagagttcaggactggagccaggggaagtgcacaggagtgactcctggccccagcactatgcacatttctgtgttcaagggacaaaaccacagcaagctgtcagatgattccctggtaaagagaagaaaaacactgtataaagtacagctgtgtgcatctgagtggatgtggggggttctgaacacattgtaatagaaggacttctgatcagcctgcatggatcctgcttgactggccatgactttagagagtagtagaagacagaaaagttaatacaccttctaatgaattaccatttagtaacaggagtatgggaaggcaaatacaacttcttctgtcagggcacacgcaccgcaggagaatcagatatgaagattatccgtgtcctctggtggtactacttctccaaactcatagaatttatggacactttcttcttcatcctgcgcaagaacaaccaccagatcacggtcctgcacgtctaccaccatgcctcgatgctgaacatctggtggtttgtgatgaactgggtcccctgcggccactcttattttggtgccacacttaatagcttcatccacgtcctcatgtactcttactatggtttgtcgtcagtcccttccatgcgtccatacctctggtggaagaagtacatcactcaggggcagctgcttcagtttgtgctgacaatcatccagaccagctgcggggtcatctggccgtgcacattccctcttggttggttgtatttccagattggatacatgatttccctgattgctctcttcacaaacttctacattcagacctacaacaagaaaggggcctcccgaaggaaagaccacctgaaggaccaccagaatgggtccatggctgctgtgaatggacacaccaacagcttttcacccctggaaaacaatgtgaagccaaggaagctgcggaaggattgaagtcaaagaattgaaaccctccaaaccacgtcatctgattgtaagcacaatatgagttgtgccccaatgctcgttaacagctgctgtaactagtctggcctacaatagtgtgattcatgtaggacttctttcatcaattcaaaacccctagaaaacgtatacagattatataagtagggataagatttctaacatttctgggctctctgacccctgcgctagactgtggaaagggagtattattatagtatacaacactgctgttgccttattagttataacatgataggtgctgaattgtgattcacaatttaaaaacactgtaatccaaacttttttttttaactgtagatcatgcatgtgattgtaaatgtaaatttgtacaatgttgttatggtagagaaacacacatgccttaaaatttaaaaagcagggcccaaagcttattagtttaaattagggtatgtttcaagtttgtattaatttgtaatagctctgtttagaaaaaatcaaagaccatgatttatgaaactaatgtgacataatttccagtgacttgttgatgtgaaatcagacacggcaccttcagttttgtactattggctttgaatcaagcaggctcaaatctagtggaacagtcagtttaactttttaacagatcttatttttttattttgagtgccactattaatgtaaaaaggggggggctctacagcagtcgtgatgaaacttaaatatatattctttgtcctcgagattttaggaagggtgtagggtgagtaggccatttttaatttctgaagtgctaagtgtttttatacagcaaacaaaaagtcaattttgctttccaccagtgcgagagaggatgtatacttttcaagagagatgattgcctatttaccgtttgacagagtcccgtagatgagcaatggggaactggttgccagggtctaaatttggattgatttatgcactgttatctgttttgacacagatttccttgtaaaatgtgcctagtttaccaaaattaacaaagggggggaaaggaccttagaactttttaaggtaaaatcaaatatagctacagcataagagaatcgagaaatttgatagaggtaacttgtttaatgtaaatctaatagtacttgtaatttctttctgcttagaatctaaagatgtgtttagaacctcttgtttaaaaataatagactgcttatcataaaatcacatctcacacatttgaggcagtggtcaaacaggtaaagcctatgatgtgtgtcattttaaagtgtcggaatttagcctctgaataccttctccattgggggaaagatattcttggaaccactcatgacatatcttagaaggtcattgacaatgtataaactaattgttggtttgatatttatgtaaatatcagtttaccatgctttaattttgcacattcgtactatagggagcctattggttctctattagtcttgtgggttttctgtttgaaaaggagtcatggcatctgtttacatttaccttatcaaacctagaatgtgtatatttataaatgtatgtcttcattgctaggtactaatttgcagatgtctttacatatttcaatacagaaactataacattcaatagtgtgctgtcaaagtgtgcttagctcacctggatatacctacattgttaaatgtctaaacagtaatcattaaaacatttttgatta

SEQ ID NO: 451918 - DNA, 3057 bp, Homo sapiens
ggccggcgccattgtgacgtcacggtcagcccacgttctgattgtagatagccggcgccttcctcttcccatcgcgcgggtcctagccaccggtgtctccttctacatccgcctctgcgccggctgccacccgcgctccctccgccgccgccgccttgctgctgctcaaagctgctgccgccccttgggctaaaaggttttcaaatggaacattttgatgcatcacttagtacctatttcaaggcattgctaggccctcgagatactagagtaaaaggatggtttcttctggacaattatatacccacatttatctgctctgtcatatatttactaattgtatggctgggaccaaaatacatgaggaataaacagccattctcttgccgggggattttagtggtgtataaccttggactcacactgctgtctctgtatatgttctgtgagaatgaagtcagtttaattagactccaagatggagagttcaggactggagccaggggaagtgcacaggagtgactcctggccccagcactatgcacatttctgtgttcaagggacaaaaccacagcaagctgtcagatgattccctggtaaagagaagaaaaacactgtataaagtacagctgtgtgcatctgagtggatgtggggggttctgaacacattgtaatagaagttagtaacaggagtatgggaaggcaaatacaacttcttctgtcagggcacacgcaccgcaggagaatcagatatgaagattatccgtgtcctctggtggtactacttctccaaactcatagaatttatggacactttcttcttcatcctgcgcaagaacaaccaccagatcacggtcctgcacgtctaccaccatgcctcgatgctgaacatctggtggtttgtgatgaactgggtcccctgcggccactcttattttggtgccacacttaatagcttcatccacgtcctcatgtactcttactatggtttgtcgtcagtcccttccatgcgtccatacctctggtggaagaagtacatcactcaggggcagctgcttcagtttgtgctgacaatcatccagaccagctgcggggtcatctggccgtgcacattccctcttggttggttgtatttccagattggatacatgatttccctgattgctctcttcacaaacttctacattcagacctacaacaagaaaggggcctcccgaaggaaagaccacctgaaggaccaccagaatgggtccatggctgctgtgaatggacacaccaacagcttttcacccctggaaaacaatgtgaagccaaggaagctgcggaaggattgaagtcaaagaattgaaaccctccaaaccacgtcatctgattgtaagcacaatatgagttgtgccccaatgctcgttaacagctgctgtaactagtctggcctacaatagtgtgattcatgtaggacttctttcatcaattcaaaacccctagaaaacgtatacagattatataagtagggataagatttctaacatttctgggctctctgacccctgcgctagactgtggaaagggagtattattatagtatacaacactgctgttgccttattagttataacatgataggtgctgaattgtgattcacaatttaaaaacactgtaatccaaacttttttttttaactgtagatcatgcatgtgattgtaaatgtaaatttgtacaatgttgttatggtagagaaacacacatgccttaaaatttaaaaagcagggcccaaagcttattagtttaaattagggtatgtttcaagtttgtattaatttgtaatagctctgtttagaaaaaatcaaagaccatgatttatgaaactaatgtgacataatttccagtgacttgttgatgtgaaatcagacacggcaccttcagttttgtactattggctttgaatcaagcaggctcaaatctagtggaacagtcagtttaactttttaacagatcttatttttttattttgagtgccactattaatgtaaaaaggggggggctctacagcagtcgtgatgaaacttaaatatatattctttgtcctcgagattttaggaagggtgtagggtgagtaggccatttttaatttctgaagtgctaagtgtttttatacagcaaacaaaaagtcaattttgctttccaccagtgcgagagaggatgtatacttttcaagagagatgattgcctatttaccgtttgacagagtcccgtagatgagcaatggggaactggttgccagggtctaaatttggattgatttatgcactgttatctgttttgacacagatttccttgtaaaatgtgcctagtttaccaaaattaacaaagggggggaaaggaccttagaactttttaaggtaaaatcaaatatagctacagcataagagaatcgagaaatttgatagaggtaacttgtttaatgtaaatctaatagtacttgtaatttctttctgcttagaatctaaagatgtgtttagaacctcttgtttaaaaataatagactgcttatcataaaatcacatctcacacatttgaggcagtggtcaaacaggtaaagcctatgatgtgtgtcattttaaagtgtcggaatttagcctctgaataccttctccattgggggaaagatattcttggaaccactcatgacatatcttagaaggtcattgacaatgtataaactaattgttggtttgatatttatgtaaatatcagtttaccatgctttaattttgcacattcgtactatagggagcctattggttctctattagtcttgtgggttttctgtttgaaaaggagtcatggcatctgtttacatttaccttatcaaacctagaatgtgtatatttataaatgtatgtcttcattgctaggtactaatttgcagatgtctttacatatttcaatacagaaactataacattcaatagtgtgctgtcaaagtgtgcttagctcacctggatatacctacattgttaaatgtctaaacagtaatcattaaaacatttttgatta

SEQ ID NO: 451919 - DNA, 2702 bp, Homo sapiens
ggccggcgccattgtgacgtcacggtcagcccacgttctgattgtagatagccggcgccttcctcttcccatcgcgcgggtcctagccaccggtgtctccttctacatccgcctctgcgccggctgccacccgcgctccctccgccgccgccgccttgctgctgctcaaagctgctgccgccccttgggctaaaaggttttcaaatggaacattttgatgcatcacttagtacctatttcaaggcattgctaggccctcgagatactagagtaaaaggatggtttcttctggacaattatatacccacatttatctgctctgtcatatatttactaattgtatggctgggaccaaaatacatgaggaataaacagccattctcttgccgggggattttagtggtgtataaccttggactcacactgctgtctctgtatatgttctgtgagttagtaacaggagtatgggaaggcaaatacaacttcttctgtcagggcacacgcaccgcaggagaatcagatatgaagattatccgtgtcctctggtggtactacttctccaaactcatagaatttatggacactttcttcttcatcctgcgcaagaacaaccaccagatcacggtcctgcacgtctaccaccatgcctcgatgctgaacatctggtggtttgtgatgaactgggtcccctgcggccactcttcagtttgtgctgacaatcatccagaccagctgcggggtcatctggccgtgcacattccctcttggttggttgtatttccagattggatacatgatttccctgattgctctcttcacaaacttctacattcagacctacaacaagaaaggggcctcccgaaggaaagaccacctgaaggaccaccagaatgggtccatggctgctgtgaatggacacaccaacagcttttcacccctggaaaacaatgtgaagccaaggaagctgcggaaggattgaagtcaaagaattgaaaccctccaaaccacgtcatctgattgtaagcacaatatgagttgtgccccaatgctcgttaacagctgctgtaactagtctggcctacaatagtgtgattcatgtaggacttctttcatcaattcaaaacccctagaaaacgtatacagattatataagtagggataagatttctaacatttctgggctctctgacccctgcgctagactgtggaaagggagtattattatagtatacaacactgctgttgccttattagttataacatgataggtgctgaattgtgattcacaatttaaaaacactgtaatccaaacttttttttttaactgtagatcatgcatgtgattgtaaatgtaaatttgtacaatgttgttatggtagagaaacacacatgccttaaaatttaaaaagcagggcccaaagcttattagtttaaattagggtatgtttcaagtttgtattaatttgtaatagctctgtttagaaaaaatcaaagaccatgatttatgaaactaatgtgacataatttccagtgacttgttgatgtgaaatcagacacggcaccttcagttttgtactattggctttgaatcaagcaggctcaaatctagtggaacagtcagtttaactttttaacagatcttatttttttattttgagtgccactattaatgtaaaaaggggggggctctacagcagtcgtgatgaaacttaaatatatattctttgtcctcgagattttaggaagggtgtagggtgagtaggccatttttaatttctgaagtgctaagtgtttttatacagcaaacaaaaagtcaattttgctttccaccagtgcgagagaggatgtatacttttcaagagagatgattgcctatttaccgtttgacagagtcccgtagatgagcaatggggaactggttgccagggtctaaatttggattgatttatgcactgttatctgttttgacacagatttccttgtaaaatgtgcctagtttaccaaaattaacaaagggggggaaaggaccttagaactttttaaggtaaaatcaaatatagctacagcataagagaatcgagaaatttgatagaggtaacttgtttaatgtaaatctaatagtacttgtaatttctttctgcttagaatctaaagatgtgtttagaacctcttgtttaaaaataatagactgcttatcataaaatcacatctcacacatttgaggcagtggtcaaacaggtaaagcctatgatgtgtgtcattttaaagtgtcggaatttagcctctgaataccttctccattgggggaaagatattcttggaaccactcatgacatatcttagaaggtcattgacaatgtataaactaattgttggtttgatatttatgtaaatatcagtttaccatgctttaattttgcacattcgtactatagggagcctattggttctctattagtcttgtgggttttctgtttgaaaaggagtcatggcatctgtttacatttaccttatcaaacctagaatgtgtatatttataaatgtatgtcttcattgctaggtactaatttgcagatgtctttacatatttcaatacagaaactataacattcaatagtgtgctgtcaaagtgtgcttagctcacctggatatacctacattgttaaatgtctaaacagtaatcattaaaacatttttgatta

SEQ ID NO: 451920 - DNA, 2771 bp, Homo sapiens
ggccggcgccattgtgacgtcacggtcagcccacgttctgattgtagatagccggcgccttcctcttcccatcgcgcgggtcctagccaccggtgtctccttctacatccgcctctgcgccggctgccacccgcgctccctccgccgccgccgccttgctgctgctcaaagctgctgccgccccttgggctaaaaggttttcaaatggaacattttgatgcatcacttagtacctatttcaaggcattgctaggccctcgagatactagagtaaaaggatggtttcttctggacaattatatacccacatttatctgctctgtcatatatttactaattgtatggctgggaccaaaatacatgaggaataaacagccattctcttgccgggggattttagtggtgtataaccttggactcacactgctgtctctgtatatgttctgtgagttagtaacaggagtatgggaaggcaaatacaacttcttctgtcagggcacacgcaccgcaggagaatcagatatgaagattatccgtgtcctctggtggtactacttctccaaactcatagaatttatggacactttcttcttcatcctgcgcaagaacaaccaccagatcacggtcctgcacgtctaccaccatgcctcgatgctgaacatctggtggtttgtgatgaactgggtcccctgcggccactcttattttggtgccacacttaatagcttcatccacgtcctcatgtactcttactatggtttgtcgtcagtcccttccatgcgtccatacctctggtggaagaagtacatcactcaggggcagctgcttcagtttgtgctgacaatcatccagaccagctgcggggtcatctggccgtgcacattccctcttggttggttgtatttccagattggatacatgatttccctgattgctctcttcacaaacttctacattcagacctacaacaagaaaggggcctcccgaaggaaagaccacctgaaggaccaccagaatgggtccatggctgctgtgaatggacacaccaacagcttttcacccctggaaaacaatgtgaagccaaggaagctgcggaaggattgaagtcaaagaattgaaaccctccaaaccacgtcatctgattgtaagcacaatatgagttgtgccccaatgctcgttaacagctgctgtaactagtctggcctacaatagtgtgattcatgtaggacttctttcatcaattcaaaacccctagaaaacgtatacagattatataagtagggataagatttctaacatttctgggctctctgacccctgcgctagactgtggaaagggagtattattatagtatacaacactgctgttgccttattagttataacatgataggtgctgaattgtgattcacaatttaaaaacactgtaatccaaacttttttttttaactgtagatcatgcatgtgattgtaaatgtaaatttgtacaatgttgttatggtagagaaacacacatgccttaaaatttaaaaagcagggcccaaagcttattagtttaaattagggtatgtttcaagtttgtattaatttgtaatagctctgtttagatgatgtgaaatcagacacggcaccttcagttttgtactattggctttgaatcaagcaggctcaaatctagtggaacagtcagtttaactttttaacagatcttatttttttattttgagtgccactattaatgtaaaaaggggggggctctacagcagtcgtgatgaaacttaaatatatattctttgtcctcgagattttaggaagggtgtagggtgagtaggccatttttaatttctgaagtgctaagtgtttttatacagcaaacaaaaagtcaattttgctttccaccagtgcgagagaggatgtatacttttcaagagagatgattgcctatttaccgtttgacagagtcccgtagatgagcaatggggaactggttgccagggtctaaatttggattgatttatgcactgttatctgttttgacacagatttccttgtaaaatgtgcctagtttaccaaaattaacaaagggggggaaaggaccttagaactttttaaggtaaaatcaaatatagctacagcataagagaatcgagaaatttgatagaggtaacttgtttaatgtaaatctaatagtacttgtaatttctttctgcttagaatctaaagatgtgtttagaacctcttgtttaaaaataatagactgcttatcataaaatcacatctcacacatttgaggcagtggtcaaacaggtaaagcctatgatgtgtgtcattttaaagtgtcggaatttagcctctgaataccttctccattgggggaaagatattcttggaaccactcatgacatatcttagaaggtcattgacaatgtataaactaattgttggtttgatatttatgtaaatatcagtttaccatgctttaattttgcacattcgtactatagggagcctattggttctctattagtcttgtgggttttctgtttgaaaaggagtcatggcatctgtttacatttaccttatcaaacctagaatgtgtatatttataaatgtatgtcttcattgctaggtactaatttgcagatgtctttacatatttcaatacagaaactataacattcaatagtgtgctgtcaaagtgtgcttagctcacctggatatacctacattgttaaatgtctaaacagtaatcattaaaacatttttgatta

SEQ ID NO: 451921 - DNA, 2128 bp, Homo sapiens
ggccggcgccattgtgacgtcacggtcagcccacgttctgattgtagatagccggcgccttcctcttcccatcgcgcgggtcctagccaccggtgtctccttctacatccgcctctgcgccggctgccacccgcgctccctccgccgccgccgccttgctgctgctcaaagctgctgccgccccttgggctaaaaggttttcaaatggaacattttgatgcatcacttagtacctatttcaaggcattgctaggccctcgagatactagagtaaaaggatggtttcttctggacaattatatacccacatttatctgctctgtcatatatttactaattgtatggctgggaccaaaatacatgaggaataaacagccattctcttgccgggggattttagtggtgtataaccttggactcacactgctgtctctgtatatgttctgtgagttagtaacaggagtatgggaaggcaaatacaacttcttctgtcagggcacacgcaccgcaggagaatcagatatgaagattatccgtgtcctctggtggtactacttctccaaactcatagaatttatggacactttcttcttcatcctgcgcaagaacaaccaccagatcacggtcctgcacgtctaccaccatgcctcgatgctgaacatctggtggtttgtgatgaactgggtcccctgcggccactcttattttggtgccacacttaatagcttcatccacgtcctcatgtactcttactatggtttgtcgtcagtcccttccatgcgtccatacctctggtggaagaagtacatcactcaggggcagctgcttcagtttgtgctgacaatcatccagaccagctgcggggtcatctggccgtgcacattccctcttggttggttgtatttccagattggatacatgatttccctgattgctctcttcacaaacttctacattcagacctacaacaagaaaggggcctcccgaaggaaagaccacctgaaggaccaccagaatgggtccatggctgctgtgaatggacacaccaacagcttttcacccctggaaaacaatgtgaagccaaggaagctgcggaaggattgaagtcaaagaattgaaaccctccaaaccacgtcatctgattgtaagcacaatatgagttgtgccccaatgctcgttaacagctgctgtaactagtctggcctacaatagtgtgattcatgtaggacttctttcatcaattcaaaacccctagaaaacgtatacagattatataagtagggataagatttctaacatttctgggctctctgacccctgcgctagactgtggaaagggagtattattatagtatacaacactgctgttgccttattagttataacatgataggtgctgaattgtgattcacaatttaaaaacactgtaatccaaacttttttttttaactgtagatcatgcatgtgattgtaaatgtaaatttgtacaatgttgttatggtagagaaacacacatgccttaaaatttaaaaagcagggcccaaagcttattagtttaaattagggtatgtttcaagtttgtattaatttgtaatagctctgtttagaaaaaatcaaagaccatgatttatgaaactaatgtgacataatttccagtgacttgttgatgtgaaatcagacacggcaccttcagttttgtactattggctttgaatcaagcaggctcaaatctagtggaacagtcagtttaactttttaacagatcttatttttttattttgagtgccactattaatgtaaaaaggggggggctctacagcagtcgtgatgaaacttaaatatatattctttgtcctcgagattttaggaagggtgtagggtgagtaggccatttttaatttctgaagtgctaagtgtttttatacagcaaacaaaaagtcaattttgctttccaccagtgcgagagaggatgtatacttttcaagagagatgattgcctatttaccgtttgagtttgctatgcagaatagtattgaggatgtatgcccgtgggcgattatgatgaatactgcgccggtcaagcttcagggggtttggatgagaatggctaatttctctcggaccaatg

SEQ ID NO: 451922 - DNA, 979 bp, Homo sapiens
tgctggcggctgacctgtttccctctccctcctccctgcctaagaaaaggaataggggcaggagaggcccttcctataccagtatctcctctggatccgcctaggtcttcgctctcatgctactactcctcagtttgttaaatactgccctatttaccgtttgacagagtcccgtagatgagcaatggggaactggttgccagggtctaaatttggattgatttatgcactgttatctgttttgacacagatttccttgtaaaatgtgcctagtttaccaaaattaacaaagggggggaaaggaccttagaactttttaaggtaaaatcaaatatagctacagcataagagaatcgagaaatttgatagaggtaacttgtttaatgtaaatctaatagtacttgtaatttctttctgcttagaatctaaagatgtgtttagaacctcttgtttaaaaataatagactgcttatcataaaatcacatctcacacatttgaggcagtggtcaaacaggtaaagcctatgatgtgtgtcattttaaagtgtcggaatttagcctctgaataccttctccattgggggaaagatattcttggaaccactcatgacatatcttagaaggtcattgacaatgtataaactaattgttggtttgatatttatgtaaatatcagtttaccatgctttaattttgcacattcgtactatagggagcctattggttctctattagtcttgtgggttttctgtttgaaaaggagtcatggcatctgtttacatttaccttatcaaacctagaatgtgtatatttataaatgtatgtcttcattgctaggtactaatttgcagatgtctttacatatttcaatacagaaactataacattcaatagtgtgctgtcaaagtgtgcttagctcacctggatatacctacattgttaaatgtctaaacagtaatcattaaaacatttttgatta

SEQ ID NO: 451923 - DNA, 2098 bp, Homo sapiens
  misc_feature (1353)..(1353): n is a, c, g, or t
ggccggcgccattgtgacgtcacggtcagcccacgttctgattgtagatagccggcgccttcctcttcccatcgcgcgggtcctagccaccggtgtctccttctacatccgcctctgcgccggctgccacccgcgctccctccgccgccgccgccttgctgctgctcaaagctgctgccgccccttgggctaaaaggttttcaaatggaacattttgatgcatcacttagtacctatttcaaggcattgctaggccctcgagatactagagtaaaaggatggtttcttctggacaattatatacccacatttatctgctctgtcatatatttactaattgtatggctgggaccaaaatacatgaggaataaacagccattctcttgccgggggattttagtggtgtataaccttggactcacactgctgtctctgtatatgttctgtgagttagtaacaggagtatgggaaggcaaatacaacttcttctgtcagggcacacgcaccgcaggagaatcagatatgaagattatccgtgtcctctggtggtactacttctccaaactcatagaatttatggacactttcttcttcatcctgcgcaagaacaaccaccagatcacggtcctgcacgtctaccaccatgcctcgatgctgaacatctggtggtttgtgatgaactgggtcccctgcggccactcttattttggtgccacacttaatagcttcatccacgtcctcatgtactcttactatggtttgtcgtcagtcccttccatgcgtccatacctctggtggaagaagtacatcactcaggggcagctgcttcagtttgtgctgacaatcatccagaccagctgcggggtcatctggccgtgcacattccctcttggttggttgtatttccagattggatacatgatttccctgattgctctcttcacaaacttctacattcaggtaaatctcacccttctctgggacttggaatctggggcctttaccaacaaaggccctcatctatttacttaatgggcatgtggagcccttgctgggtgacaggctctggcctctaatggagtcactatgacaagagcagcccctgcctctggggggctcacagctcactggaagacactagaatcctgttctagagcctgggtgaggaagtcttgggattcccctgggaaatggaaaactgtgcagcaggaccctatgttgcttccctctgacctgcagcagagacgtgagaggtgatttcaatcagaaatctctcagttcactaccctgaacgtcatggccaaatgaaatttcagaagagatttttatcacagtcctcagatatggagatcngcttttttgtcccagctttcttatacattcagtcttcaggtgtgaggattcggttcattcctaagcatatgatgtggtgatgtaggtctttgctcacagaaagatccatttagggcagataatttccagtggagcctgaccacgttgcagccactgctgattctcctgccatgcgtcaccccccagatgacatgtgtcctgcctttgttgccagtgcctggtagccataaggcctgctgatctgggcaaaacacggaggtcaggagcaagggcagaggctgcaagtcccgaggctcagacatttgtcctttcttcttctgtgcccacaagcacctgtgtgtggcatgttgagtttcagtggaagtcatatacttctgggcttcatagtttatggctgcactgtgggacatacaccagctacaaggaaggtgaaaggataggacccgatgaagctgaaatcacatttattctaactacttatagcagcatagcactttgttcatgaaggctgagatagtcgctgaggcagtgaggaacttttgaagacgaacaagggatgtgggtgtcaagagagctgctgccaggtgggaaagaccaatttggccacataacccctgtcatctgccatccagatactaaaaggcaaagcaaagtgtaaattgaattttctatgtgacattttaaatagtatttctgctgcagcctgtgattcagttaacttacctcaggctaagctcaaaaaaaa

SEQ ID NO: 451924 - DNA, 701 bp, Homo sapiens
ggcttatccactgaaaattttccttggataggaaaggacttagcactcaggcctgtgaatcaggaaatacaaagacctccaaaaaaggaccttagaactttttaaggtaaaatcaaatatagctacagcataagagaatcgagaaatttgatagaggtaacttgtttaatgtaaatctaatagtacttgtaatttctttctgcttagaatctaaagatgtgtttagaacctcttgtttaaaaatctatgatgtgtgtcattttaaagtgtcggaatttagcctctgaataccttctccattgggggaaagatattcttggaaccactcatgacatatcttagaaggtcattgacaatgtataaactaattgttggtttgatatttatgtaaatatcagtttaccatgctttaattttgcacattcgtactatagggagcctattggttctctattagtcttgtgggttttctgtttgaaaaggagtcatggcatctgtttacatttaccttatcaaacctagaatgtgtatatttataaatgtatgtcttcattgctaggtactaatttgcagatgtctttacatatttcaatacagaaactataacattcaatagtgtgctgtcaaagtgtgcttagctcacctggatatacctacattgttaaatgtctaaacagtaatcattaaaacatttttgatta

SEQ ID NO: 451925 - DNA, 666 bp, Homo sapiens
ggccggcgccattgtgacgtcacggtcagcccacgttctgattgtagatagccggcgccttcctcttcccatcgcgcgggtcctagccaccggtgtctccttctacatccgcctctgcgccggctgccacccgcgctccctccgccgccgccgccttgctgctgctcaaagctgctgccgccccttgggctaaaaggttttcaaatggaacattttgatgcatcacttagtacctatttcaaggcattgctaggccctcgaggtatcagcagctctgtcctcagaatgggtcccccacttcacacagttgtaggatggctacagcagctccaagcagcacattcagaggaagaagaaaaaatgtttcatttgtgtggttttaagcataaagaagttgtttcccagagctctttgccagctgtcatccctcaaaactcactggccacaattgcttcacatgcccctgcctgaaccagccaccagagggggttaggaccaccacagattgactagatcctaaggattctctacctggggctggagttcgggtcaggtgcccgggaagcactgtgcggtgtgggaggatgaatatgtgccaatttggaaagatgagtatttgtgggaaaatgaataaagcaaagtgtaaatcagaggtttaagttaaaa

SEQ ID NO: 451926 - DNA, 745 bp, Homo sapiens
ggccggcgccattgtgacgtcacggtcagcccacgttctgattgtagatagccggcgccttcctcttcccatcgcgcgggtcctagccaccggtgtctccttctacatccgcctctgcgccggctgccacccgcgctccctccgccgccgccgccttgctgctgctcaaagctgctgccgccccttgggctaaaaggttttcaaatggaacattttgatgcatcacttagtacctatttcaaggcattgctaggccctcgagatactagagtaaaaggatggtttcttctggacaattatatacccacatttatctgctctgtcatatatttactaattgtatggctgggaccaaaatacatgaggaataaacagccattctcttgccgggggattttagtggtgtataaccttggactcacactgctgtctctgtatatgttctgtgagttagtaacaggagtatgggaaggcaaatacaacttcttctgtcagggcacacgcaccgcaggagaatcagatatgaaggcattatcccggtggttcccttcgtgggggtggggggttaaaccttaaaccctttttccctttccccccaaaaaaaaccttttcccaaatttaaaggggaaaaactttctcttaaatttggggggaaaccaaacctttttttttccctttttcctttttccaatccccgtggccggccaagaaacaaaccaccagatcacggtcctgcacgtctacc

SEQ ID NO: 451927 - DNA, 570 bp, Homo sapiens
ggccggcgccattgtgacgtcacggtcagcccacgttctgattgtagatagccggcgccttcctcttcccatcgcgcgggtcctagccaccggtgtctccttctacatccgcctctgcgccggctgccacccgcgctccctccgccgccgccgccttgctgctgctcaaagctgctgccgccccttgggctaaaaggttttcaaatggaacattttgatgcatcacttagtacctatttcaaggcattgctaggccctcgaggtatcagcagctctgtcctcagaatgggtcccccacttcacacagttgtaggatggctacagcagctccaagcagcacattcagaggaagaagaaaaaatgtttcatttgtgtggttttaagcataaagaagttgtttcccagagctctttgccagctgtcatccctcaaaactcactggccacaattgcttcacatgcccgggaagcactgtgcggtgtgggaggatgaatatgtgccaatttggaaagatgagtatttgtgggaaaatgaataaagcaaagtgtaaatcagaggtttaagttaaaa

SEQ ID NO: 451928 - DNA, 2827 bp, Homo sapiens
ggccggcgccattgtgacgtcacggtcagcccacgttctgattgtagatagccggcgccttcctcttcccatcgcgcgggtcctagccaccggtgtctccttctacatccgcctctgcgccggctgccacccgcgctccctccgccgccgccgccttgctgctgctcaaagctgctgccgccccttgggctaaaaggttttcaaatggaacattttgatgcatcacttagtacctatttcaaggcattgctaggccctcgagatactagagtaaaaggatggtttcttctggacaattatatacccacatttatctgctctgtcatatatttactaattgtatggctgggaccaaaatacatgaggaataaacagccattctcttgccgggggattttagtggtgtataaccttggactcacactgctgtctctgtatatgttctgtgagttagtaacaggagtatgggaaggcaaatacaacttcttctgtcagggcacacgcaccgcaggagaatcagatatgaagattatccgtgtcctctggtggtactacttctccaaactcatagaatttatggacactttcttcttcatcctgcgcaagaacaaccaccagatcacggtcctgcacgtctaccaccatgcctcgatgctgaacatctggtggtttgtgatgaactgggtcccctgcggccactcttattttggtgccacacttaatagcttcatccacgtcctcatgtactcttactatggtttgtcgtcagtcccttccatgcgtccatacctctggtggaagaagtacatcactcaggggcagctgcttcagtttgtgctgacaatcatccagaccagctgcggggtcatctggccgtgcacattccctcttggttggttgtatttccagattggatacatgatttccctgattgctctcttcacaaacttctacattcagacctacaacaagaaaggggcctcccgaaggaaagaccacctgaaggaccaccagaatgggtccatggctgctgtgaatggacacaccaacagcttttcacccctggaaaacaatgtgaagccaaggaagctgcggaaggattgaagtcaaagaattgaaaccctccaaaccacgtcatctgattgtaagcacaatatgagttgtgccccaatgctcgttaacagctgctgtaactagtctggcctacaatagtgtgattcatgtaggacttctttcatcaattcaaaacccctagaaaacgtatacagattatataagtagggataagatttctaacatttctgggctctctgacccctgcgctagactgtggaaagggagtattattatagtatacaacactgctgttgccttattagttataacatgataggtgctgaattgtgattcacaatttaaaaacactgtaatccaaacttttttttttaactgtagatcatgcatgtgattgtaaatgtaaatttgtacaatgttgttatggtagagaaacacacatgccttaaaatttaaaaagcagggcccaaagcttattagtttaaattagggtatgtttcaagtttgtattaatttgtaatagctctgtttagaaaaaatcaaagaccatgatttatgaaactaatgtgacataatttccagtgacttgttgatgtgaaatcagacacggcaccttcagttttgtactattggctttgaatcaagcaggctcaaatctagtggaacagtcagtttaactttttaacagatcttatttttttattttgagtgccactattaatgtaaaaaggggggggctctacagcagtcgtgatgaaacttaaatatatattctttgtcctcgagattttaggaagggtgtagggtgagtaggccatttttaatttctgaagtgctaagtgtttttatacagcaaacaaaaagtcaattttgctttccaccagtgcgagagaggatgtatacttttcaagagagatgattgcctatttaccgtttgacagagtcccgtagatgagcaatggggaactggttgccagggtctaaatttggattgatttatgcactgttatctgttttgacacagatttccttgtaaaatgtgcctagtttaccaaaattaacaaagggggggaaaggaccttagaactttttaaggtaaaatcaaatatagctacagcataagagaatcgagaaatttgatagaggtaacttgtttaatgtaaatctaatagtacttgtaatttctttctgcttagaatctaaagatgtgtttagaacctcttgtttaaaaataatagactgcttatcataaaatcacatctcacacatttgaggcagtggtcaaacaggtaaagcctatgatgtgtgtcattttaaagtgtcggaatttagcctctgaataccttctccattgggggaaagatattcttggaaccactcatgacatatcttagaaggtcattgacaatgtataaactaattgttggtttgatatttatgtaaatatcagtttaccatgctttaattttgcacattcgtactatagggagcctattggttctctattagtcttgtgggttttctgtttgaaaaggagtcatggcatctgtttacatttaccttatcaaacctagaatgtgtatatttataaatgtatgtcttcattgctaggtactaatttgcagatgtctttacatatttcaatacagaaactataacattcaatagtgtgctgtcaaagtgtgcttagctcacctggatatacctacattgttaaatgtctaaacagtaatcattaaaacatttttgatta

SEQ ID NO: 451929 - DNA, 2962 bp, Homo sapiens
ggccggcgccattgtgacgtcacggtcagcccacgttctgattgtagatagccggcgccttcctcttcccatcgcgcgggtcctagccaccggtgtctccttctacatccgcctctgcgccggctgccacccgcgctccctccgccgccgccgccttgctgctgctcaaagctgctgccgccccttgggctaaaaggttttcaaatggaacattttgatgcatcacttagtacctatttcaaggcattgctaggccctcgagatactagagtaaaaggatggtttcttctggacaattatatacccacatttatctgctctgtcatatatttactaattgtatggctgggaccaaaatacatgaggaataaacagccattctcttgccgggggattttagtggtgtataaccttggactcacactgctgtctctgtatatgttctgtgagaatgaagtcagtttaattagactccaagatggagagttcaggactggagccaggggaagtgcacaggagtgactcctggccccagcactatgcacatttctgtgttcaagggacaaaaccacagcaagctgtcagttagtaacaggagtatgggaaggcaaatacaacttcttctgtcagggcacacgcaccgcaggagaatcagatatgaagattatccgtgtcctctggtggtactacttctccaaactcatagaatttatggacactttcttcttcatcctgcgcaagaacaaccaccagatcacggtcctgcacgtctaccaccatgcctcgatgctgaacatctggtggtttgtgatgaactgggtcccctgcggccactcttattttggtgccacacttaatagcttcatccacgtcctcatgtactcttactatggtttgtcgtcagtcccttccatgcgtccatacctctggtggaagaagtacatcactcaggggcagctgcttcagtttgtgctgacaatcatccagaccagctgcggggtcatctggccgtgcacattccctcttggttggttgtatttccagattggatacatgatttccctgattgctctcttcacaaacttctacattcagacctacaacaagaaaggggcctcccgaaggaaagaccacctgaaggaccaccagaatgggtccatggctgctgtgaatggacacaccaacagcttttcacccctggaaaacaatgtgaagccaaggaagctgcggaaggattgaagtcaaagaattgaaaccctccaaaccacgtcatctgattgtaagcacaatatgagttgtgccccaatgctcgttaacagctgctgtaactagtctggcctacaatagtgtgattcatgtaggacttctttcatcaattcaaaacccctagaaaacgtatacagattatataagtagggataagatttctaacatttctgggctctctgacccctgcgctagactgtggaaagggagtattattatagtatacaacactgctgttgccttattagttataacatgataggtgctgaattgtgattcacaatttaaaaacactgtaatccaaacttttttttttaactgtagatcatgcatgtgattgtaaatgtaaatttgtacaatgttgttatggtagagaaacacacatgccttaaaatttaaaaagcagggcccaaagcttattagtttaaattagggtatgtttcaagtttgtattaatttgtaatagctctgtttagaaaaaatcaaagaccatgatttatgaaactaatgtgacataatttccagtgacttgttgatgtgaaatcagacacggcaccttcagttttgtactattggctttgaatcaagcaggctcaaatctagtggaacagtcagtttaactttttaacagatcttatttttttattttgagtgccactattaatgtaaaaaggggggggctctacagcagtcgtgatgaaacttaaatatatattctttgtcctcgagattttaggaagggtgtagggtgagtaggccatttttaatttctgaagtgctaagtgtttttatacagcaaacaaaaagtcaattttgctttccaccagtgcgagagaggatgtatacttttcaagagagatgattgcctatttaccgtttgacagagtcccgtagatgagcaatggggaactggttgccagggtctaaatttggattgatttatgcactgttatctgttttgacacagatttccttgtaaaatgtgcctagtttaccaaaattaacaaagggggggaaaggaccttagaactttttaaggtaaaatcaaatatagctacagcataagagaatcgagaaatttgatagaggtaacttgtttaatgtaaatctaatagtacttgtaatttctttctgcttagaatctaaagatgtgtttagaacctcttgtttaaaaataatagactgcttatcataaaatcacatctcacacatttgaggcagtggtcaaacaggtaaagcctatgatgtgtgtcattttaaagtgtcggaatttagcctctgaataccttctccattgggggaaagatattcttggaaccactcatgacatatcttagaaggtcattgacaatgtataaactaattgttggtttgatatttatgtaaatatcagtttaccatgctttaattttgcacattcgtactatagggagcctattggttctctattagtcttgtgggttttctgtttgaaaaggagtcatggcatctgtttacatttaccttatcaaacctagaatgtgtatatttataaatgtatgtcttcattgctaggtactaatttgcagatgtctttacatatttcaatacagaaactataacattcaatagtgtgctgtcaaagtgtgcttagctcacctggatatacctacattgttaaatgtctaaacagtaatcattaaaacatttttgatta

SEQ ID NO: 451930 - DNA, 2153 bp, Homo sapiens
tcggatctagaggacccagcggccgccttattttggtgccacacttaatagcttcatccacgtcctcatgtactcttactatggtttgtcgtcagtcccttccatgcgtccatacctctggtggaagaagtacatcactcaggggcagctgcttcagtttgtgctgacaatcatccagaccagctgcggggtcatctggccgtgcacattccctcttggttggttgtatttccagattggatacatgatttccctgattgctctcttcacaaacttctacattcagacctacaacaagaaaggggcctcccgaaggaaagaccacctgaaggaccaccagaatgggtccatggctgctgtgaatggacacaccaacagcttttcacccctggaaaacaatgtgaagccaaggaagctgcggaaggattgaagtcaaagaattgaaaccctccaaaccacgtcatctgattgtaagcacaatatgagttgtgccccaatgctcgttaacagctgctgtaactagtctggcctacaatagtgtgattcatgtaggacttctttcatcaattcaaaacccctagaaaacgtatacagattatataagtagggataagatttctaacatttctgggctctctgacccctgcgctagactgtggaaagggagtattattatagtatacaacactgctgttgccttattagttataacatgataggtgctgaattgtgattcacaatttaaaaacactgtaatccaaacttttttttttaactgtagatcatgcatgtgattgtaaatgtaaatttgtacaatgttgttatggtagagaaacacacatgccttaaaatttaaaaagcagggcccaaagcttattagtttaaattagggtatgtttcaagtttgtattaatttgtaatagctctgtttagaaaaaatcaaagaccatgatttatgaaactaatgtgacataatttccagtgacttgttgatgtgaaatcagacacggcaccttcagttttgtactattggctttgaatcaagcaggctcaaatctagtggaacagtcagtttaactttttaacagatcttatttttttattttgagtgccactattaatgtaaaaaggggggggctctacagcagtcgtgatgaaacttaaatatatattctttgtcctcgagattttaggaagggtgtagggtgagtaggccatttttaatttctgaagtgctaagtgtttttatacagcaaacaaaaagtcaattttgctttccaccagtgcgagagaggatgtatacttttcaagagagatgattgcctatttaccgtttgacagagtcccgtagatgagcaatggggaactggttgccagggtctaaatttggattgatttatgcactgttatctgttttgacacagatttccttgtaaaatgtgcctagtttaccaaaattaacaaagggggggaaaggaccttagaactttttaaggtaaaatcaaatatagctacagcataagagaatcgagaaatttgatagaggtaacttgtttaatgtaaatctaatagtacttgtaatttctttctgcttagaatctaaagatgtgtttagaacctcttgtttaaaaataatagactgcttatcataaaatcacatctcacacatttgaggcagtggtcaaacaggtaaagcctatgatgtgtgtcattttaaagtgtcggaatttagcctctgaataccttctccattgggggaaagatattcttggaaccactcatgacatatcttagaaggtcattgacaatgtataaactaattgttggtttgatatttatgtaaatatcagtttaccatgctttaattttgcacattcgtactatagggagcctattggttctctattagtcttgtgggttttctgtttgaaaaggagtcatggcatctgtttacatttaccttatcaaacctagaatgtgtatatttataaatgtatgtcttcattgctaggtactaatttgcagatgtctttacatatttcaatacagaaactataacattcaatagtgtgctgtcaaagtgtgcttagctcacctggatatacctacattgttaaatgtctaaacagtaatcattaaaacatttttgatta

SEQ ID NO: 451931 - DNA, 3018 bp, Homo sapiens
ggccggcgccattgtgacgtcacggtcagcccacgttctgattgtagatagccggcgccttcctcttcccatcgcgcgggtcctagccaccggtgtctccttctacatccgcctctgcgccggctgccacccgcgctccctccgccgccgccgccttgctgctgctcaaagctgctgccgccccttgggctaaaaggttttcaaatggaacattttgatgcatcacttagtacctatttcaaggcattgctaggccctcgagatactagagtaaaaggatggtttcttctggacaattatatacccacatttatctgctctgtcatatatttactaattgtatggctgggaccaaaatacatgaggaataaacagccattctcttgccgggggattttagtggtgtataaccttggactcacactgctgtctctgtatatgttctgtgagttagtaacaggagtatgggaaggcaaatacaacttcttctgtcagggcacacgcaccgcaggagaatcagatatgaagattatccgtgtcctctggtggtactacttctccaaactcatagaatttatggacactttcttcttcatcctgcgcaagaacaaccaccagatcacggtcctgcacgtctaccaccatgcctcgatgctgaacatctggtggtttgtgatgaactgggtcccctgcggccactcttattttggtgccacacttaatagcttcatccacgtcctcatgtactcttactatggtttgtcgtcagtcccttccatgcgtccatacctctggtggaagaagtacatcactcaggggcagctgcttcagtttgtgctgacaatcatccagaccagctgcggggtcatctggccgtgcacattccctcttggttggttgtatttccagattggatacatgatttccctgattgctctcttcacaaacttctacattcagacctacaacaagaaaggggcctcccgaaggaaagaccacctgaaggaccaccagaatgggtccatggctgctgtgaatggacacaccaacagcttttcacccctggaaaacaatgtgaagccaaggaagctgcggaaggattgaagtcaaagaattgaaaccctccaaaccacgtcatctgattgtaagcacaatatgagttgtgccccaatgctcgttaacagctgctgtaactagtctggcctacaatagtgtgattcatgtaggacttctttcatcaattcaaaacccctagaaaacgtatacagattatataagtagggataagatttctaacatttctgggctctctgacccctgcgctagactgtggaaagggagtattattatagtatacaacactgctgttgccttattagttataacatgataggtgctgaattgtgattcacaatttaaaaacactgtaatccaaacttttttttttaactgtagatcatgcatgtgattgtaaatgtaaatttgtacaatgttgttatggtagagaaacacacatgccttaaaatttaaaaagcagggcccaaagcttattagtttaaattagggtatgtttcaagtttgtattaatttgtaatagctctgtttagaaaaaatcaaagaccatgatttatgaaactaatgtgacataatttccagtgacttgttgatgtgaaatcagacacggcaccttcagttttgtactattggctttgaatcaagcaggctcaaatctagtggaacagtcagtttaactttttaacagatcttatttttttattttgagtgccactattaatgtaaaaaggggggggctctacagcagtcgtgatgaaacttaaatatatattctttgtcctcgagattttaggaagggtgtagggtgagtaggccatttttaatttctgaagtgctaagtgtttttatacagcaaacaaaaagtcaattttgctttccaccagtgcgagagaggatgtatacttttcaagagagatgattgcctatttaccgtttgacagagtcccgtagatgagcaatggggaactggttgccagggtctaaatttggattgatttatgcactgttatctgttttgacacagatttccttgtaaaatgtgcctagtttaccaaaattaacaaagggggggaaaggaccttagaactttttaaggtaaaatcaaatatagctacagcataagagaatcgagaaatttgatagaggtaacttgtttaatgtaaatctaatagtacttgtaatttctttctgcttagaatctaaagatgtgtttagaacctcttgtttaaaaataatagactgcttatcataaaatcacatctcacacatttgaggcagtggtcaaacaggtaaagcctatgatgtgtgtcattttaaagtgtcggaatttagcctctgaataccttctccattgggggaaagatattcttggaaccactcatgacatatcttagaaggtcattgacaatgtataaactaattgttggtttgatatttatgtaaatatcagtttaccatgctttaattttgcacattcgtactatagggagcctattggttctctattagtcttgtgggttttctgtttgaaaaggagtcatggcatctgtttacatttaccttatcaaacctagaatgtgtatatttataaatgtatgtcttcattgctaggtactaatttgcagatgtctttacatatttcaatacagaaactataacattcaatagtgtgctgtcaaagtgtgcttagctcacctggatatacctacattgttaaatgtctaaacagtaatcattaaaacatttttgattaaaaaaaaaacaaacaaaaaaaatgtttgggcgcgccgggcccgaaaaagtttaaaactctgtttggcgcgggcccaggttagcgaaaggccacgcgttcaaacaccggccaacatggtggttccccaaaaaccgcggccggtcttgacccaggtgggcttgggctatcaagcaggacatacacccgggact

SEQ ID NO: 451932 - DNA, 1444 bp, Homo sapiens
ggccggcgccattgtgacgtcacggtcagcccacgttctgattgtagatagccggcgccttcctcttcccatcgcgcgggtcctagccaccggtgtctccttctacatccgcctctgcgccggctgccacccgcgctccctccgccgccgccgccttgctgctgctcaaagctgctgccgccccttgggctaaaaggttttcaaatggaacattttgatgcatcacttagtacctatttcaaggcattgctaggccctcgagatactagagtaaaaggatggtttcttctggacaattatatacccacatttatctgctctgtcatatatttactaattgtatggctgggaccaaaatacatgaggaataaacagccattctcttgccgggggattttagtggtgtataaccttggactcacactgctgtctctgtatatgttctgtgagttagtaacaggagtatgggaaggcaaatacaacttcttctgtcagggcacacgcaccgcaggagaatcagatatgaagattatccgtgtcctctggtggtactacttctccaaactcatagaatttatggacactttcttcttcatcctgcgcaagaacaaccaccagatcacggtcctgcacgtctaccaccatgcctcgatgctgaacatctggtggtttgtgatgaactgggtcccctgcggccactcttattttggtgccacacttaatagcttcatccacgtcctcatgtactcttactatggtttgtcgtcagtcccttccatgcgtccatacctctggtggaagaagtacatcactcaggggcagctgcttcagtttgtgctgacaatcatccagaccagctgcggggtcatctggccgtgcacattccctcttggttggttgtatttccagattggatacatgatttccctgattgctctcttcacaaacttctacattcagacctacaacaagaaaggggcctcccgaaggaaagaccacctgaaggaccaccagaatgggtccatggctgctgtgaatggacacaccaacagcttttcacccctggaaaacaatgtgaagccaaggaagctgcggaaggattgaagtcaaagaattgaaaccctccaaaccacgtcatctgattgtaagacattgacataaagtagaacttgcttccaatacgtcttaaaggttaaatgttacacacagcgtacagtcaatgcaaggaggcctgcacacagggaacttctgtctaggactgcggccggtaagaccttcctgtgtggaccacagcactgctcaggaaagctgcctgcaggtgaataagtgaatgtgaaattaagcgagactctctgcaaccgtattcactatatcacactttcatttggcctcttttgcattatttcctaatgtttggagaatacatttgagaaagaatgttaca

SEQ ID NO: 451933 - DNA, 2044 bp, Homo sapiens
  misc_feature (1353)..(1353): n is a, c, g, or t
ggccggcgccattgtgacgtcacggtcagcccacgttctgattgtagatagccggcgccttcctcttcccatcgcgcgggtcctagccaccggtgtctccttctacatccgcctctgcgccggctgccacccgcgctccctccgccgccgccgccttgctgctgctcaaagctgctgccgccccttgggctaaaaggttttcaaatggaacattttgatgcatcacttagtacctatttcaaggcattgctaggccctcgagatactagagtaaaaggatggtttcttctggacaattatatacccacatttatctgctctgtcatatatttactaattgtatggctgggaccaaaatacatgaggaataaacagccattctcttgccgggggattttagtggtgtataaccttggactcacactgctgtctctgtatatgttctgtgagttagtaacaggagtatgggaaggcaaatacaacttcttctgtcagggcacacgcaccgcaggagaatcagatatgaagattatccgtgtcctctggtggtactacttctccaaactcatagaatttatggacactttcttcttcatcctgcgcaagaacaaccaccagatcacggtcctgcacgtctaccaccatgcctcgatgctgaacatctggtggtttgtgatgaactgggtcccctgcggccactcttattttggtgccacacttaatagcttcatccacgtcctcatgtactcttactatggtttgtcgtcagtcccttccatgcgtccatacctctggtggaagaagtacatcactcaggggcagctgcttcagtttgtgctgacaatcatccagaccagctgcggggtcatctggccgtgcacattccctcttggttggttgtatttccagattggatacatgatttccctgattgctctcttcacaaacttctacattcaggtaaatctcacccttctctgggacttggaatctggggcctttaccaacaaaggccctcatctatttacttaatgggcatgtggagcccttgctgggtgacaggctctggcctctaatggagtcactatgacaagagcagcccctgcctctggggggctcacagctcactggaagacactagaatcctgttctagagcctgggtgaggaagtcttgggattcccctgggaaatggaaaactgtgcagcaggaccctatgttgcttccctctgacctgcagcagagacgtgagaggtgatttcaatcagaaatctctcagttcactaccctgaacgtcatggccaaatgaaatttcagaagagatttttatcacagtcctcagatatggagatcngcttttttgtcccagctttcttatacattcagtcttcaggtgtgaggattcggttcattcctaagcatatgatgtggtgatgtaggtctttgctcacagaaagatccatttagggcagataatttccagtggagcctgaccacgttgcagccactgctgattctcctgccatgcgtcaccccccagatgacatgtgtcctgcctttgttgccagtgcctggtagccataaggcctgctgatctgggctttgtcctttcttcttctgtgcccacaagcacctgtgtgtggcatgttgagtttcagtggaagtcatatacttctgggcttcatagtttatggctgcactgtgggacatacaccagctacaaggaaggtgaaaggataggacccgatgaagctgaaatcacatttattctaactacttatagcagcatagcactttgttcatgaaggctgagatagtcgctgaggcagtgaggaacttttgaagacgaacaagggatgtgggtgtcaagagagctgctgccaggtgggaaagaccaatttggccacataacccctgtcatctgccatccagatactaaaaggcaaagcaaagtgtaaattgaattttctatgtgacattttaaatagtatttctgctgcagcctgtgattcagttaacttacctcaggctaagctcaaaaaaaa

SEQ ID NO: 451934 - DNA, 364 bp, Homo sapiens
  misc_feature (20)..(20): n is a, c, g, or t
gactctagagcatccctttnatgtcactgctatcatcattaacagcgtaattatacaagcatatttaatgctgagtttaatttaatatgtaatacatatggtaattgtagggtaatacccacaacaactgtagtttcttacttggccaagagaatgcttatttaagtgttagacttccattctggcaaaatcttgcccaaatctgtgtttgctttctgcttgctacatttgtctcccttacttttcttgagctaaagacaggctttttccaccggcatcatcactgctatcatcattaacagcgtaattatacaagcatatttaatgctgattgcagtgatggtcatgcacaaggatccgtaga

SEQ ID NO: 451935 - DNA, 500 bp, Homo sapiens
ggggtaatacatatggtaattgtattacatattaaattaaactcagcatttaatatgtaatacatatggtaattgtagggtaatacccacaacaactgtagtttcttacttggccaagagaatgcttatttaagtgttagacttccattctggcaaaatcttgccatcttgccttatcagaagacattggaaagagggattccctttggtgtttggtcttctacttagaaaaacctattgcagttagtttatcttgtagtattcatctttgtattctgaagataaggtttgaattaaattgatacacacagaggggaaccgattttttttatccaatgtgaattataaatgagataatccacagttattcattgtggagttgttgagactatgaaagactcattgtctttgtattcagctcttaaatagtgtaactatatccccacctctgcttgctttctttccctcccctccaatgataaagaaaatgataaattttc

SEQ ID NO: 451936 - DNA, 2499 bp, Homo sapiens
accgttgggtgggaggagccagcggccggggaggttctagtctgttctgtcttgcggcagccgcccccttctgcgcggtcacgccgagccagcgcctgggcctggaaccgggccgtagcccccccagtttcgcccaccacctccctaccatggacccccgcaaagtgaacgagcttcgggcctttgtgaaaatgtgtaagcaggatccgagcgttctgcacaccgaggaaatgcgcttcctgagggagtgggtggagagcatgggtggtaaagtaccacctgctactcagaaagctaaatcagaagaaaataccaaggaagaaaaacctgatagtaagaaggtggaggaagacttaaaggcagacgaaccatcaagtgaggaaagtgatctagaaattgataaagaaggtgtgattgaaccagacactgatgctcctcaagaaatgggagatgaaaatgcggagataacggaggagatgatggatcaggcaaatgataaaaaagtggctgctattgaagccctaaatgatggtgaactccagaaagccattgacttattcacagatgccatcaagctgaatcctcgcttggccattttgtatgccaagagggccagtgtcttcgtcaaattacagaagccaaatgctgccatccgagactgtgacagagccattgaaataaatcctgattcagctcagccttacaagtggcgggggaaagcacacagacttctaggccactgggaagaagcagcccatgatcttgcccttgcctgtaaattggattatgatgaagatgctagtgcaatgctgaaagaagttcaacctagggcacagaaaattgcagaacatcggagaaagtatgagcgaaaacgtgaagagcgagagatcaaagaaagaatagaacgagttaagaaggctcgagaagagcatgagagagcccagagggaggaagaagccagacgacagtcaggagctcagtatggctcttttccaggtggctttcctgggggaatgcctggtaattttcccggaggaatgcctggaatgggagggggcatgcctggaatggctggaatgcctggactcaatgaaattcttagtgatccagaggttcttgcagccatgcaggatccagaagttatggtggctttccaggatgtggctcagaacccagcaaatatgtcaaaataccagagcaacccaaaggttatgaatctcatcagtaaattgtcagccaaatttggaggtcaagcgtaatgtccttctgataaataaagcccttgctgaaggaaaagcaacctagatcaccttatggatgtcgcaataatacaaaccagtgtacctctgaccttctcatcaagagagctggggtgctttgaagataatccctacccctctcccccaaatgcagctgaagcattttacagtggtttgccattagggtattcattcagataatgttttcctactaggaattacaaactttaaacactttttaaatcttcaaaatatttaaaacaaatttaaagggcctgttaattcttatatttttctttactaatcattttggatttttttctttgaattattggcagggaatatacttatgtatggaagattactgctctgagtgaaataaaagttattagtgcgaggcaaacataactcatttgaggataaagtttgtgttggatatgtggttcctgatgcattttgacttgtctttttaaatgctttatctttttctttaaagatttatttcaataaaactaattgggaccacccgtatttcagtaggacctgggtagggattggaagtacttggcagggcagcagcaatcttgctgtgtttgatataacatgcatccttgggcaggttgcccttaaatcttacactgtggtgaagggatgttttttttgtaatgctgcagtagagttggagtacttagttctcttgttgtccagtatatctaataagtgtttttcatattatttccacgtaagggaaataaggtagtacttttctttttatatttctatgcttaaaattctctttcctagtcaaaaattgcccaaatctgtgtttgctttctgcttgctacatttgtctcccttacttttcttgagctaaagacaggctttttccaccggcatcatcactgctatcatcattaacagcgtaattatacaagcatatttaatgctgagtttaatttaatatgtaatacatatggtaattgtagggtaatacccacaacaactgtagtttcttacttggccaagagaatgcttatttaagtgttagacttccattctggcaaaatcttgcccaaatctgtgtttgctttctgcttgctacatttgtctcccttacttttcttgagctaaagacaggctttttccaccggcatcatcactgctatcatcattaacagcgtaattatacaagcatatttaatgctgattgcagtgatggtcatgcacaaggatccgtaga

SEQ ID NO: 451937 - DNA, 3269 bp, Homo sapiens
accgttgggtgggaggagccagcggccggggaggttctagtctgttctgtcttgcggcagccgcccccttctgcgcggtcacgccgagccagcgcctgggcctggaaccgggccgtagcccccccagtttcgcccaccacctccctaccatggacccccgcaaagtgaacgagcttcgggcctttgtgaaaatgtgtaagcaggatccgagcgttctgcacaccgaggaaatgcgcttcctgagggagtgggtggagagcatgggtggtaaagtaccacctgctactcagaaagctaaatcagaagaaaataccaaggaagaaaaacctgatagtaagaaggtggaggaagacttaaaggcagacgaaccatcaagtgaggaaagtgatctagaaattgataaagaaggtgtgattgaaccagacactgatgctcctcaagaaatgggagatgaaaatgcggagataacggaggagatgatggatcaggcaaatgataaaaaagtggctgctattgaagccctaaatgatggtgaactccagaaagccattgacttattcacagatgccatcaagctgaatcctcgcttggccattttgtatgccaagagggccagtgtcttcgtcaaattacagaagccaaatgctgccatccgagactgtgacagagccattgaaataaatcctgattcagctcagccttacaagtggcgggggaaagcacacagacttctaggccactgggaagaagcagcccatgatcttgcccttgcctgtaaattggattatgatgaagatgctagtgcaatgctgaaagaagttcaacctagggcacagaaaattgcagaacatcggagaaagtatgagcgaaaacgtgaagagcgagagatcaaagaaagaatagaacgagttaagaaggctcgagaagagcatgagagagcccagagggaggaagaagccagacgacagtcaggagctcagtatggctcttttccaggtggctttcctgggggaatgcctggtaattttcccggaggaatgcctggaatgggagggggcatgcctggaatggctggaatgcctggactcaatgaaattcttagtgatccagaggttcttgcagccatgcaggatccagaagttatggtggctttccaggatgtggctcagaacccagcaaatatgtcaaaataccagagcaacccaaaggttatgaatctcatcagtaaattgtcagccaaatttggaggtcaagcgtaatgtccttctgataaataaagcccttgctgaaggaaaagcaacctagatcaccttatggatgtcgcaataatacaaaccagtgtacctctgaccttctcatcaagagagctggggtgctttgaagataatccctacccctctcccccaaatgcagctgaagcattttacagtggtttgccattagggtattcattcagataatgttttcctactaggaattacaaactttaaacactttttaaatcttcaaaatatttaaaacaaatttaaagggcctgttaattcttatatttttctttactaatcattttggatttttttctttgaattattggcagggaatatacttatgtatggaagattactgctctgagtgaaataaaagttattagtgcgaggcaaacataactcatttgaggataaagtttgtgttggatatgtggttcctgatgcattttgacttgtctttttaaatgctttatctttttctttaaagatttatttcaataaaactaattgggaccacccgtatttcagtaggacctgggtagggattggaagtacttggcagggcagcagcaatcttgctgtgtttgatataacatgcatccttgggcaggttgcccttaaatcttacactgtggtgaagggatgttttttttgtaatgctgcagtagagttggagtacttagttctcttgttgtccagtatatctaataagtgtttttcatattatttccacgtaagggaaataaggtagtacttttctttttatatttctatgcttaaaattctctttcctagtcaaaaattgcccaaatctgtgtttgctttctgcttgctacatttgtctcccttacttttcttgagctaaagacaggctttttccaccggcatcatcactgctatcatcattaacagcgtaattatacaagcatatttaatgctgagtttaatttaatatgtaatacatatggtaattgtagggtaatacccacaacaactgtagtttcttacttggccaagagaatgcttatttaagtgttagacttccattctggcaaaatcttgccatcttgccttatcagaagacattggaaagagggattccctttggtgtttggtcttctacttagaaaaacctattgcagttagtttatcttgtagtattcatctttgtattctgaagataaggtttgaattaaattgatacacacagaggggaaccgattttttttatccaatgtgaattataaatgagataatccacagttattcattgtggagttgttgagactatgaaagactcattgtctttgtattcagctcttaaatagtgtaactatatccccacctctgcttgctttctttccctcccctccaatgataaagaaaatgataaattttctgttgtgcattcaattcttattttaaataagactaagtataggcattgtacctgacattgctacgtttctaccagtgtttcaatttaaagtgctagtgtttaaaaacattttcaagggataaggccttctgtactttgcttatttgaagaatcagtggtaggagcagtgaagtaaattctatggagtacatttctaaaataccacatttctgaaatcataaataagtttattcaggttctaaccctttgctgtacacaagcagacagaaatgcatctgttacataaatgagaaaaagctattatgctgatggagcatgctttttaaatcctttaaaaacactcaccatataaacttgcatttgagcttgtgtgttcttttgttaatgtgtagagttctcctttctcgaaattgccagtgtgtacttggcttaactcaagaacagtttcttctggattccttatttgatttatttaacctaattatattctaatattgcaaatattaccataagtgggtaaaagtaaaattcctcttctgaaaatgtgtcctgtgcttttagatttttaaattccataatatacattcttaattttcaactca

SEQ ID NO: 451938 - DNA, 2667 bp, Homo sapiens
accgttgggtgggaggagccagcggccggggaggttctagtctgttctgtcttgcggcagccgcccccttctgcgcggtcacgccgagccagcgcctgggcctggaaccgggccgtagcccccccagtttcgcccaccacctccctaccatggacccccgcaaagtgaacgagcttcgggcctttgtgaaaatgtgtaagcaggatccgagcgttctgcacaccgaggaaatgcgcttcctgagggagtgggtggagagcatgggtggtaaagtaccacctgctactcagaaagctaaatcagaagaaaataccaaggaagaaaaacctgatagtaagaaggtggaggaagacttaaaggcagacgaaccatcaagtgaggaaagtgatctagaaattgataaagaaggtgtgattgaaccagacactgatgctcctcaagaaatgggagatgaaaatgcggagataacggaggagatgatggatcaggcaaatgataaaaaagtggctgctattgaagccctaaatgatggtgaactccagaaagccattgacttattcacagatgccatcaagctgaatcctcgcttggccattttgtatgccaagagggccagtgtcttcgtcaaattacagaagccaaatgctgccatccgagactgtgacagagccattgaaataaatcctgattcagctcagccttacaagtggcgggggaaagcacacagacttctaggccactgggaagaagcagcccatgatcttgcccttgcctgtaaattggattatgatgaagatgctagtgcaatgctgaaagaagttcaacctagggcacagaaaattgcagaacatcggagaaagtatgagcgaaaacgtgaagagcgagagatcaaagaaagaatagaacgagttaagaaggctcgagaagagcatgagagagcccagagggaggaagaagccagacgacagtcaggagctcagtatggctcttttccaggtggctttcctgggggaatgcctggtaattttcccggaggaatgcctggaatgggagggggcatgcctggaatggctggaatgcctggactcaatgaaattcttagtgatccagaggttcttgcagccatgcaggatccagaagttatggtggctttccaggatgtggctcagaacccagcaaatatgtcaaaataccagagcaacccaaaggttatgaatctcatcagtaaattgtcagccaaatttggaggtcaagcgtaatgtccttctgataaataaagcccttgctgaaggaaaagcaacctagatcaccttatggatgtcgcaataatacaaaccagtgtacctctgaccttctcatcaagagagctggggtgctttgaagataatccctacccctctcccccaaatgcagctgaagcattttacagtggtttgccattagggtattcattcagataatgttttcctactaggaattacaaactttaaacactttttaaatcttcaaaatatttaaaacaaatttaaagggcctgttaattcttatatttttctttactaatcattttggatttttttctttgaattattggcagggaatatacttatgtatggaagattactgctctgagtgaaataaaagttattagtgcgaggcaaacataactcatttgaggataaagtttgtgttggatatgtggttcctgatgcattttgacttgtctttttaaatgctttatctttttctttaaagatttatttcaataaaactaattgggaccacccgtatttcagtaggacctgggtagggattggaagtacttggcagggcagcagcaatcttgctgtgtttgatataacatgcatccttgggcaggttgcccttaaatcttacactgtggtgaagggatgttttttttgtaatgctgcagtagagttggagtacttagttctcttgttgtccagtatatctaataagtgtttttcatattatttccacgtaagggaaataaggtagtacttttctttttatatttctatgcttaaaattctctttcctagtcaaaaattgcccaaatctgtgtttgctttctgcttgctacatttgtctcccttacttttcttgagctaaagacaggctttttccaccggcatcatcactgctatcatcattaacagcgtaattatacaagcatatttaatgctgagtttaatttaatatgtaatacatatggtaattgtagggtaatacccacaacaactgtagtttcttacttggccaagagaatgcttatttaagtgttagacttccattctggcaaaatcttgccatcttgccttatcagaagacattggaaagagggattccctttggtgtttggtcttctacttagaaaaacctattgcagttagtttatcttgtagtattcatctttgtattctgaagataaggtttgaattaaattgatacacacagaggggaaccgattttttttatccaatgtgaattataaatgagataatccacagttattcattgtggagttgttgagactatgaaagactcattgtctttgtattcagctcttaaatagtgtaactatatccccacctctgcttgctttctttccctcccctccaatgataaagaaaatgataaattttc

SEQ ID NO: 451939 - DNA, 2409 bp, Homo sapiens
accgttgggtgggaggagccagcggccggggaggttctagtctgttctgtcttgcggcagccgcccccttctgcgcggtcacgccgagccagcgcctgggcctggaaccgggccgtagcccccccagtttcgcccaccacctccctaccatggacccccgcaaagtgaacgagcttcgggcctttgtgaaaatgtgtaagcaggatccgagcgttctgcacaccgaggaagaaaaacctgatagtaagaaggtggaggaagacttaaaggcagacgaaccatcaagtgaggaaagtgatctagaaattgataaagaaggtgtgattgaaccagacactgatgctcctcaagaaatgggagatgaaaatgcggagataacggaggagatgatggatcaggcaaatgataaaaaagtggctgctattgaagccctaaatgatggtgaactccagaaagccattgacttattcacagatgccatcaagctgaatcctcgcttggccattttgtatgccaagagggccagtgtcttcgtcaaattacagaagccaaatgctgccatccgagactgtgacagagccattgaaataaatcctgattcagctcagccttacaagtggcgggggaaagcacacagacttctaggccactgggaagaagcagcccatgatcttgcccttgcctgtaaattggattatgatgaagatgctagtgcaatgctgaaagaagttcaacctagggcacagaaaattgcagaacatcggagaaagtatgagcgaaaacgtgaagagcgagagatcaaagaaagaatagaacgagttaagaaggctcgagaagagcatgagagagcccagagggaggaagaagccagacgacagtcaggagctcagtatggctcttttccaggtggctttcctgggggaatgcctggtaattttcccggaggaatgcctggaatgggagggggcatgcctggaatggctggaatgcctggactcaatgaaattcttagtgatccagaggttcttgcagccatgcaggatccagaagttatggtggctttccaggatgtggctcagaacccagcaaatatgtcaaaataccagagcaacccaaaggttatgaatctcatcagtaaattgtcagccaaatttggaggtcaagcgtaatgtccttctgataaataaagcccttgctgaaggaaaagcaacctagatcaccttatggatgtcgcaataatacaaaccagtgtacctctgaccttctcatcaagagagctggggtgctttgaagataatccctacccctctcccccaaatgcagctgaagcattttacagtggtttgccattagggtattcattcagataatgttttcctactaggaattacaaactttaaacactttttaaatcttcaaaatatttaaaacaaatttaaagggcctgttaattcttatatttttctttactaatcattttggatttttttctttgaattattggcagggaatatacttatgtatggaagattactgctctgagtgaaataaaagttattagtgcgaggcaaacataactcatttgaggataaagtttgtgttggatatgtggttcctgatgcattttgacttgtctttttaaatgctttatctttttctttaaagatttatttcaataaaactaattgggaccacccgtatttcagtaggacctgggtagggattggaagtacttggcagggcagcagcaatcttgctgtgtttgatataacatgcatccttgggcaggttgcccttaaatcttacactgtggtgaagggatgttttttttgtaatgctgcagtagagttggagtacttagttctcttgttgtccagtatatctaataagtgtttttcatattatttccacgtaagggaaataaggtagtacttttctttttatatttctatgcttaaaattctctttcctagtcaaaaattgcccaaatctgtgtttgctttctgcttgctacatttgtctcccttacttttcttgagctaaagacaggctttttccaccggcatcatcactgctatcatcattaacagcgtaattatacaagcatatttaatgctgagtttaatttaatatgtaatacatatggtaattgtagggtaatacccacaacaactgtagtttcttacttggccaagagaatgcttatttaagtgttagacttccattctggcaaaatcttgcccaaatctgtgtttgctttctgcttgctacatttgtctcccttacttttcttgagctaaagacaggctttttccaccggcatcatcactgctatcatcattaacagcgtaattatacaagcatatttaatgctgattgcagtgatggtcatgcacaaggatccgtaga

SEQ ID NO: 451940 - DNA, 3164 bp, Homo sapiens
accgttgggtgggaggagccagcggccggggaggttctagtctgttctgtcttgcggcagccgcccccttctgcgcggtcacgccgagccagcgcctgggcctggaaccgggccgtagcccccccagtttcgcccaccacctccctaccatggacccccgcaaagtgaacgagcttcgggcctttgtgaaaatgtgtaagcaggatccgagcgttctgcacaccgaggaaatgcgcttcctgagggagtgggtggagagcatgggtggtaaagtaccacctgctactcagaaagctaaatcagaagaaaataccaaggaagaaaaacctgatagtaagaaggtggaggaagacttaaaggcagacgaaccatcaagtgaggaaagtgatctagaaattgataaagaaggtgtgattgaaccagacactgatgctcctcaagaaatgggagatgaaaatgcggagataacggaggagatgatggatcaggcaaatgataaaaaagtggctgctattgaagccctaaatgatggtgaactccagaaagccattgacttattcacagatgccatcaagctgaatcctcgcttggccattttgtatgccaagagggccagtgtcttcgtcaaattacagaagccaaatgctgccatccgagactgtgacagagccattgaaataaatcctgattcagctcagccttacaagtggcgggggaaagcacacagacttctaggccactgggaagaagcagcccatgatcttgcccttgcctgtaaattggattatgatgaagatgctagtgcaatgctgaaagaagttcaacctagggcacagaaaattgcagaacatcggagaaagtatgagcgaaaacgtgaagagcgagagatcaaagaaagaatagaacgagttaagaaggctcgagaagagcatgagagagcccagagggaggaagaagccagacgacagtcaggagctcagtatggctcttttccaggtggctttcctgggggaatgcctggtaattttcccggaggaatgcctggaatgggagggggcatgcctggaatggctggaatgcctggactcaatgaaattcttagtgatccagaggttcttgcagccatgcaggatccagaagttatggtggctttccaggatgtggctcagaacccagcaaatatgtcaaaataccagagcaacccaaaggttatgaatctcatcagtaaattgtcagccaaatttggaggtcaagcgtaatgtccttctgataaataaagcccttgctgaaggaaaagcaacctagatcaccttatggatgtcgcaataatacaaaccagtgtacctctgaccttctcatcaagagagctggggtgctttgaagataatccctacccctctcccccaaatgcagctgaagcattttacagtggtttgccattagggtattcattcagataatgttttcctactaggaattacaaactttaaacactttttaaatcttcaaaatatttaaaacaaatttaaagggcctgttaattcttatatttttctttactaatcattttggatttttttctttgaattattggcagggaatatacttatgtatggaagattactgctctgagtgaaataaaagttattagtgcgaggcaaacataactcatttgaggataaagtttgtgttggatatgtggttcctgatgcattttgacttgtctttttaaatgctttatctttttctttaaagatttatttcaataaaactaattgggaccacccgtatttcagtaggacctgggtagggattggaagtacttggcagggcagcagcaatcttgctgtgtttgatataacatgcatccttgggcaggttgcccttaaatcttacactgtggtgaagggatgttttttttgtaatgctgcagtagagttggagtacttagttctcttgttgtccagtatatctaataagtgtttttcatattatttccacgtaagggaaataaggtagtacttttctttttatatttctatgcttaaaattctctttcctagtcaaaaattgcccaaatctgtgtttgctttctgcttgctacatttgtctcccttacttttcttgagctaaagacaggctttttccaccggcatcatcactgctatcatcattaacagcgtaattatacaagcatatttaatgctgagtttaatttaatatgtaatacatatggtaattgtagggtaatacccacaacaactgtagtttcttacttggccaagagaatgcttatttaagtgttagacttccattctggcaaaatcttgccatcttgccttatcagaagacattggaaagagggattccctttggtgtttggtcttctacttagaaaaacctattgcagttagtttatcttgtagtattcatctttgtattctgaagataaggtttgaattaaattgatacacacagaggggaaccgattttttttatccaatgtgaattataaatgagataatccacagttattcattgtggagttgttgagactatgaaagactcattgtctttgtattcagctcttaaatagtgtaactatatccccacctctgcttgctttctttccctcccctccaatgataaagaaaatgataaattttctgttgtgcattcaattcttattttaaataagactaagtataggcattgtacctgacattgctacgtttctaccagtgtttcaatttaaagtgctagtgtttaaaaacattttcaagggataaggccttctgtactttgcttatttgaagaatcagtggtattctgaaatcataaataagtttattcaggttctaaccctttgctgtacacaagcagacagaaatgcatctgttacataaatgagaaaaagctattatgctgatggagcatgctttttaaatcctttaaaaacactcaccatataaacttgcatttgagcttgtgtgttcttttgttaatgtgtagagttctcctttctcgaaattgccagtgtgtacttggcttaactcaagaacagtttcttctggattccttatttgatttatttaacctaattatattctaatattgcaaatattaccataagtgggtaaaagtaaaattcctcttctgaaaat

SEQ ID NO: 451941 - DNA, 2374 bp, Homo sapiens
accgttgggtgggaggagccagcggccggggaggttctagtctgttctgtcttgcggcagccgcccccttctgcgcggtcacgccgagccagcgcctgggcctggaaccgggccgtagcccccccagtttcgcccaccacctccctaccatggacccccgcaaagtgaacgagcttcgggcctttgtgaaaatgtgtaagcaggatccgagcgttctgcacaccgaggaaatgcgcttcctgagggagtgggtggagagcatgggtggtaaagtaccacctgctactcagaaagctaaatcagaagaaaataccaaggaagaaaaacctgatagtaagaaggtggaggaagacttaaaggcagacgaaccatcaagtgaggaaagtgatctagaaattgataaagaaggtgtgattgaaccagacactgatgctcctcaagaaatgggagatgaaaatgcggagataacggaggagatgatggatcaggcaaatgataaaaaagtggctgctattgaagccctaaatgatggtgaactccagaaagccattgacttattcacagatgccatcaagctgaatcctcgcttggccattttgtatgccaagagggccagtgtcttcgtcaaattacagaagccaaatgctgccatccgagactgtgacagagccattgaaataaatcctgattcagctcagccttacaagtggcgggggaaagcacacagacttctaggccactgggaagaagcagcccatgatcttgcccttgcctgtaaattggattatgatgaagatgctagtgcaatgctgaaagaagttcaacctagggcacagaaaattgcagaacatcggagaaagtatgagcgaaaacgtgaagagcgagagatcaaagaaagaatagaacgagttaagaaggctcgagaagagcatgagagagcccagagggaggaagaagccagacgacagtcaggagctcagtatggctcttttccaggtggctttcctgggggaatgcctggtaattttcccggaggaatgcctggaatgggagggggcatgcctggaatggctggaatgcctggactcaatgaaattcttagtgatccagaggttcttgcagccatgcaggatccagaagttatggtggctttccaggatgtggctcagaacccagcaaatatgtcaaaataccagagcaacccaaaggttatgaatctcatcagtaaattgtcagccaaatttggaggtcaagcgtaatgtccttctgataaataaagcccttgctgaaggaaaagcaacctagatcaccttatggatgtcgcaataatacaaaccagtgtacctctgaccttctcatcaagagagctggggtgctttgaagataatccctacccctctcccccaaatgcagctgaagcattttacagtggtttgccattagggtattcattcagataatgttttcctactaggaattacttatgtatggaagattactgctctgagtgaaataaaagttattagtgcgaggcaaacataactcatttgaggataaagtttgtgttggatatgtggttcctgatgcattttgacttgtctttttaaatgctttatctttttctttaaagatttatttcaataaaactaattgggaccacccgtatttcagtaggacctgggtagggattggaagtacttggcagggcagcagcaatcttgctgtgtttgatataacatgcatccttgggcaggttgcccttaaatcttacactgtggtgaagggatgttttttttgtaatgctgcagtagagttggagtacttagttctcttgttgtccagtatatctaataagtgtttttcatattatttccacgtaagggaaataaggtagtacttttctttttatatttctatgcttaaaattctctttcctagtcaaaaattgcccaaatctgtgtttgctttctgcttgctacatttgtctcccttacttttcttgagctaaagacaggctttttccaccggcatcatcactgctatcatcattaacagcgtaattatacaagcatatttaatgctgagtttaatttaatatgtaatacatatggtaattgtagggtaatacccacaacaactgtagtttcttacttggccaagagaatgcttatttaagtgttagacttccattctggcaaaatcttgcccaaatctgtgtttgctttctgcttgctacatttgtctcccttacttttcttgagctaaagacaggctttttccaccggcatcatcactgctatcatcattaacagcgtaattatacaagcatatttaatgctgattgcagtgatggtcatgcacaaggatccgtaga

SEQ ID NO: 451942 - DNA, 2437 bp, Homo sapiens
  misc_feature (2339)..(2339): n is a, c, g, or t
  misc_feature (2354)..(2354): n is a, c, g, or t
  misc_feature (2397)..(2397): n is a, c, g, or t
  misc_feature (2432)..(2432): n is a, c, g, or t
accgttgggtgggaggagccagcggccggggaggttctagtctgttctgtcttgcggcagccgcccccttctgcgcggtcacgccgagccagcgcctgggcctggaaccgggccgtagcccccccagtttcgcccaccacctccctaccatggacccccgcaaagtgaacgagcttcgggcctttgtgaaaatgtgtaagcaggatccgagcgttctgcacaccgaggaaatgcgcttcctgagggagtgggtggagagcatgggtggtaaagtaccacctgctactcagaaagctaaatcagaagaaaataccaaggaagaaaaacctgatagtaagaaggtggaggaagacttaaaggcagacgaaccatcaagtgaggaaagtgatctagaaattgataaagaaggtgtgattgaaccagacactgatgctcctcaagaaatgggagatgaaaatgcggagataacggaggagatgatggatcaggcaaatgataaaaaagtggctgctattgaagccctaaatgatggtgaactccagaaagccattgacttattcacagatgccatcaagctgaatcctcgcttggccattttgtatgccaagagggccagtgtcttcgtcaaattacagaagccaaatgctgccatccgagactgtgacagagccattgaaataaatcctgattcagctcagccttacaagtggcgggggaaagcacacagacttctaggccactgggaagaagcagcccatgatcttgcccttgcctgtaaattggattatgatgaagatgctagtgcaatgctgaaagaagttcaacctagggcacagaaaattgcagaacatcggagaaagtatgagcgaaaacgtgaagagcgagagatcaaagaaagaatagaacgagttaagaaggctcgagaagagcatgagagagcccagagggaggaagaagccagacgacagtcaggagctcagtatggctcttttccaggtggctttcctgggggaatgcctggtaattttcccggaggaatgcctggaatgggagggggcatgcctggaatggctggaatgcctggactcaatgaaattcttagtgatccagaggttcttgcagccatgcaggatccagaagttatggtggctttccaggatgtggctcagaacccagcaaatatgtcaaaataccagagcaacccaaaggttatgaatctcatcagtaaattgtcagccaaatttggaggtcaagcgtaatgtccttctgataaataaagcccttgctgaaggaaaagcaacctagatcaccttatggatgtcgcaataatacaaaccagtgtacctctgaccttctcatcaagagagctggggtgctttgaagataatccctacccctctcccccaaatgcagctgaagcattttacagtggtttgccattagggtattcattcagataatgttttcctactaggaattacaaactttaaacactttttaaatcttcaaaatatttaaaacaaatttaaagggcctgttaattcttatatttttctttactaatcattttggatttttttctttgaattattggcagggaatatacttatgtatggaagattactgctctgagtgaaataaaagttattagtgcgaggcaaacataactcatttgaggataaagtttgtgttggatatgtggttcctgatgcattttgacttgtctttttaaatgctttatctttttctttaaagatttatttcaataaaactaattgggaccacccgtatttcagtaggacctgggtagggattggaagtacttggcagggcagcagcaatcttgctgtgtttgatataacatgcatccttgggcaggttgcccttaaatcttacactgtggtgaagggatgttttttttgtaatgctgcagtagagttggagtacttagttctcttgttgtccagtatatctaataagtgtttttcatattatttccacgtaagggaaataaggtagtacttttctttttatatttctatgcttaaaattctctttcctagtcaaaaattgcccaaatctgtgtttgctttctgcttgctacatttgtctcccttacttttcttgagctaaagacaggctttttccaccggcatcatcactgctatcatcattaacagcgtaattatacaagcatatttaatgctgagtttaatttaatatgtaatacatatggtaattgtagggtaatacccacaacaactgtagtttcttacttggccaagagaatgcttatttaagtgttagacttccattctggcaaaatcttgcctatccanaaaaaacatttgggnaaaaaaaggggaattccccttttggggtggttttggggtcctncctacctttaaaaaaaaaaaacccttatttggccnaggtt

SEQ ID NO: 451943 - DNA, 2442 bp, Homo sapiens
accgttgggtgggaggagccagcggccggggaggttctagtctgttctgtcttgcggcagccgcccccttctgcgcggtcacgccgagccagcgcctgggcctggaaccgggccgtagcccccccagtttcgcccaccacctccctaccatggacccccgcaaagtgaacgagcttcgggcctttgtgaaaatgtgtaagcaggatccgagcgttctgcacaccgaggaaatgcgcttcctgagggagtgggtggagagcatgggtggtaaagtaccacctgctactcagaaagctaaatcagaagaaaataccaaggaagaaaaacctgatagtaagaaggtggaggaagacttaaaggcagacgaaccatcaagtgaggaaagtgatctagaaattgataaagaaggtgtgattgaaccagacactgatgctcctcaagaaatgggagatgaaaatgcggagataacggaggagatgatggatcaggcaaatgataaaaaagtggctgctattgaagccctaaatgatggtgaactccagaaagccattgacttattcacagatgccatcaagctgaatcctcgcttggccattttgtatgccaagagggccagtgtcttcgtcaaattacagaagccaaatgctgccatccgagactgtgacagagccattgaaataaatcctgattcagctcagccttacaagtggcgggggaaagcacacagacttctaggccactgggaagaagcagcccatgatcttgcccttgcctgtaaattggattatgatgaagatgctagtgcaatgctgaaagaagttcaacctagggcacagaaaattgcagaacatcggagaaagtatgagcgaaaacgtgaagagcgagagatcaaagaaagaatagaacgagttaagaaggctcgagaagagcatgagagagcccagagggaggaagaagccagacgacagtcaggagctcagtatggctcttttccaggtggctttcctgggggaatgcctggtaattttcccggaggaatgcctggaatgggagggggcatgcctggaatggctggaatgcctggactcaatgaaattcttagtgatccagaggttcttgcagccatgcaggatccagaagttatggtggctttccaggatgtggctcagaacccagcaaatatgtcaaaataccagagcaacccaaaggttatgaatctcatcagtaaattgtcagccaaatttggaggtcaagcgtaatgtccttctgataaataaagcccttgctgaaggaaaagcaacctagatcaccttatggatgtcgcaataatacaaaccagtgtacctctgaccttctcatcaagagagctggggtgctttgaagataatccctacccctctcccccaaatgcagctgaagcattttacagtggtttgccattagggtattcattcagataatgttttcctactaggaattacaaactttaaacactttttaaatcttcaaaatatttaaaacaaatttaaagggcctgttaattcttatatttttctttactaatcattttggatttttttctttgaattattggcagggaatatacttatgtatggaagattactgctctgagtgaaataaaagttattagtgcgaggcaaacataactcatttgaggataaagtttgtgttggatatgtggttcctgatgcattttgacttgtctttttaaatgctttatctttttctttaaagatttatttcaataaaactaattgggaccacccgtatttcagtaggacctgggtagggattggaagtacttggcagggcagcagcaatcttgctgtgtttgatataacatgcatccttgggcaggttgcccttaaatcttacactgtggtgaagggatgttttttttgtaatgctgcagtagagttggagtacttagttctcttgttgtccagtatatctaataagtgtttttcatattatttccacgtaagggaaataaggtagtacttttctttttatatttctatgcttaaaattctctttcctagtcaaaaattgcccaaatctgtgtttgctttctgcttgctacatttgtctcccttacttttcttgagctaaagacaggctttttccaccggcatcatcactgctatcatcattaacagcgtaattatacaagcatatttaatgctgagtttaatttaatatgtaatacatatggtaattgtagggtaatacccacaacaactgtagtttcttacttggccaagagaatgcttatttaagtgttagacttccattctggcaaaatcttgcctctgcccaatctgtgttgcttctgctgctacattgtctcctactttctgagctaagacagcttttcccgaatcatccgctatcatcatacccgtatatacgatattatag

SEQ ID NO: 451944 - DNA, 1293 bp, Homo sapiens
gtaagcgtaatgtccttcagcaagggctttatttatcagaaggacattacgcttgaccttctgataaataaagcccttgctgaaggaaaagcaacctagatcaccttatggatgtcgcaataatacaaaccagtgtacctctgaccttctcatcaagagagctggggtgctttgaagataatccctacccctctcccccaaatgcagctgaagcattttacagtggtttgccattagggtattcattcagataatgttttcctactaggaattacaaactttaaacactttttaaatcttcaaaatatttaaaacaaatttaaagggcctgttaattcttatatttttctttactaatcattttggatttttttctttgaattattggcagggaatatacttatgtatggaagattactgctctgagtgaaataaaagttattagtgcgaggcaaacataactcatttgaggataaagtttgtgttggatatgtggttcctgatgcattttgacttgtctttttaaatgctttatctttttctttaaagatttatttcaataaaactaattgggaccacccgtatttcagtaggacctgggtagggattggaagtacttggcagggcagcagcaatcttgctgtgtttgatataacatgcatccttgggcaggttgcccttaaatcttacactgtggtgaagggatgttttttttgtaatgctgcagtagagttggagtacttagttctcttgttgtccagtatatctaataagtgtttttcatattatttccacgtaagggaaataaggtagtacttttctttttatatttctatgcttaaaattctctttcctagtcaaaaattgcccaaatctgtgtttgctttctgcttgctacatttgtctcccttacttttcttgagctaaagacaggctttttccaccggcatcatcactgctatcatcattaacagcgtaattatacaagcatatttaatgctgagtttaatttaatatgtaatacatatggtaattgtagggtaatacccacaacaactgtagtttcttacttggccaagagaatgcttatttaagtgttagacttccattctggcaaaatcttgcccaaatctgtgtttgctttctgcttgctacatttgtctcccttacttttcttgagctaaagacaggctttttccaccggcatcatcactgctatcatcattaacagcgtaattatacaagcatatttaatgctgattgcagtgatggtcatgcacaaggatccgtaga

SEQ ID NO: 451945 - DNA, 1079 bp, Homo sapiens
agtgtttaaagtttgtaattcctagctaggaaaacattatctgaatgaataccctaatggcaaactttaaacactttttaaatcttcaaaatatttaaaacaaatttaaagggcctgttaattcttatatttttctttactaatcattttggatttttttctttgaattattggcagggaatatacttatgtatggaagattactgctctgagtgaaataaaagttattagtgcgaggcaaacataactcatttgaggataaagtttgtgttggatatgtggttcctgatgcattttgacttgtctttttaaatgctttatctttttctttaaagatttatttcaataaaactaattgggaccacccgtatttcagtaggacctgggtagggattggaagtacttggcagggcagcagcaatcttgctgtgtttgatataacatgcatccttgggcaggttgcccttaaatcttacactgtggtgaagggatgttttttttgtaatgctgcagtagagttggagtacttagttctcttgttgtccagtatatctaataagtgtttttcatattatttccacgtaagggaaataaggtagtacttttctttttatatttctatgcttaaaattctctttcctagtcaaaaattgcccaaatctgtgtttgctttctgcttgctacatttgtctcccttacttttcttgagctaaagacaggctttttccaccggcatcatcactgctatcatcattaacagcgtaattatacaagcatatttaatgctgagtttaatttaatatgtaatacatatggtaattgtagggtaatacccacaacaactgtagtttcttacttggccaagagaatgcttatttaagtgttagacttccattctggcaaaatcttgcccaaatctgtgtttgctttctgcttgctacatttgtctcccttacttttcttgagctaaagacaggctttttccaccggcatcatcactgctatcatcattaacagcgtaattatacaagcatatttaatgctgattgcagtgatggtcatgcacaaggatccgtaga

SEQ ID NO: 451946 - DNA, 585 bp, Homo sapiens
atcattaacagcgtaattatcttgcatatttaatgctgagtttaatttaaggtgtattacatatgggaattgtagggccatacccacaacaactgcagtttcttacttggccaagagaatgcttatttaagtgttagacttccattctgtcaaaaattgcccaaatctgtgtttgctttctgcttgctacatttgtctcccttacttttcttgagctaaagacaggctttttccaccggcatcatcactgctatcatcattaacagcgtaattatacaagcatatttaatgctgagtttaatttaatatgtaatacatatggtaattgtagggtaatacccacaacaactgtagtttcttacttggccaagagaatgcttatttaagtgttagacttccattctggcaaaatcttgcccaaatctgtgtttgctttctgcttgctacatttgtctcccttacttttcttgagctaaagacaggctttttccaccggcatcatcactgctatcatcattaacagcgtaattatacaagcatatttaatgctgattgcagtgatggtcatgcacaaggatccgtaga

SEQ ID NO: 451947 - DNA, 999 bp, Homo sapiens
accgttgggtgggaggagccagcggccggggaggttctagtctgttctgtcttgcggcagccgcccccttctgcgcggtcacgccgagccagcgcctgggcctggaaccgggccgtagcccccccagtttcgcccaccacctccctaccatggacccccgcaaagtgaacgagcttcgggcctttgtgaaaatgtgtaagcaggatccgagcgttctgcacaccgaggaaatgcgcttcctgagggagtgggtggagagcatgggtggtaaagtaccacctgctactcagaaagctaaatcagaagaaaataccaaggaagaaaaacctgatagtaagaaggtggaggaagacttaaaggcagacgaaccatcaagtgaggaaagtgatctagaaattgataaagaaggtgtgattgaaccagacactgatgctcctcaagaaatgggagatgaaaatgcggagataacggaggagatgatggatcaggcaaatgataaaaaagtggctgctattgaagccctaaatgatggtgaactccagaaagccattgacttattcacagatgccatcaagctgaatcctcgcttggccattttgtatgccaagagggccagtgtcttcgtcaaattacagaagccaaatgctgccatccgagactgtgacagagccattgaaataaatcctgattcagctcagccttacaagtggcgggggaaagcacacagacttctaggccactgggaagaagcagcccatgatcttgcccttgcctgtaaattggattatgatgaagatgctagtgcaatgctgaaagaagttcaacctagggcacagaaaattgcagaacatcggagaaagtatgagcgaaaacgtgaagagcgagagatcaaagaaagaatagcacatgagatagttggaaggccttccaacatctcattactctactacctacctacaagcgatactgataactctactcctgcttatcagcgagcgt

SEQ ID NO: 451948 - DNA, 523 bp, Homo sapiens
gtttcaatttaaacactagcactttaaattgaaacactggtagaaacgtagcagtgtttcaatttaaagtgctagtgtttaaaaacattttcaagggataaggccttctgtactttgcttatttgaagaatcagtggtaggagcagtgaagtaaattctatggagtacatttctaaaataccacatttctgaaatcataaataagtttattcaggttctaaccctttgctgtacacaagcagacagaaatgcatctgttacataaatgagaaaaagctattatgctgatggagcatgctttttaaatcctttaaaaacactcaccatataaacttgcatttgagcttgtgtgttcttttgttaatgtgtagagttctcctttctcgaaattgccagtgtgtacttggcttaactcaagaacagtttcttctggattccttatttgatttatttaacctaattatattctaatattgcaaatattaccataagtgggtaaaagtaaaattcctcttctgaaaat

SEQ ID NO: 451949 - DNA, 415 bp, Homo sapiens
aaaaaaaaaaaaaaaaaaaaaaaaaaaaaaaaaaaaaaaaaaaaaaaaaaaaaatgggtagtcacagacgtctgtgacttctgaaatcataaataagtttattcaggttctaaccctttgctgtacacaagcagacagaaatgcatctgttacataaatgagaaaaagctattatgctgatggagcatgctttttaaatcctttaaaaacactcaccatataaacttgcatttgagcttgtgtgttcttttgttaatgtgtagagttctcctttctcgaaattgccagtgtgtacttggcttaactcaagaacagtttcttctggattccttatttgatttatttaacctaattatattctaatattgcaaatattaccataagtgggtaaaagtaaaattcctcttctgaaaat

SEQ ID NO: 451950 - DNA, 278 bp, Homo sapiens
tgtcttcgtcaaattacagaagccaaatgctgccatccgagactgtgacagagccattgaaataaatcctgattcagctcagccttacaagtggcgggggaaagcacacaggtaaataattgaatttaattattttcagaactctttacatttaaatctgatgttttaagatgctttgtttaaacaaaaacacaaaagttcctaatgacttaattttcaaattagtgtgtacttagtatcaagaagtgagatagcttgtagacagctgcttaaaaggt

SEQ ID NO: 451951 - DNA, 288 bp, Homo sapiens
gcggccgcctactactactactactgctcgaattcaagcttctaacgatgtacggggacatgctttttaaatcctttaaaaacactcaccatataaacttgcatttgagcttgtgtgttcttttgttaatgtgtagagttctcctttctcgaaattgccagtgtgtacttggcttaactcaagaacagtttcttctggattccttatttgatttatttaacctaattatattctaatattgcaaatattaccataagtgggtaaaagtaaaattcctcttctgaaaat

SEQ ID NO: 451952 - DNA, 3211 bp, Homo sapiens
accgttgggtgggaggagccagcggccggggaggttctagtctgttctgtcttgcggcagccgcccccttctgcgcggtcacgccgagccagcgcctgggcctggaaccgggccgtagcccccccagtttcgcccaccacctccctaccatggacccccgcaaagtgaacgagcttcgggcctttgtgaaaatgtgtaagcaggatccgagcgttctgcacaccgaggaaatgcgcttcctgagggagtgggtggagagcatgggtggtaaagtaccacctgctactcagaaagctaaatcagaagaaaataccaaggaagaaaaacctgatagtaagaaggtggaggaagacttaaaggcagacgaaccatcaagtgaggaaagtgatctagaaattgataaagaaggtgtgattgaaccagacactgatgctcctcaagaaatgggagatgaaaatgcggagataacggaggagatgatggatcaggcaaatgataaaaaagtggctgctattgaagccctaaatgatggtgaactccagaaagccattgacttattcacagatgccatcaagctgaatcctcgcttggccattttgtatgccaagagggccagtgtcttcgtcaaattacagaagccaaatgctgccatccgagactgtgacagagccattgaaataaatcctgattcagctcagccttacaagtggcgggggaaagcacacagacttctaggccactgggaagaagcagcccatgatcttgcccttgcctgtaaattggattatgatgaagatgctagtgcaatgctgaaagaagttcaacctagggcacagaaaattgcagaacatcggagaaagtatgagcgaaaacgtgaagagcgagagatcaaagaaagaatagaacgagttaagaaggctcgagaagagcatgagagagcccagagggaggaagaagccagacgacagtcaggagctcagtatggctcttttccaggtggctttcctgggggaatgcctggtaattttcccggaggaatgcctggaatgggagggggcatgcctggaatggctggaatgcctggactcaatgaaattcttagtgatccagaggttcttgcagccatgcaggatccagaagttatggtggctttccaggatgtggctcagaacccagcaaatatgtcaaaataccagagcaacccaaaggttatgaatctcatcagtaaattgtcagccaaatttggaggtcaagcgtaatgtccttctgataaataaagcccttgctgaaggaaaagcaacctagatcaccttatggatgtcgcaataatacaaaccagtgtacctctgaccttctcatcaagagagctggggtgctttgaagataatccctacccctctcccccaaatgcagctgaagcattttacagtggtttgccattagggtattcattcagataatgttttcctactaggaattacaaactttaaacactttttaaatcttcaaaatatttaaaacaaatttaaagggcctgttaattcttatatttttctttactaatcattttggatttttttctttgaattattggcagggaatatacttatgtatggaagattactgctctgagtgaaataaaagttattagtgcgaggcaaacataactcatttgaggataaagtttgtgttggatatgtggttcctgatgcattttgacttgtctttttaaatgctttatctttttctttaaagatttatttcaataaaactaattgggaccacccgtatttcagtaggacctgggtagggattggaagtacttggcagggcagcagcaatcttgctgtgtttgatataacatgcatccttgggcaggttgcccttaaatcttacactgtggtgaagggatgttttttttgtaatgctgcagtagagttggagtacttagttctcttgttgtccagtatatctaataagtgtttttcatattatttccacgtaagggaaataaggtagtacttttctttttatatttctatgcttaaaattctctttcctagtcaaaaattgcccaaatctgtgtttgctttctgcttgctacatttgtctcccttacttttcttgagctaaagacaggctttttccaccggcatcatcactgctatcatcattaacagcgtaattatacaagcatatttaatgctgagtttaatttaatatgtaatacatatggtaattgtagggtaatacccacaacaactgtagtttcttacttggccaagagaatgcttatttaagtgttagacttccattctggcaaaatcttgccatcttgccttatcagaagacattggaaagagggattccctttggtgtttggtcttctacttagaaaaacctattgcagttagtttatcttgtagtattcatctttgtattctgaagataaggtttgaattaaattgatacacacagaggggaaccgattttttttatccaatgtgaattataaatgagataatccacagttattcattgtggagttgttgagactatgaaagactcattgtctttgtattcagctcttaaatagtgtaactatatccccacctctgcttgctttctttccctcccctccaatgataaagaaaatgataaattttctgttgtgcattcaattcttattttaaataagactaagtataggcattgtacctgacattgctacgtttctaccagtgtttcaatttaaagtgctagtgtttaaaaacattttcaagggataaggccttctgtactttgcttatttgaagaatcagtggtaggagcagtgaagtaaattctatggagtacatttctaaaataccacatttctgaaatcataaataagtttattcaggttctaaccctttgctgtacacaagcagacagaaatgcatctgttacataaatgagaaaaagctattatgctgatggagcatgctttttaaatcctttaaaaacactcaccatataaacttgcatttgagcttgtgtgttcttttgttaatgtgtagagttctcctttctcgaaattgccagtgtgtacttggcttaactcaagaacagtttcttctggattccttatttgatttatttaacctaattatattctaatattgcaaatattaccataagtgggtaaaagtaaaattcctcttctgaaaat

SEQ ID NO: 451953 - DNA, 2445 bp, Homo sapiens
accgttgggtgggaggagccagcggccggggaggttctagtctgttctgtcttgcggcagccgcccccttctgcgcggtcacgccgagccagcgcctgggcctggaaccgggccgtagcccccccagtttcgcccaccacctccctaccatggacccccgcaaagtgaacgagcttcgggcctttgtgaaaatgtgtaagcaggatccgagcgttctgcacaccgaggaaatgcgcttcctgagggagtgggtggagagcatgggtggtaaagtaccacctgctactcagaaagctaaatcagaagaaaataccaaggaagaaaaacctgatagtaagaaggtggaggaagacttaaaggcagacgaaccatcaagtgaggaaagtgatctagaaattgataaagaaggtgtgattgaaccagacactgatgctcctcaagaaatgggagatgaaaatgcggagataacggaggagatgatggatcaggcaaatgataaaaaagtggctgctattgaagccctaaatgatggtgaactccagaaagccattgacttattcacagatgccatcaagctgaatcctcgcttggccattttgtatgccaagagggccagtgtcttcgtcaaattacagaagccaaatgctgccatccgagactgtgacagagccattgaaataaatcctgattcagctcagccttacaagtggcgggggaaagcacacagacttctaggccactgggaagaagcagcccatgatcttgcccttgcctgtaaattggattatgatgaagatgctagtgcaatgctgaaagaagttcaacctagggcacagaaaattgcagaacatcggagaaagtatgagcgaaaacgtgaagagcgagagatcaaagaaagaatagaacgagttaagaaggctcgagaagagcatgagagagcccagagggaggaagaagccagacgacagtcaggagctcagtatggctcttttccaggtggctttcctgggggaatgcctggtaattttcccggaggaatgcctggaatgggagggggcatgcctggaatggctggaatgcctggactcaatgaaattcttagtgatccagaggttcttgcagccatgcaggatccagaagttatggtggctttccaggatgtggctcagaacccagcaaatatgtcaaaataccagagcaacccaaaggttatgaatctcatcagtaaattgtcagccaaatttggaggtcaagcgtaatgtccttctgataaataaagcccttgctgaaggaaaagcaacctagatcaccttatggatgtcgcaataatacaaaccagtgtacctctgaccttctcatcaagagagctggggtgctttgaagataatccctacccctctcccccaaatgcagctgaagcattttacagtggtttgccattagggtattcattcagataatgttttcctactaggaattacaaactttaaacactttttaaatcttcaaaatatttaaaacaaatttaaagggcctgttaattcttatatttttctttactaatcattttggatttttttctttgaattattggcagggaatatacttatgtatggaagattactgctctgagtgaaataaaagttattagtgcgaggcaaacataactcatttgaggataaagtttgtgttggatatgtggttcctgatgcattttgacttgtctttttaaatgctttatctttttctttaaagatttatttcaatacttggcagggcagcagcaatcttgctgtgtttgatataacatgcatccttgggcaggttgcccttaaatcttacactgtggtgaagggatgttttttttgtaatgctgcagtagagttggagtacttagttctcttgttgtccagtatatctaataagtgtttttcatattatttccacgtaagggaaataaggtagtacttttctttttatatttctatgcttaaaattctctttcctagtcaaaaattgcccaaatctgtgtttgctttctgcttgctacatttgtctcccttacttttcttgagctaaagacaggctttttccaccggcatcatcactgctatcatcattaacagcgtaattatacaagcatatttaatgctgagtttaatttaatatgtaatacatatggtaattgtagggtaatacccacaacaactgtagtttcttacttggccaagagaatgcttatttaagtgttagacttccattctggcaaaatcttgcccaaatctgtgtttgctttctgcttgctacatttgtctcccttacttttcttgagctaaagacaggctttttccaccggcatcatcactgctatcatcattaacagcgtaattatacaagcatatttaatgctgattgcagtgatggtcatgcacaaggatccgtaga

SEQ ID NO: 451954 - DNA, 3158 bp, Homo sapiens
accgttgggtgggaggagccagcggccggggaggttctagtctgttctgtcttgcggcagccgcccccttctgcgcggtcacgccgagccagcgcctgggcctggaaccgggccgtagcccccccagtttcgcccaccacctccctaccatggacccccgcaaagtgaacgagcttcgggcctttgtgaaaatgtgtaagcaggatccgagcgttctgcacaccgaggaaatgcgcttcctgagggagtgggtggagagcatgggtggtaaagtaccacctgctactcagaaagctaaatcagaagaaaataccaaggaagaaaaacctgatagtaagaaggtggaggaagacttaaaggcagacgaaccatcaagtgaggaaagtgatctagaaattgataaagaaggtgtgattgaaccagacactgatgctcctcaagaaatgggagatgaaaatgcggagataacggaggagatgatggatcaggcaaatgataaaaaagtggctgctattgaagccctaaatgatggtgaactccagaaagccattgacttattcacagatgccatcaagctgaatcctcgcttggccattttgtatgccaagagggccagtgtcttcgtcaaattacagaagccaaatgctgccatccgagactgtgacagagccattgaaataaatcctgattcagctcagccttacaagtggcgggggaaagcacacagacttctaggccactgggaagaagcagcccatgatcttgcccttgcctgtaaattggattatgatgaagatgctagtgcaatgctgaaagaagttcaacctagggcacagaaaattgcagaacatcggagaaagtatgagcgaaaacgtgaagagcgagagatcaaagaaagaatagaacgagttaagaaggctcgagaagagcatgagagagcccagagggaggaagaagccagacgacagtcaggagctcagtatggctcttttccaggtggctttcctgggggaatgcctggtaattttcccggaggaatgcctggaatgggagggggcatgcctggaatggctggaatgcctggactcaatgaaattcttagtgatccagaggttcttgcagccatgcaggatccagaagttatggtggctttccaggatgtggctcagaacccagcaaatatgtcaaaataccagagcaacccaaaggttatgaatctcatcagtaaattgtcagccaaatttggaggtcaagcgtaatgtccttctgataaataaagcccttgctgaaggaaaagcaacctagatcaccttatggatgtcgcaataatacaaaccagtgtacctctgaccttctcatcaagagagctggggtgctttgaagataatccctacccctctcccccaaatgcagctgaagcattttacagtggtttgccattagggtattcattcagataatgttttcctactaggaattacaaactttaaacactttttaaatcttcaaaatatttaaaacaaatttaaagggcctgttaattcttatatttttctttactaatcattttggatttttttctttgaattattggcagggaatatacttatgtatggaagattactgctctgagtgaaataaaagttattagtgcgaggcaaacataactcatttgaggataaagtttgtgttggatatgtggttcctgatgcattttgacttgtctttttaaatgctttatctttttctttaaagatttatttcaataaaactaattgggaccacccgtatttcagtaggacctgggtagggattggaagtacttggcagggcagcagcaatcttgctgtgtttgatataacatgcatccttgggcaggttgcccttaaatcttacactgtggtgaagggatgttttttttgtaatgctgcagtagagttggagtacttagttctcttgttgtccagtatatctaataagtgtttttcatattatttccacgtaagggaaataaggtagtacttttctttttatatttctatgcttaaaattctctttcctagtcaaaaattgcccaaatctgtgtttgctttctgcttgctacatttgtctcccttacttttcttgagctaaagacaggctttttccaccggcatcatcactgctatcatcattaacagcgtaattatacaagcatatttaatgctgagtttaatttaatatgtaatacatatggtaattgtagggtaatacccacaacaactgtagtttcttacttggccaagagaatgcttatttaagtgttagacttccattctggcaaaatcttgccatcttgccttatcagaagacattggaaagagggattccctttggtgtttggtcttctacttagataaggtttgaattaaattgatacacacagaggggaaccgattttttttatccaatgtgaattataaatgagataatccacagttattcattgtggagttgttgagactatgaaagactcattgtctttgtattcagctcttaaatagtgtaactatatccccacctctgcttgctttctttccctcccctccaatgataaagaaaatgataaattttctgttgtgcattcaattcttattttaaataagactaagtataggcattgtacctgacattgctacgtttctaccagtgtttcaatttaaagtgctagtgtttaaaaacattttcaagggataaggccttctgtactttgcttatttgaagaatcagtggtaggagcagtgaagtaaattctatggagtacatttctaaaataccacatttctgaaatcataaataagtttattcaggttctaaccctttgctgtacacaagcagacagaaatgcatctgttacataaatgagaaaaagctattatgctgatggagcatgctttttaaatcctttaaaaacactcaccatataaacttgcatttgagcttgtgtgttcttttgttaatgtgtagagttctcctttctcgaaattgccagtgtgtacttggcttaactcaagaacagtttcttctggattccttatttgatttatttaacctaattatattctaatattgcaaatattaccataagtgggtaaaagtaaaattcctcttctgaaaat

SEQ ID NO: 451955 - DNA, 2396 bp, Homo sapiens
accgttgggtgggaggagccagcggccggggaggttctagtctgttctgtcttgcggcagccgcccccttctgcgcggtcacgccgagccagcgcctgggcctggaaccgggccgtagcccccccagtttcgcccaccacctccctaccatggacccccgcaaagtgaacgagcttcgggcctttgtgaaaatgtgtaagcaggatccgagcgttctgcacaccgaggaaatgcgcttcctgagggagtgggtggagagcatgggtggtaaagtaccacctgctactcagaaagctaaatcagaagaaaataccaaggaagaaaaacctgatagtaagaaggtggaggaagacttaaaggcagacgaaccatcaagtgaggaaagtgatctagaaattgataaagaaggtgtgattgaaccagacactgatgctcctcaagaaatgggagatgaaaatgcggagataacggaggagatgatggatcaggcaaatgataaaaaagtggctgctattgaagccctaaatgatggtgaactccagaaagccattgacttattcacagatgccatcaagctgaatcctcgcttggccattttgtatgccaagagggccagtgtcttcgtcaaattacagaagccaaatgctgccatccgagactgtgacagagccattgaaataaatcctgattcagctcagccttacaagtggcgggggaaagcacacaggcacagaaaattgcagaacatcggagaaagtatgagcgaaaacgtgaagagcgagagatcaaagaaagaatagaacgagttaagaaggctcgagaagagcatgagagagcccagagggaggaagaagccagacgacagtcaggagctcagtatggctcttttccaggtggctttcctgggggaatgcctggtaattttcccggaggaatgcctggaatgggagggggcatgcctggaatggctggaatgcctggactcaatgaaattcttagtgatccagaggttcttgcagccatgcaggatccagaagttatggtggctttccaggatgtggctcagaacccagcaaatatgtcaaaataccagagcaacccaaaggttatgaatctcatcagtaaattgtcagccaaatttggaggtcaagcgtaatgtccttctgataaataaagcccttgctgaaggaaaagcaacctagatcaccttatggatgtcgcaataatacaaaccagtgtacctctgaccttctcatcaagagagctggggtgctttgaagataatccctacccctctcccccaaatgcagctgaagcattttacagtggtttgccattagggtattcattcagataatgttttcctactaggaattacaaactttaaacactttttaaatcttcaaaatatttaaaacaaatttaaagggcctgttaattcttatatttttctttactaatcattttggatttttttctttgaattattggcagggaatatacttatgtatggaagattactgctctgagtgaaataaaagttattagtgcgaggcaaacataactcatttgaggataaagtttgtgttggatatgtggttcctgatgcattttgacttgtctttttaaatgctttatctttttctttaaagatttatttcaataaaactaattgggaccacccgtatttcagtaggacctgggtagggattggaagtacttggcagggcagcagcaatcttgctgtgtttgatataacatgcatccttgggcaggttgcccttaaatcttacactgtggtgaagggatgttttttttgtaatgctgcagtagagttggagtacttagttctcttgttgtccagtatatctaataagtgtttttcatattatttccacgtaagggaaataaggtagtacttttctttttatatttctatgcttaaaattctctttcctagtcaaaaattgcccaaatctgtgtttgctttctgcttgctacatttgtctcccttacttttcttgagctaaagacaggctttttccaccggcatcatcactgctatcatcattaacagcgtaattatacaagcatatttaatgctgagtttaatttaatatgtaatacatatggtaattgtagggtaatacccacaacaactgtagtttcttacttggccaagagaatgcttatttaagtgttagacttccattctggcaaaatcttgcccaaatctgtgtttgctttctgcttgctacatttgtctcccttacttttcttgagctaaagacaggctttttccaccggcatcatcactgctatcatcattaacagcgtaattatacaagcatatttaatgctgattgcagtgatggtcatgcacaaggatccgtaga

SEQ ID NO: 451956 - DNA, 2585 bp, Homo sapiens
accgttgggtgggaggagccagcggccggggaggttctagtctgttctgtcttgcggcagccgcccccttctgcgcggtcacgccgagccagcgcctgggcctggaaccgggccgtagcccccccagtttcgcccaccacctccctaccatggacccccgcaaagtgaacgagcttcgggcctttgtgaaaatgtgtaagcaggatccgagcgttctgcacaccgaggaaatgcgcttcctgagggagtgggtggagagcatgggtggtaaagtaccacctgctactcagaaagctaaatcagaagaaaataccaaggaagaaaaacctgatagtaagaaggtggaggaagacttaaaggcagacgaaccatcaagtgaggaaagtgatctagaaattgataaagaaggtgtgattgaaccagacactgatgctcctcaagaaatgggagatgaaaatgcggagataacggaggagatgatggatcaggcaaatgataaaaaagtggctgctattgaagccctaaatgatggtgaactccagaaagccattgacttattcacagatgccatcaagctgaatcctcgcttggccattttgtatgccaagagggccagtgtcttcgtcaaattacagaagccaaatgctgccatccgagactgtgacagagccattgaaataaatcctgattcagctcagccttacaagtggcgggggaaagcacacagacttctaggccactgggaagaagcagcccatgatcttgcccttgcctgtaaattggattatgatgaagatgctagtgcaatgctgaaagaagttcaacctagggcacagaaaattgcagaacatcggagaaagtatgagcgaaaacgtgaagagcgagagatcaaagaaagaatagaacgagttaagaaggctcgagaagagcatgagagagcccagagggaggaagaagccagacgacagtcaggagctcagtatggctcttttccaggtggctttcctgggggaatgcctggtaattttcccggaggaatgcctggaatgggagggggcatgcctggaatggctggaatgcctggactcaatgaaattcttagtgatccagaggttcttgcagccatgcaggatccagaagttatggtggctttccaggatgtggctcagaacccagcaaatatgtcaaaataccagagcaacccaaaggttatgaatctcatcagtaaattgtcagccaaatttggaggtcaagcgtaatgtccttctgataaataaagcccttgctgaaggaaaagcaacctagatcaccttatggatgtcgcaataatacaaaccagtgtacctctgaccttctcatcaagagagctggggtgctttgaagataatccctacccctctcccccaaatgcagctgaagcattttacagtggtttgccattagggtattcattcagataatgttttcctactaggaattacaaactttaaacactttttaaatcttcaaaatatttaaaacaaatttaaagggcctgttaattcttatatttttctttactaatcattttggatttttttctttgaattattggcagggaatatacttatgtatggaagattactgctctgagtgaaataaaagttattagtgcgaggcaaacataactcatttgaggataaagtttgtgttggatatgtggttcctgatgcattttgacttgtctttttaaatgctttatctttttctttaaagatttatttcaataaaactaattgggaccacccgtatttcagtaggacctgggtagggattggaagtacttggcagggcagcagcaatcttgctgtgtttgatataacatgcatccttgggcaggttgcccttaaatcttacactgtggtgaagggatgttttttttgtaatgctgcagtagagttggagtacttagttctcttgttgtccagtatatctaataagtgtttttcatattatttccacgtaagggaaataaggtagtacttttctttttatatttctatgcttaaaattctctttcctagtcaaaaattgcccaaatctgtgtttgctttctgcttgctacatttgtctcccttacttttcttgagctaaagacaggctttttccaccggcatcatcactgctatcatcattaacagcgtaattatacaagcatatttaatgctgagtttaatttaatatgtaatacatatggtaattgtagggtaatacccacaacaactgtagtttcttacttggccaagagaatgcttatttaagtgttagacttccattctggcaaaatcttgcctttatcttgtagtattcatctttgtattctgaagataaggtttgaattaaattgatacacacagaggggaaccgattttttttatccaatgtgaattataaatgagataatccacagttattcattgtggagttgttgagactatgaaagactcattgtctttgtattcagctcttaaatagtgtaactatatccccacctctgcttgctttctttccctcccctccaatgataaagaaaatgataaattttc

SEQ ID NO: 451957 - DNA, 1297 bp, Homo sapiens
accgttgggtgggaggagccagcggccggggaggttctagtctgttctgtcttgcggcagccgcccccttctgcgcggtcacgccgagccagcgcctgggcctggaaccgggccgtagcccccccagtttcgcccaccacctccctaccatggacccccgcaaagtgaacgagcttcgggcctttgtgaaaatgtgtaagcaggatccgagcgttctgcacaccgaggaaatgcgcttcctgagggagtgggtggagagcatgggtggtaaagtaccacctgctactcagaaagctaaatcagaagaaaataccaaggaagaaaaacctgatagtaagaaggtggaggaagacttaaaggcagacgaaccatcaagtgaggaaagtgatctagaaattgataaagaaggtgtgattgaaccagacactgatgctcctcaagaaatgggagatgaaaatgcggagataacggaggagatgatggatcaggcaaatgataaaaaagtggctgctattgaagccctaaatgatggtgaactccagaaagccattgacttattcacagatgccatcaagctgaatcctcgcttggccattttgtatgccaagagggccagtgtcttcgtcaaattacagaagccaaatgctgccatccgagactgtgacagagccattgaaataaatcctgattcagctcagccttacaagtggcgggggaaagcacacagacttctaggccactgggaagaagcagcccatgatcttgcccttgcctgtaaattggattatgatgaagatgctagtgcaatgctgaaagaagttcaacctagggcacagaaaattgcagaacatcggagaaagtatgagcgaaaacgtgaagagcgagagatcaaagaaagaatagaacgagttaagaaggctcgagaagagcatgagagagcccagagggaggaagaagccagacgacagtcaggagctcagtatggctcttttccaggtggctttcctgggggaatgcctggtaattttcccggaggaatgcctggaatgggagggggcatgcctggaatggctggaatgcctggactcaatgaaattcttagtgatccagaggttcttgcagccatgcaggatccagaagttatggtggctttccaggatgtggctcagaacccagcaaatatgtcaaaataccagagcaacccaaaggttatgaatctcatcagtaaattgtcagccaaatttggaggtcaagcgtaatgtccttctgataaataaagcccttgctgaaggaaaag

SEQ ID NO: 451958 - DNA, 1044 bp, Homo sapiens
ggggtaatacatatggtaattgtattacatattaaattaaactcagcatttaatatgtaatacatatggtaattgtagggtaatacccacaacaactgtagtttcttacttggccaagagaatgcttatttaagtgttagacttccattctggcaaaatcttgccatcttgccttatcagaagacattggaaagagggattccctttggtgtttggtcttctacttagaaaaacctattgcagttagtttatcttgtagtattcatctttgtattctgaagataaggtttgaattaaattgatacacacagaggggaaccgattttttttatccaatgtgaattataaatgagataatccacagttattcattgtggagttgttgagactatgaaagactcattgtctttgtattcagctcttaaatagtgtaactatatccccacctctgcttgctttctttccctcccctccaatgataaagaaaatgataaattttctgttgtgcattcaattcttattttaaataagactaagtataggcattgtacctgacattgctacgtttctaccagtgtttcaatttaaagtgctagtgtttaaaaacattttcaagggataaggccttctgtactttgcttatttgaagaatcagtggtaggagcagtgaagtaaattctatggagtacatttctaaaataccacatttctgaaatcataaataagtttattcaggttctaaccctttgctgtacacaagcagacagaaatgcatctgttacataaatgagaaaaagctattatgctgatggagcatgctttttaaatcctttaaaaacactcaccatataaacttgcatttgagcttgtgtgttcttttgttaatgtgtagagttctcctttctcgaaattgccagtgtgtacttggcttaactcaagaacagtttcttctggattccttatttgatttatttaacctaattatattctaatattgcaaatattaccataagtgggtaaaagtaaaattcctcttctgaaaat

SEQ ID NO: 451959 - DNA, 2457 bp, Homo sapiens
ggcccggcccgccggcgacgtcacgcggccgttacggcgctcaggcgtctcgacgcgcgcgatttaaaaccagctcaggagacgccaaggaaagatgggacctcccggcccagcactgccagccacaatgaataactcttcttcagagacgcgaggacacccccacagtgcctcctctccttcagagcgtgtgttcccgatgcccctgcccaggaaggcgcctctcaatattcctggcaccccagtcctcgaagactttcctcagaatgacgatgagaaggagcggctgcagcggaggcgctcgagggtctttgatctgcagttcagcactgactcacctcgcttattggcctccccctccagcaggagtattgacatttcagctactatccccaagtttacaaacacgcagattacggaacattactccacctgtatcaaactgtccactgaaaatattgatcccatgtttcagaagacagcagcctcatttgatgagtgcagcacagcaggggtgtttctgtccactctccactgccaggactacagaagtgaactgctgtttccctctgatgtccagactctctccacgggagaacctctcgagttgccagagttaggttgtgtagaaatgacagatttaaaagcgcccttgcagcagtgtgcagaagatcgccagatctgcccttccctggccgggttccagtttacacagtgggacagtgaaacacataatgagtctgtgtcggccctggtagacaagtttaagaagaatgaccaggtatttgacatcaatgctgaagttgacgagagtgactgtggagacttccccgatgggtccctgggggatgactttgatgccaacgatgaacctgaccacaccgcagttggggatcatgaagagttcaggagctggaaggagccctgccaggttcagagctgccaggaagaaatgatttcccttggggatggagacatcaggaccatgtgcccccttctgtctatgaaacctggagaatattcttatttcagtcctcggaccatgtcgatgtgggctggcccggatcactggcgctttaggcctcgacgcaaacaagatgctccttcccaatcagaaaacaaaaagaagagtacaaaaaaagattttgaaattgactttgaagatgatattgactttgatgtatattttagaaaaacaaaggctgctactattctgaccaagtccactttggagaaccagaattggagagctaccacccttcctacagatttcaactacaatgttgacactctggtccagcttcacctcaaaccaggcaccaggttacttaagatggcccagggccatagggtagagactgagcattatgaagaaattgaagactatgattacaacaaccctaacgacacctccaacttttgccctggattacaggctgctgacagtgatgatgaagatttggatgacttatttgtgggacctgttgggaactctgacctctcaccttatccttgccatccacctaagacagcacaacagaatggtgacactccagaagcccaaggattagacatcacaacatatggggagtcaaacttggtagctgagcctcagaaggtaaataaaattgaaattcactatgccaagactgccaaaaagatggacatgaagaaactgaagcagagcatgtggagtctgctgacagcgctctccggaaaggaggcagatgcagaggcaaaccacagggaagctggaaaagaagcggccctggcagaagtggctgacgagaagatgcttagcgggctcacgaaggacctgcagaggagcctgccccctgtcatggctcagaacctctccatacctctggcttttgcctgtctcctacatttagccaatgaaaagaatctaaaactggaaggaacagaggacctctctgatgttcttgtgaggcaaggagattgagttcactatggagaagtcagcagcaggaggcccatcccttactcagttgccgggacatccccagtctcgggggaagaagatgccatgggcttatacccaggctgtagccaactaccaacgtgcctgtttgtttgttgctctttccttctctccatcatagtctgggtgccagcgccctgaagctccgtgctcaactgattaaactttactgccctatggtgaccatctaggagaggggagggcagagggggtgagggtactattctggattgagaaaacctatatccattctttatatcaatgtatagttttagtctcctaaattgatctgttattttccaaactattctcttgtagaaaattttccagtgggcacttaatggtgcccttgaagaacttcctaatccatgtacataaaatacatcatatgtacacttataaatgtatatagaatgctcaaaaataaaattcttaataatagaactggcaaaata

SEQ ID NO: 451960 - DNA, 2781 bp, Homo sapiens
ggcccggcccgccggcgacgtcacgcggccgttacggcgctcaggcgtctcgacgcgcgcgatttaaaaccagctcaggagacgccaaggaaagatgggacctcccggcccagagacgcgaggacacccccacagtgcctcctctccttcagagcgtgtgttcccgatgcccctgcccaggaaggcgcctctcaatattcctggcaccccagtcctcgaagactttcctcagaatgacgatgagaaggagcggctgcagcggaggcgctcgagggtctttgatctgcagttcagcactgactcacctcgcttattggcctccccctccagcaggagtattgacatttcagctactatccccaagtttacaaacacgcagattacggaacattactccacctgtatcaaactgtccactgaaaataaaatcactaccaagaatgcttttggtttgcacttgattgattttatgtcagagattcttaaacagaaagacaccgaaccaaccaactttaaagtggctgcgggtactctggatgccagcaccaagatctatgctgtgcgcgtggatgccgtccatgccgatgtatacagagtccttggggggctgggcaaagatgcaccgtctttggaagaagtagaaggccatgttgctgatggaagtgctactgaaatgggaacaaccaaaaaggctgtaaagccaaagaagaagcacttacacagaactattgagcagaacataaacaacctcaatgtctccgaagcagatcggaagtgtgagattgatcccatgtttcagaagacagcagcctcatttgatgagtgcagcacagcaggggtgtttctgtccactctccactgccaggactacagaagtgaactgctgtttccctctgatgtccagactctctccacgggagaacctctcgagttgccagagttaggttgtgtagaaatgacagatttaaaagcgcccttgcagcagtgtgcagaagatcgccagatctgcccttccctggccgggttccagtttacacagtgggacagtgaaacacataatgagtctgtgtcggccctggtagacaagtttaagaagaatgaccaggtatttgacatcaatgctgaagttgacgagagtgactgtggagacttccccgatgggtccctgggggatgactttgatgccaacgatgaacctgaccacaccgcagttggggatcatgaagagttcaggagctggaaggagccctgccaggttcagagctgccaggaagaaatgatttcccttggggatggagacatcaggaccatgtgcccccttctgtctatgaaacctggagaatattcttatttcagtcctcggaccatgtcgatgtgggctggcccggatcactggcgctttaggcctcgacgcaaacaagatgctccttcccaatcagaaaacaaaaagaagagtacaaaaaaagattttgaaattgactttgaagatgatattgactttgatgtatattttagaaaaacaaaggctgctactattctgaccaagtccactttggagaaccagaattggagagctaccacccttcctacagatttcaactacaatgttgacactctggtccagcttcacctcaaaccaggcaccaggttacttaagatggcccagggccatagggtagagactgagcattatgaagaaattgaagactatgattacaacaaccctaacgacacctccaacttttgccctggattacaggctgctgacagtgatgatgaagatttggatgacttatttgtgggacctgttgggaactctgacctctcaccttatccttgccatccacctaagacagcacaacagaatggtgacactccagaagcccaaggattagacatcacaacatatggggagtcaaacttggtagctgagcctcagaaggtaaataaaattgaaattcactatgccaagactgccaaaaagatggacatgaagaaactgaagcagagcatgtggagtctgctgacagcgctctccggaaaggaggcagatgcagaggcaaaccacagggaagctggaaaagaagcggccctggcagaagtggctgacgagaagatgcttagcgggctcacgaaggacctgcagaggagcctgccccctgtcatggctcagaacctctccatacctctggcttttgcctgtctcctacatttagccaatgaaaagaatctaaaactggaaggaacagaggacctctctgatgttcttgtgaggcaaggagattgagttcactatggagaagtcagcagcaggaggcccatcccttactcagttgccgggacatccccagtctcgggggaagaagatgccatgggcttatacccaggctgtagccaactaccaacgtgcctgtttgtttgttgctctttccttctctccatcatagtctgggtgccagcgccctgaagctccgtgctcaactgattaaactttactgccctatggtgaccatctaggagaggggagggcagagggggtgagggtactattctggattgagaaaacctatatccattctttatatcaatgtatagttttagtctcctaaattgatctgttattttccaaactattctcttgtagaaaattttccagtgggcacttaatggtgcccttgaagaacttcctaatccatgtacataaaatacatcatatgtacacttataaatgtatatagaatgctcaaaaataaaattcttaataatagaactggcaaaata

SEQ ID NO: 451961 - DNA, 2723 bp, Homo sapiens
ggacgcgtgggcggacggcgtgggtcgacccacgcgtcgggacctcccggcccagagacgcgaggacacccccacagtgcctcctctccttcagagcgtgtgttcccgatgcccctgcccaggaaggcgcctctcaatattcctggcaccccagtcctcgaagactttcctcagaatgacgatgagaaggagcggctgcagcggaggcgctcgagggtctttgatctgcagttcagcactgactcacctcgcttattggcctccccctccagcaggagtattgacatttcagctactatccccaagtttacaaacacgcagattacggaacattactccacctgtatcaaactgtccactgaaaataaaatcactaccaagaatgcttttggtttgcacttgattgattttatgtcagagattcttaaacagaaagacaccgaaccaaccaactttaaagtggctgcgggtactctggatgccagcaccaagatctatgctgtgcgcgtggatgccgtccatgccgatgtatacagagtccttggggggctgggcaaagatgcaccgtctttggaagaagtagaaggccatgttgctgatggaagtgctactgaaatgggaacaaccaaaaaggctgtaaagccaaagaagaagcacttacacagaactattgagcagaacataaacaacctcaatgtctccgaagcagatcggaagtgtgagattgatcccatgtttcagaagacagcagcctcatttgatgagtgcagcacagcaggggtgtttctgtccactctccactgccaggactacagaagtgaactgctgtttccctctgatgtccagactctctccacgggagaacctctcgagttgccagagttaggttgtgtagaaatgacagatttaaaagcgcccttgcagcagtgtgcagaagatcgccagatctgcccttccctggccgggttccagtttacacagtgggacagtgaaacacataatgagtctgtgtcggccctggtagacaagtttaagaagaatgaccaggtatttgacatcaatgctgaagttgacgagagtgactgtggagacttccccgatgggtccctgggggatgactttgatgccaacgatgaacctgaccacaccgcagttggggatcatgaagagttcaggagctggaaggagccctgccaggttcagagctgccaggaagaaatgatttcccttggggatggagacatcaggaccatgtgcccccttctgtctatgaaacctggagaatattcttatttcagtcctcggaccatgtcgatgtgggctggcccggatcactggcgctttaggcctcgacgcaaacaagatgctccttcccaatcagaaaacaaaaagaagagtacaaaaaaagattttgaaattgactttgaagatgatattgactttgatgtatattttagaaaaacaaaggctgctactattctgaccaagtccactttggagaaccagaattggagagctaccacccttcctacagatttcaactacaatgttgacactctggtccagcttcacctcaaaccaggcaccaggttacttaagatggcccagggccatagggtagagactgagcattatgaagaaattgaagactatgattacaacaaccctaacgacacctccaacttttgccctggattacaggctgctgacagtgatgatgaagatttggatgacttatttgtgggacctgttgggaactctgacctctcaccttatccttgccatccacctaagacagcacaacagaatggtgacactccagaagcccaaggattagacatcacaacatatggggagtcaaacttggtagctgagcctcagaaggtaaataaaattgaaattcactatgccaagactgccaaaaagatggacatgaagaaactgaagcagagcatgtggagtctgctgacagcgctctccggaaaggaggcagatgcagaggcaaaccacagggaagctggaaaagaagcggccctggcagaagtggctgacgagaagatgcttagcgggctcacgaaggacctgcagaggagcctgccccctgtcatggctcagaacctctccatacctctggcttttgcctgtctcctacatttagccaatgaaaagaatctaaaactggaaggaacagaggacctctctgatgttcttgtgaggcaaggagattgagttcactatggagaagtcagcagcaggaggcccatcccttactcagttgccgggacatccccagtctcgggggaagaagatgccatgggcttatacccaggctgtagccaactaccaacgtgcctgtttgtttgttgctctttccttctctccatcatagtctgggtgccagcgccctgaagctccgtgctcaactgattaaactttactgccctatggtgaccatctaggagaggggagggcagagggggtgagggtactattctggattgagaaaacctatatccattctttatatcaatgtatagttttagtctcctaaattgatctgttattttccaaactattctcttgtagaaaattttccagtgggcacttaatggtgcccttgaagaacttcctaatccatgtacataaaatacatcatatgtacacttataaatgtatatagaatgctcaaaaataaaattcttaataatagaactggcaaaata

SEQ ID NO: 451962 - DNA, 2742 bp, Homo sapiens
ggcccggcccgccggcgacgtcacgcggccgttacggcgctcaggcgtctcgacgcgcgcgatttaaaaccagctcaggagacgccaaggaaagatgggacctcccggcccagagcgtgtgttcccgatgcccctgcccaggaaggcgcctctcaatattcctggcaccccagtcctcgaagactttcctcagaatgacgatgagaaggagcggctgcagcggaggcgctcgagggtctttgatctgcagttcagcactgactcacctcgcttattggcctccccctccagcaggagtattgacatttcagctactatccccaagtttacaaacacgcagattacggaacattactccacctgtatcaaactgtccactgaaaataaaatcactaccaagaatgcttttggtttgcacttgattgattttatgtcagagattcttaaacagaaagacaccgaaccaaccaactttaaagtggctgcgggtactctggatgccagcaccaagatctatgctgtgcgcgtggatgccgtccatgccgatgtatacagagtccttggggggctgggcaaagatgcaccgtctttggaagaagtagaaggccatgttgctgatggaagtgctactgaaatgggaacaaccaaaaaggctgtaaagccaaagaagaagcacttacacagaactattgagcagaacataaacaacctcaatgtctccgaagcagatcggaagtgtgagattgatcccatgtttcagaagacagcagcctcatttgatgagtgcagcacagcaggggtgtttctgtccactctccactgccaggactacagaagtgaactgctgtttccctctgatgtccagactctctccacgggagaacctctcgagttgccagagttaggttgtgtagaaatgacagatttaaaagcgcccttgcagcagtgtgcagaagatcgccagatctgcccttccctggccgggttccagtttacacagtgggacagtgaaacacataatgagtctgtgtcggccctggtagacaagtttaagaagaatgaccaggtatttgacatcaatgctgaagttgacgagagtgactgtggagacttccccgatgggtccctgggggatgactttgatgccaacgatgaacctgaccacaccgcagttggggatcatgaagagttcaggagctggaaggagccctgccaggttcagagctgccaggaagaaatgatttcccttggggatggagacatcaggaccatgtgcccccttctgtctatgaaacctggagaatattcttatttcagtcctcggaccatgtcgatgtgggctggcccggatcactggcgctttaggcctcgacgcaaacaagatgctccttcccaatcagaaaacaaaaagaagagtacaaaaaaagattttgaaattgactttgaagatgatattgactttgatgtatattttagaaaaacaaaggctgctactattctgaccaagtccactttggagaaccagaattggagagctaccacccttcctacagatttcaactacaatgttgacactctggtccagcttcacctcaaaccaggcaccaggttacttaagatggcccagggccatagggtagagactgagcattatgaagaaattgaagactatgattacaacaaccctaacgacacctccaacttttgccctggattacaggctgctgacagtgatgatgaagatttggatgacttatttgtgggacctgttgggaactctgacctctcaccttatccttgccatccacctaagacagcacaacagaatggtgacactccagaagcccaaggattagacatcacaacatatggggagtcaaacttggtagctgagcctcagaaggtaaataaaattgaaattcactatgccaagactgccaaaaagatggacatgaagaaactgaagcagagcatgtggagtctgctgacagcgctctccggaaaggaggcagatgcagaggcaaaccacagggaagctggaaaagaagcggccctggcagaagtggctgacgagaagatgcttagcgggctcacgaaggacctgcagaggagcctgccccctgtcatggctcagaacctctccatacctctggcttttgcctgtctcctacatttagccaatgaaaagaatctaaaactggaaggaacagaggacctctctgatgttcttgtgaggcaaggagattgagttcactatggagaagtcagcagcaggaggcccatcccttactcagttgccgggacatccccagtctcgggggaagaagatgccatgggcttatacccaggctgtagccaactaccaacgtgcctgtttgtttgttgctctttccttctctccatcatagtctgggtgccagcgccctgaagctccgtgctcaactgattaaactttactgccctatggtgaccatctaggagaggggagggcagagggggtgagggtactattctggattgagaaaacctatatccattctttatatcaatgtatagttttagtctcctaaattgatctgttattttccaaactattctcttgtagaaaattttccagtgggcacttaatggtgcccttgaagaacttcctaatccatgtacataaaatacatcatatgtacacttataaatgtatatagaatgctcaaaaataaaattcttaataatagaactggcaaaata

SEQ ID NO: 451963 - DNA, 1950 bp, Homo sapiens
ggcccggcccgccggcgacgtcacgcggccgttacggcgctcaggcgtctcgacgcgcgcgatttaaaaccagctcaggagacgccaaggaaagatgggacctcccggcccagagacgcgaggacacccccacagtgcctcctctccttcagagcgtgtgttcccgatgcccatctgcccttccctggccgggttccagtttacacagtgggacagtgaaacacataatgagtctgtgtcggccctggtagacaagtttaagaagaatgaccaggtatttgacatcaatgctgaagttgacgagagtgactgtggagacttccccgatgggtccctgggggatgactttgatgccaacgatgaacctgaccacaccgcagttggggatcatgaagagttcaggagctggaaggagccctgccaggttcagagctgccaggaagaaatgatttcccttggggatggagacatcaggaccatgtgcccccttctgtctatgaaacctggagaatattcttatttcagtcctcggaccatgtcgatgtgggctggcccggatcactggcgctttaggcctcgacgcaaacaagatgctccttcccaatcagaaaacaaaaagaagagtacaaaaaaagattttgaaattgactttgaagatgatattgactttgatgtatattttagaaaaacaaaggctgctactattctgaccaagtccactttggagaaccagaattggagagctaccacccttcctacagatttcaactacaatgttgacactctggtccagcttcacctcaaaccaggcaccaggttacttaagatggcccagggccatagggtagagactgagcattatgaagaaattgaagactatgattacaacaaccctaacgacacctccaacttttgccctggattacaggctgctgacagtgatgatgaagatttggatgacttatttgtgggacctgttgggaactctgacctctcaccttatccttgccatccacctaagacagcacaacagaatggtgacactccagaagcccaaggattagacatcacaacatatggggagtcaaacttggtagctgagcctcagaaggtaaataaaattgaaattcactatgccaagactgccaaaaagatggacatgaagaaactgaagcagagcatgtggagtctgctgacagcgctctccggaaaggaggcagatgcagaggcaaaccacagggaagctggaaaagaagcggccctggcagaagtggctgacgagaagatgcttagcgggctcacgaaggacctgcagaggagcctgccccctgtcatggctcagaacctctccatacctctggcttttgcctgtctcctacatttagccaatgaaaagaatctaaaactggaaggaacagaggacctctctgatgttcttgtgaggcaaggagattgagttcactatggagaagtcagcagcaggaggcccatcccttactcagttgccgggacatccccagtctcgggggaagaagatgccatgggcttatacccaggctgtagccaactaccaacgtgcctgtttgtttgttgctctttccttctctccatcatagtctgggtgccagcgccctgaagctccgtgctcaactgattaaactttactgccctatggtgaccatctaggagaggggagggcagagggggtgagggtactattctggattgagaaaacctatatccattctttatatcaatgtatagttttagtctcctaaattgatctgttattttccaaactattctcttgtagaaaattttccagtgggcacttaatggtgcccttgaagaacttcctaatccatgtacataaaatacatcatatgtacacttataaatgtatatagaatgctcaaaaataaaattcttaataatagaactggcaaaata

SEQ ID NO: 451964 - DNA, 2127 bp, Homo sapiens
ggcccggcccgccggcgacgtcacgcggccgttacggcgctcaggcgtctcgacgcgcgcgatttaaaaccagctcaggagacgccaaggaaagatgggacctcccggcccagcactgccagccacaatgaataactcttcttcagagacgcgaggacacccccacagtgcctcctctccttcagagcgtgtgttcccgatgcccctgcccaggaaggcgcctctcaatattcctggcaccccagtcctcgaagactttcctcagaatgacgatgagaaggagcggctgcagcggaggcgctcgagggtctttgatctgcagttcagcactgactcacctcgcttattggcctccccctccagcaggagtattgacatttcagctactatccccaagtttacaaacacgcagattacggaacattactccacctgtatcaaactgtccactgaaaataaaatcactaccaagaatgcttttggtttgcacttgattgattttatgtcagagattcttaaacagaaagacaccgaaccaaccaactttaaagtggctgcgggtactctggatgccagcaccaagatctatgctgtgcgcgtggatgccgtccatgccgatgtatacagagtccttggggggctgggcaaagatgcaccgtctttggaagaagtagaaggccatgttgctgatggaagtgctactgaaatgggaacaaccaaaaaggctgtaaagccaaagaagaagcacttacacagaactattgagcagaacataaacaacctcaatgtctccgaagcagatcggaagtgtgagattgatcccatgtttcagaagacagcagcctcatttgatgagtgcagcacagcaggggtgtttctgtccactctccactgccaggactacagaagtgaactgctgtttccctctgatgtccagactctctccacgggagaacctctcgagttgccagagttaggttgtgtagaaatgacagatttaaaagcgcccttgcagcagtgtgcagaagatcgccagatctgcccttccctggccgggttccagtttacacagtgggacagtgaaacacataatgagtctgtgtcggccctggtagacaagtttaagaagaatgaccaggtatttgacatcaatgctgaagttgacgagagtgactgtggagacttccccgatgggtccctgggggatgactttgatgccaacgatgaacctgaccacaccgcagttggggatcatgaagagttcaggagctggaaggagccctgccaggttcagagctgccaggaagaaatgatttcccttggggatggagacatcaggaccatgtgcccccttctgtctatgaaacctggagaatattcttatttcagtcctcggaccatgtcgatgtgggctggcccggatcactggcgctttaggcctcgacgcaaacaagatgctccttcccaatcagaaaacaaaaagaagagtacaaaaaaagattttgaaattgactttgaagatgatattgactttgatgtatattttagaaaaacaaaggctgctactattctgaccaagtccactttggagaaccagaattggagagctaccacccttcctacagatttcaactacaatgttgacactctggtccagcttcacctcaaaccaggcaccaggttacttaagatggcccagggccatagggtagagactgagcattatgaagaaattgaagactatgattacaacaaccctaacgacacctccaacttttgccctggattacaggctgctgacagtgatgatgaagatttggatgacttatttgtgggacctgttgggaactctgacctctcaccttatccttgccatccacctaagacagcacaacagaatggtgacactccagaagcccaaggattagacatcacaacatatggggagtcaaacttggtagctgagcctcagaaggtaaataaaattgaaattcactatgccaagactgccaaaaagatggacatgaagaaactgaagcagagcatgtggagtctgctgacagcgctctccggaaaggaggcagatgcagaggtcagatgctcttgcctgttctctaggtgcccagc

SEQ ID NO: 451965 - DNA, 1570 bp, Homo sapiens
ctgaaatttaaggtctgtgtcggccctggtttagacaagtttaagaatgaatgaccacggaagaaatgatttcccttggggatggagacatcaggaccatgtgcccccttctgtctatgaaacctggagaatattcttatttcagtcctcggaccatgtcgatgtgggctggcccggatcactggcgctttaggcctcgacgcaaacaagatgctccttcccaatcagaaaacaaaaagaagagtacaaaaaaagattttgaaattgactttgaagatgatattgactttgatgtatattttagaaaaacaaaggctgctactattctgaccaagtccactttggagaaccagaattggagagctaccacccttcctacagatttcaactacaatgttgacactctggtccagcttcacctcaaaccaggcaccaggttacttaagatggcccagggccatagggtagagactgagcattatgaagaaattgaagactatgattacaacaaccctaacgacacctccaacttttgccctggattacaggctgctgacagtgatgatgaagatttggatgacttatttgtgggacctgttgggaactctgacctctcaccttatccttgccatccacctaagacagcacaacagaatggtgacactccagaagcccaaggattagacatcacaacatatggggagtcaaacttggtagctgagcctcagaaggtaaataaaattgaaattcactatgccaagactgccaaaaagatggacatgaagaaactgaagcagagcatgtggagtctgctgacagcgctctccggaaaggaggcagatgcagaggcaaaccacagggaagctggaaaagaagcggccctggcagaagtggctgacgagaagatgcttagcgggctcacgaaggacctgcagaggagcctgccccctgtcatggctcagaacctctccatacctctggcttttgcctgtctcctacatttagccaatgaaaagaatctaaaactggaaggaacagaggacctctctgatgttcttgtgaggcaaggagattgagttcactatggagaagtcagcagcaggaggcccatcccttactcagttgccgggacatccccagtctcgggggaagaagatgccatgggcttatacccaggctgtagccaactaccaacgtgcctgtttgtttgttgctctttccttctctccatcatagtctgggtgccagcgccctgaagctccgtgctcaactgattaaactttactgccctatggtgaccatctaggagaggggagggcagagggggtgagggtactattctggattgagaaaacctatatccattctttatatcaatgtatagttttagtctcctaaattgatctgttattttccaaactattctcttgtagaaaattttccagtgggcacttaatggtgcccttgaagaacttcctaatccatgtacataaaatacatcatatgtacacttataaatgtatatagaatgctcaaaaataaaattcttaataatagaactggcaaaata

SEQ ID NO: 451966 - DNA, 252 bp, Homo sapiens
tggcaattatggttatcgaattccttttaactcccgctcaaaaggtcttaggttgataacagacacctctctaatagggtttacgtgaaacaggatgataactagaggcacctagaagttcatcgtagtgtaactcactgagtgaaccatcagatggtctcttcttgctttgtaaacatggagtctatttcaagggtgtttctgagctcctctgcagcgtccaccaaactcgaagagctgtttcttgcccag

SEQ ID NO: 451967 - DNA, 2814 bp, Homo sapiens
ggcccggcccgccggcgacgtcacgcggccgttacggcgctcaggcgtctcgacgcgcgcgatttaaaaccagctcaggagacgccaaggaaagatgggacctcccggcccagcactgccagccacaatgaataactcttcttcagagacgcgaggacacccccacagtgcctcctctccttcagagcgtgtgttcccgatgcccctgcccaggaaggcgcctctcaatattcctggcaccccagtcctcgaagactttcctcagaatgacgatgagaaggagcggctgcagcggaggcgctcgagggtctttgatctgcagttcagcactgactcacctcgcttattggcctccccctccagcaggagtattgacatttcagctactatccccaagtttacaaacacgcagattacggaacattactccacctgtatcaaactgtccactgaaaataaaatcactaccaagaatgcttttggtttgcacttgattgattttatgtcagagattcttaaacagaaagacaccgaaccaaccaactttaaagtggctgcgggtactctggatgccagcaccaagatctatgctgtgcgcgtggatgccgtccatgccgatgtatacagagtccttggggggctgggcaaagatgcaccgtctttggaagaagtagaaggccatgttgctgatggaagtgctactgaaatgggaacaaccaaaaaggctgtaaagccaaagaagaagcacttacacagaactattgagcagaacataaacaacctcaatgtctccgaagcagatcggaagtgtgagattgatcccatgtttcagaagacagcagcctcatttgatgagtgcagcacagcaggggtgtttctgtccactctccactgccaggactacagaagtgaactgctgtttccctctgatgtccagactctctccacgggagaacctctcgagttgccagagttaggttgtgtagaaatgacagatttaaaagcgcccttgcagcagtgtgcagaagatcgccagatctgcccttccctggccgggttccagtttacacagtgggacagtgaaacacataatgagtctgtgtcggccctggtagacaagtttaagaagaatgaccaggtatttgacatcaatgctgaagttgacgagagtgactgtggagacttccccgatgggtccctgggggatgactttgatgccaacgatgaacctgaccacaccgcagttggggatcatgaagagttcaggagctggaaggagccctgccaggttcagagctgccaggaagaaatgatttcccttggggatggagacatcaggaccatgtgcccccttctgtctatgaaacctggagaatattcttatttcagtcctcggaccatgtcgatgtgggctggcccggatcactggcgctttaggcctcgacgcaaacaagatgctccttcccaatcagaaaacaaaaagaagagtacaaaaaaagattttgaaattgactttgaagatgatattgactttgatgtatattttagaaaaacaaaggctgctactattctgaccaagtccactttggagaaccagaattggagagctaccacccttcctacagatttcaactacaatgttgacactctggtccagcttcacctcaaaccaggcaccaggttacttaagatggcccagggccatagggtagagactgagcattatgaagaaattgaagactatgattacaacaaccctaacgacacctccaacttttgccctggattacaggctgctgacagtgatgatgaagatttggatgacttatttgtgggacctgttgggaactctgacctctcaccttatccttgccatccacctaagacagcacaacagaatggtgacactccagaagcccaaggattagacatcacaacatatggggagtcaaacttggtagctgagcctcagaaggtaaataaaattgaaattcactatgccaagactgccaaaaagatggacatgaagaaactgaagcagagcatgtggagtctgctgacagcgctctccggaaaggaggcagatgcagaggcaaaccacagggaagctggaaaagaagcggccctggcagaagtggctgacgagaagatgcttagcgggctcacgaaggacctgcagaggagcctgccccctgtcatggctcagaacctctccatacctctggcttttgcctgtctcctacatttagccaatgaaaagaatctaaaactggaaggaacagaggacctctctgatgttcttgtgaggcaaggagattgagttcactatggagaagtcagcagcaggaggcccatcccttactcagttgccgggacatccccagtctcgggggaagaagatgccatgggcttatacccaggctgtagccaactaccaacgtgcctgtttgtttgttgctctttccttctctccatcatagtctgggtgccagcgccctgaagctccgtgctcaactgattaaactttactgccctatggtgaccatctaggagaggggagggcagagggggtgagggtactattctggattgagaaaacctatatccattctttatatcaatgtatagttttagtctcctaaattgatctgttattttccaaactattctcttgtagaaaattttccagtgggcacttaatggtgcccttgaagaacttcctaatccatgtacataaaatacatcatatgtacacttataaatgtatatagaatgctcaaaaataaaattcttaataatagaactggcaaaata

SEQ ID NO: 451968 - DNA, 4506 bp, Homo sapiens
ggcccggcccgccggcgacgtcacgcggccgttacggcgctcaggcgtctcgacgcgcgcgatttaaaaccagctcaggagacgccaaggaaagatgggacctcccggcccagcactgccagccacaatgaataactcttcttcagagacgcgaggacacccccacagtgcctcctctccttcagagcgtgtgttcccgatgcccctgcccaggaaggcgcctctcaatattcctggcaccccagtcctcgaagactttcctcagaatgacgatgagaaggagcggctgcagcggaggcgctcgagggtctttgatctgcagttcagcactgactcacctcgcttattggcctccccctccagcaggagtattgacatttcagctactatccccaagtttacaaacacgcagattacggaacattactccacctgtatcaaactgtccactgaaaataaaatcactaccaagaatgcttttggtttgcacttgattgattttatgtcagagattcttaaacagaaagacaccgaaccaaccaactttaaagtggctgcgggtactctggatgccagcaccaagatctatgctgtgcgcgtggatgccgtccatgccgatgtatacagagtccttggggggctgggcaaagatgcaccgtctttggaagaagtagaaggccatgttgctgatggaagtgctactgaaatgggaacaaccaaaaaggctgtaaagccaaagaagaagcacttacacagaactattgagcagaacataaacaacctcaatgtctccgaagcagatcggaagtgtgagattgatcccatgtttcagaagacagcagcctcatttgatgagtgcagcacagcaggggtgtttctgtccactctccactgccaggactacagaagtgaactgctgtttccctctgatgtccagactctctccacgggagaacctctcgagttgccagagttaggttgtgtagaaatgacagatttaaaagcgcccttgcagcagtgtgcagaagatcgccagatctgcccttccctggccgggttccagtttacacagtgggacagtgaaacacataatgagtctgtgtcggccctggtagacaagtttaagaagaatgaccaggtatttgacatcaatgctgaagttgacgagagtgactgtggagacttccccgatgggtccctgggggatgactttgatgccaacgatgaacctgaccacaccgcagttggggatcatgaagagttcaggagctggaaggagccctgccaggttcagagctgccaggaagaaatgatttcccttggggatggagacatcaggaccatgtgcccccttctgtctatgaaacctggagaatattcttatttcagtcctcggaccatgtcgatgtgggctggcccggatcactggcgctttaggcctcgacgcaaacaagatgctccttcccaatcagaaaacaaaaagaagagtacaaaaaaagattttgaaattgactttgaagatgatattgactttgatgtatattttagaaaaacaaaggctgctactattctgaccaagtccactttggagaaccagaattggagagctaccacccttcctacagatttcaactacaatgttgacactctggtccagcttcacctcaaaccaggcaccaggttacttaagatggcccagggccatagggtagagactgagcattatgaagaaattgaagactatgattacaacaaccctaacgacacctccaacttttgccctggattacaggctgctgacagtgatgatgaagatttggatgacttatttgtgggacctgttgggaactctgacctctcaccttatccttgccatccacctaagacagcacaacagaatggtgacactccagaagcccaaggattagacatcacaacatatggggagtcaaacttggtagctgagcctcagaaggtaaataaaattgaaattcactatgccaagactgccaaaaagatggacatgaagaaactgaagcagagcatgtggagtctgctgacagcgctctccggaaaggaggcagatgcagaggcaaaccacagggaagctggaaaagaagcggccctggcagaagtggctgacgagaagatgcttagcgggctcacgaaggacctgcagaggagcctgccccctgtcatggctcagaacctctccatacctctggcttttgcctgtctcctacatttagccaatgaaaagaatctaaaactggaaggaacagaggacctctctgatgttcttgtgaggcaaggagattgagttcactatggagaagtcagcagcaggaggcccatcccttactcagttgccgggacatccccagtctcgggggaagaagatgccatgggcttatacccaggctgtagccaactaccaacgtgcctgtttgtttgttgctctttccttctctccatcatagtctgggtgccagcgccctgaagctccgtgctcaactgattaaactttactgccctatggtgaccatctaggagaggggagggcagagggggtgagggtactattctggattgagaaaacctatatccattctttatatcaatgtatagttttagtctcctaaattgatctgttattttccaaactattctcttgtagaaaattttccagtgggcacttaatggtgcccttgaagaacttcctaatccatgtacataaaatacatcatatgtacacttataaatgtatatagaatgctcaaaaataaaattcttaataatagaactggcaaaatatttgagtgtccactagatgagtatcagacctagtccttacccttagggggatgcagtcctggttgttatccaggatacacacctgtcagtataaggcagaagatgcctaagggccaagatggtttgcctcggaggagaatggaagagagagattgctgactggacattcagatgcaagactgggtcctgcttaaatcccaggattctgctggagggagctgatagtgatacttgtcccttctgtacattgcttcatgtagccttctcagcatccctaggagaaacttactattgtgactctcatgttggaggaggaaacggacacccaaggtagaggaacttgcaaaagggcagccggcaaactgtcaggggtggcctgagcctggcaatctgcctccagagtctgctctcggccattgtgctatgtgctacctggataggtcatacaggctcagcagtgggtggagagcagtgctcagatttgtccatctccacagaatgcagcacacacacaaatgtacaagttcttcccctaacctcagaggaataggggaattaactttgcttgcaatttggaacaatattatagatgttgatccaagtagttctgttactggctggtcctggatctctgccagaacacccgtcatcattgactggctaaatagagatcttggatataggccagaagcagtgaagtatataattggaaattggctcctgataataacttcctttttagcccaaaaccacaccaaacaaaaataatcccctccccacaggaatatgctttccaaattgtgtccaaaacattacctgctctgttatattgagaaggttagagacttcagagcatgcttagaaaaagcagtggtgccacaggtgagactccacactctgtcttgctggggctgaagcctccatcactttcccaggccaggttagtgctgggcttcttgctttccttctattcctgagagtagaactggctaagcccattccttccctcagtcagccccacttctctatagtgggttctgggggtggggggctgaattaccagtaaaactagaaagattgggaccaagtgcagtggcccacacctgtaaatcctagcgctttgaaaggaagaggcaggaggattgcttgaagtcaggagttcaagaccagcctgggcaaaatagaaccccatctttaaaaaaaaagtttaaaaattagccaggtacggaggtgtgtgcctgtaatcccagctactcagaaggctgaggtgggataatcacttgagcccaggagtttgaggctgcagtgagctgtgatcacactactgcattccagccaggacaacagagtgagatcctatctcttaaacaaaaaaaaaaactggcgagttcaataccaacttctacaatgaaatccccttccccccacaaccctgcttctcctaagtttccctcattacatggttgctgtgggctatgtgtgctgtggtctgaatgtttgtgtctaaaattcacatgttggtattaagagatagggcctttgggaggtgattaggttatgagggcagatccctcgtgaatgggattagtgctcttataaaagaggcctgaggaagcttgttcgttcctcttgcccttctgccatgtaaggatgcaatgagaaggcaccatctgtgagcaaggagcccctcac

SEQ ID NO: 451969 - DNA, 3114 bp, Homo sapiens
ggcccggcccgccggcgacgtcacgcggccgttacggcgctcaggcgtctcgacgcgcgcgatttaaaaccagctcaggagacgccaaggaaagatgggacctcccggcccagcactgccagccacaatgaataactcttcttcagagacgcgaggacacccccacagtgcctcctctccttcagagcgtgtgttcccgatgcccctgcccaggaaggcgcctctcaatattcctggcaccccagtcctcgaagactttcctcagaatgacgatgagaaggagcggctgcagcggaggcgctcgagggtctttgatctgcagttcagcactgactcacctcgcttattggcctccccctccagcaggagtattgacatttcagctactatccccaagtttacaaacacgcagattacggaacattactccacctgtatcaaactgtccactgaaaataaaatcactaccaagaatgcttttggtttgcacttgattgattttatgtcagagattcttaaacagaaagacaccgaaccaaccaactttaaagtggctgcgggtactctggatgccagcaccaagatctatgctgtgcgcgtggatgccgtccatgccgatgtatacagagtccttggggggctgggcaaagatgcaccgtctttggaagaagtagaaggccatgttgctgatggaagtgctactgaaatgggaacaaccaaaaaggctgtaaagccaaagaagaagcacttacacagaactattgagcagaacataaacaacctcaatgtctccgaagcagatcggaagtgtgagattgatcccatgtttcagaagacagcagcctcatttgatgagtgcagcacagcaggggtgtttctgtccactctccactgccaggactacagaagtgaactgctgtttccctctgatgtccagactctctccacgggagaacctctcgagttgccagagttaggttgtgtagaaatgacagatttaaaagcgcccttgcagcagtgtgcagaagatcgccagatctgcccttccctggccgggttccagtttacacagtgggacagtgaaacacataatgagtctgtgtcggccctggtagacaagtttaagaagaatgaccaggtatttgacatcaatgctgaagttgacgagagtgactgtggagacttccccgatgggtccctgggggatgactttgatgccaacgatgaacctgaccacaccgcagttggggatcatgaagagttcaggagctggaaggagccctgccaggttcagagctgccaggaagaaatgatttcccttggggatggagacatcaggaccatgtgcccccttctgtctatgaaacctggagaatattcttatttcagtcctcggaccatgtcgatgtgggctggcccggatcactggcgctttaggcctcgacgcaaacaagatgctccttcccaatcagaaaacaaaaagaagagtacaaaaaaagattttgaaattgactttgaagatgatattgactttgatgtatattttagaaaaacaaaggctgctactattctgaccaagtccactttggagaaccagaattggagagctaccacccttcctacagatttcaactacaatgttgacactctggtccagcttcacctcaaaccaggcaccaggttacttaagatggcccagggccatagggtagagactgagcattatgaagaaattgaagactatgattacaacaaccctaacgacacctccaacttttgccctggattacaggctgctgacagtgatgatgaagatttggatgacttatttgtgggacctgttgggaactctgacctctcaccttatccttgccatccacctaagacagcacaacagaatggtgacactccagaagcccaaggattagacatcacaacatatggggagtcaaacttggtagctgagcctcagaaggtaaataaaattgaaattcactatgccaagactgccaaaaagatggacatgaagaaactgaagcagagcatgtggagtctgctgacagcgctctccggaaaggaggcagatgcagaggcaaaccacagggaagctggaaaagaagcggccctggcagaagtggctgacgagaagatgcttagcgggctcacgaaggacctgcagaggagcctgccccctgtcatggctcagaacctctccatacctctggcttttgcctgtctcctacatttagccaatgaaaagaatctaaaactggaaggaacagaggacctctctgatgttcttgtgaggcaaggagattgagttcactatggagaagtcagcagcaggaggcccatcccttactcagttgccgggacatccccagtctcgggggaagaagatgccatgggcttatacccaggctgtagccaactaccaacgtgcctgtttgtttgttgctctttccttctctccatcatagtctgggtgccagcgccctgaagctccgtgctcaactgattaaactttactgccctatggtgaccatctaggagaggggagggcagagggggtgagggtactattctggattgagaaaacctatatccattctttatatcaatgtatagttttagtctcctaaattgatctgttattttccaaactattctcttgtagaaaattttccagtgggcacttaatggtgcccttgaagaacttcctaatccatgtacataaaatacatcatatgtacacttataaatgtatatagaatgctcaaaaataaaattcttaataatagaactggcaaaataaaaaaaaaaaaaaaaaaaaaaaaaaaaaaaaggggggggggggaaaaatttccccgggggggccattacgcgggtcccccagtctttgttggtcacaagggggcccctataggggaggccgataataaatacacagaggcccgtgggcccgcgttttaaaaaaccgtggcgcgggaaaacagggccccccggggcacctgtgggaagagacccttactccgtggcgggggcacatcagggcacaatctcccaccagaaatttaagacccaggggaaactttaacatttacaggggaacag

SEQ ID NO: 451970 - DNA, 2655 bp, Homo sapiens
gctttttaagccaatggcatttgttagtgacttatagaaggagaccagcagcaaggatacacgtccagatgtattataaaaaagccatttgacacagtgtacacttgccaccacatactgtcttctggagcagtatatgtttatctcctgactataaccagcctttcttttgaaccgggattttatctgctcaattagaaagccacttttgttgggtgcggtggttcacaactgtagtcccagtactttgggaggccaaggtgggtggatcacttaaggtcaggagttcaagaccagcctggctaatatgatgaaaccccgtctctactaaaaatacaaaaattagccagatgtagtggtgcgtacctgtagtcccactactctggaggctgaggcccaagaatcgcttgagcccgggaggcagaggttgcagtgagcccaatatcatgccactgcactccagcctgggcggcagagcaagactccatctccaaaaaaaaaaaaaaaaaacaaaaacaaaccacttttgaccatgagtggagatatttcagtccagtgtatatacctgctaatgagtggggccaaatgcatgagaatttatctttcccttggctacatgccgtaaatcttcagtttcttctctctctgtgttcagattgatcccatgtttcagaagacagcagcctcatttgatgagtgcagcacagcaggggtgtttctgtccactctccactgccaggactacagaagtgaactgctgtttccctctgatgtccagactctctccacgggagaacctctcgagttgccagagttaggttgtgtagaaatgacagatttaaaagcgcccttgcagcagtgtgcagaagatcgccagatctgcccttccctggccgggttccagtttacacagtgggacagtgaaacacataatgagtctgtgtcggccctggtagacaagtttaagaagaatgaccaggtatttgacatcaatgctgaagttgacgagagtgactgtggagacttccccgatgggtccctgggggatgactttgatgccaacgatgaacctgaccacaccgcagttggggatcatgaagagttcaggagctggaaggagccctgccaggttcagagctgccaggaagaaatgatttcccttggggatggagacatcaggaccatgtgcccccttctgtctatgaaacctggagaatattcttatttcagtcctcggaccatgtcgatgtgggctggcccggatcactggcgctttaggcctcgacgcaaacaagatgctccttcccaatcagaaaacaaaaagaagagtacaaaaaaagattttgaaattgactttgaagatgatattgactttgatgtatattttagaaaaacaaaggctgctactattctgaccaagtccactttggagaaccagaattggagagctaccacccttcctacagatttcaactacaatgttgacactctggtccagcttcacctcaaaccaggcaccaggttacttaagatggcccagggccatagggtagagactgagcattatgaagaaattgaagactatgattacaacaaccctaacgacacctccaacttttgccctggattacaggctgctgacagtgatgatgaagatttggatgacttatttgtgggacctgttgggaactctgacctctcaccttatccttgccatccacctaagacagcacaacagaatggtgacactccagaagcccaaggattagacatcacaacatatggggagtcaaacttggtagctgagcctcagaaggtaaataaaattgaaattcactatgccaagactgccaaaaagatggacatgaagaaactgaagcagagcatgtggagtctgctgacagcgctctccggaaaggaggcagatgcagaggcaaaccacagggaagctggaaaagaagcggccctggcagaagtggctgacgagaagatgcttagcgggctcacgaaggacctgcagaggagcctgccccctgtcatggctcagaacctctccatacctctggcttttgcctgtctcctacatttagccaatgaaaagaatctaaaactggaaggaacagaggacctctctgatgttcttgtgaggcaaggagattgagttcactatggagaagtcagcagcaggaggcccatcccttactcagttgccgggacatccccagtctcgggggaagaagatgccatgggcttatacccaggctgtagccaactaccaacgtgcctgtttgtttgttgctctttccttctctccatcatagtctgggtgccagcgccctgaagctccgtgctcaactgattaaactttactgccctatggtgaccatctaggagaggggagggcagagggggtgagggtactattctggattgagaaaacctatatccattctttatatcaatgtatagttttagtctcctaaattgatctgttattttccaaactattctcttgtagaaaattttccagtgggcacttaatggtgcccttgaagaacttcctaatccatgtacataaaatacatcatatgtacacttataaatgtatatagaatgctcaaaaataaaattcttaataatagaactggcaaaata

SEQ ID NO: 451971 - DNA, 1859 bp, Homo sapiens
agattttgaaattgactttgaagatgatattgactttgatgtatattttagaaaaacaaaggctgctactattctgaccaagtccactttggagaaccagaattggagagctaccacccttcctacagatttcaactacaatctgtgtcggccctggtagacaagtttaagaagaatgaccaggtatttgacatcaatgctgaagttgacgagagtgactgtggagacttccccgatgggtccctgggggatgactttgatgccaacgatgaacctgaccacaccgcagttggggatcatgaagagttcaggagctggaaggagccctgccaggttcagagctgccaggaagaaatgatttcccttggggatggagacatcaggaccatgtgcccccttctgtctatgaaacctggagaatattcttatttcagtcctcggaccatgtcgatgtgggctggcccggatcactggcgctttaggcctcgacgcaaacaagatgctccttcccaatcagaaaacaaaaagaagagtacaaaaaaagattttgaaattgactttgaagatgatattgactttgatgtatattttagaaaaacaaaggctgctactattctgaccaagtccactttggagaaccagaattggagagctaccacccttcctacagatttcaactacaatgttgacactctggtccagcttcacctcaaaccaggcaccaggttacttaagatggcccagggccatagggtagagactgagcattatgaagaaattgaagactatgattacaacaaccctaacgacacctccaacttttgccctggattacaggctgctgacagtgatgatgaagatttggatgacttatttgtgggacctgttgggaactctgacctctcaccttatccttgccatccacctaagacagcacaacagaatggtgacactccagaagcccaaggattagacatcacaacatatggggagtcaaacttggtagctgagcctcagaaggtaaataaaattgaaattcactatgccaagactgccaaaaagatggacatgaagaaactgaagcagagcatgtggagtctgctgacagcgctctccggaaaggaggcagatgcagaggcaaaccacagggaagctggaaaagaagcggccctggcagaagtggctgacgagaagatgcttagcgggctcacgaaggacctgcagaggagcctgccccctgtcatggctcagaacctctccatacctctggcttttgcctgtctcctacatttagccaatgaaaagaatctaaaactggaaggaacagaggacctctctgatgttcttgtgaggcaaggagattgagttcactatggagaagtcagcagcaggaggcccatcccttactcagttgccgggacatccccagtctcgggggaagaagatgccatgggcttatacccaggctgtagccaactaccaacgtgcctgtttgtttgttgctctttccttctctccatcatagtctgggtgccagcgccctgaagctccgtgctcaactgattaaactttactgccctatggtgaccatctaggagaggggagggcagagggggtgagggtactattctggattgagaaaacctatatccattctttatatcaatgtatagttttagtctcctaaattgatctgttattttccaaactattctcttgtagaaaattttccagtgggcacttaatggtgcccttgaagaacttcctaatccatgtacataaaatacatcatatgtacacttataaatgtatatagaatgctcaaaaataaaattcttaataatagaactggcaaaata

SEQ ID NO: 451972 - DNA, 1157 bp, Homo sapiens
ggcccggcccgccggcgacgtcacgcggccgttacggcgctcaggcgtctcgacgcgcgcgatttaaaaccagctcaggagacgccaaggaaagatgggacctcccggcccagcactgccagccacaatgaataactcttcttcagagacgcgaggacacccccacagtgcctcctctccttcagagcgtgtgttcccgatgcccctgcccaggaaggcgcctctcaatattcctggcaccccagtcctcgaagactttcctcagaatgacgatgagaaggagcggctgcagcggaggcgctcgagggtctttgatctgcagttcagcactgactcacctcgcttattggcctccccctccagcaggagtattgacatttcagctactatccccaagtttacaaacacgcagattacggaacattactccacctgtatcaaactgtccactgaaaataaaatcactaccaagaatgcttttggtttgcacttgattgattttatgtcagagattcttaaacagaaagacaccgaaccaaccaactttaaagtggctgcgggtactctggatgccagcaccaagatctatgctgtgcgcgtggatgccgtccatgccgatgtatacagagtccttggggggctgggcaaagatgcaccgtctttggaagaagtagaaggccatgttgctgatggaagtgctactgaaatgggaacaaccaaaaaggctgtaaagccaaagaagaagcacttacacagaactattgagcagaacataaacaacctcaatgtctccgaagcagatcggaagtgtgagattgatcccatgtttcagaagacagcagcctcatttgatgagtgcagcacagcaggggtgtttctgtccactctccactgccaggactacagaagtgaactgctgtttccctctgatgtccagactctctccacgggagaacctctcgagttgccagagttaggttgtgtagaaatgacagatttaaaagcgcccttgcagcagtgtgcagaagatcgccagatctgcccttccctggccgggttccagtttacacagtgggacagtgaaacacataatgagtctgtctcgctcctgctagacacagctcaagaagcactgactttgcttgcatcctggtgat

SEQ ID NO: 451973 - DNA, 2525 bp, Homo sapiens
cggccgcccgcccggtcgggcgatgaagtgtcactatgaggcgctgggggtgcggcgcgacgccagcgaggaggagctcaagaaggcctatcggaagctggccctgaaatggcacccggataaaaatctggataatgccgcagaagcagctgaacaatttaaattaatccaagcagcatatgatgtgttgagtgaccctcaggaaagagcatggtatgataatcatagagaggccctacttaaaggtgggtttgatggcgaatatcaagatgacagcttagatttgctacgctatttcaccgttacctgttattctggttatggagatgatgaaaagggattttacacggtgtatcgtaatgtttttgaaatgattgccaaggaagaactagaatctgtgttagaggaagaggttgatgatttcccaacttttggagactcccagagtgactatgatacggtagtccatcctttctacgcttattggcagagtttctgcactcaaaagaattttgcatggaaggaagaatatgatacacgacaggcttcaaaccgctgggaaaaacgagccatggaaaaagaaaacaaaaagattcgggacaaagcaaggaaagagaagaatgagcttgtccgtcagctggtagctttcattcgtaaaagagataaaagagtgcaggcgcatcgaaaacttgtggaagaacagaatgcagagaaggcgaggaaagccgaagagatgaggcggcagcagaagctaaagcaggccaaactggtggagcagtacagagaacagagctggatgactatggccaatttggagaaagagctccaggagatggaggcacggtacgagaaggagtttggagatggatcggatgaaaatgaaatggaagaacatgaactcaaagatgaggaggatggtaaagacagtgatgaggccgaggacgctgagctctatgatgacctttactgcccagcatgtgacaaatcgttcaagacagaaaaggccatgaagaatcacgagaagtcaaagaagcatcgggaaatggtggccttgctaaaacaacagctggaggaggaagaagaaaatttttcaagacctcaaattgatgaaaatccattagatgacaattctgaggaagaaatggaagatgcaccaaaacaaaagctttctaaaaaacagaagaaaaagaaacagaaaccagcacaggatgtacctggcaaagattcatatctgcctgcagctcactttcagatggcttggggaaaaaagtgtgtgttgggagagagaagagatggagagagcgagcacaaatgtgccaaaatgttgcttgaaaacagacagaattatgatgacaatttcaatgtaaatggacctggagaaggagtaaaggttgatccagaagatactaacttaaatcaagacagtgccaaagaattggaagatagtccccaggaaaatgtcagtgtcacagagatcattaaaccatgtgatgatccaaaaagtgaagctaaaagtgttcctaaacccaaaggaaagaaaaccaaagatatgaaaaaacctgtcagagtacctgctgaaccacaaacaatgagtgttcttatcagctgtacaacctgccatagtgaatttccatctcggaataaactttttgaccatctaaaggccacaggtcatgcaagagcaccttcatcatcgtctttaaacagcgcaacaagtagtcaaagcaagaaagagaaacgtaaaaacagatagagattctgcctgtgcttttgtttgactgtctctagattttgaaaccaaaaaactgaactgaaatcatctaaagagttaaaatttcagtgatctgcaattaattacattgtggaagattattttttatcttgtaaaaacacttttttggtttaatatatatttttaaaacatttcactagtgattgaattctacttttgccatctgaattgacttgaatgtcttaaaacaggtaaatactgtaaagtgtgtattcttgatgtttattggctcatgtggacagaaatgtacagggagaattacattattttaacacacagaagtgcaactttctgctttattttctgaatttcacattacttttacttaatgcttttgtgttttgttaatacttcataatatgtgaaaaactcggatcttttaaaaagcatcatagatcatttttccatatgacactggttccgattttaaaaattatttttaaataaccgattattgattactgtattttttttctcaagaacagtgataggtagaaactaattgaacatttggtagtctttcaagaatagtgtctcttcaaggttttacttgatttaatttgatattttactggtttaccagtaaggtgtattgttcagttttttgctccgatttgaattgtggaggtggaagcaaattagtttacatggcatgtcctccctaggcacagtgacagctgtaaagtatgacggaacaaggtagcagatggtacagaatttatactatttaaga

SEQ ID NO: 451974 - DNA, 3696 bp, Homo sapiens
  misc_feature (1105)..(1105): n is a, c, g, or t
  misc_feature (1123)..(1123): n is a, c, g, or t
  misc_feature (1310)..(1310): n is a, c, g, or t
tgggattgcaggtgtgagctaccgtgtctggcctccatgttacttctacatgagaattgatctggggaggaagaagggttctcaggcttgggcaaccactgatatagttcagctctctaatttcactgatgtgaggaaaggattcagagaattcaagtgacttcttcacagctgcagaatggcagggctaagatagatacattatacccagcaccctccccacaccactctgctgtcccctggatccagggcctttatgctggcagctcctctgttgcttctctggagtggtgtggacactggccacctactgagaagtgtttttttaaaaaatgtgtgtgtgtgtgtgtgtgtgtgtgtatagtatttttaaaaaataaaggtcttagatatcagcttcagagatgtaactgtctttcataatataagtgatgtttgccaggaatattatcctaaatttgttagacatatttctgacatatctgtgatgatagtttgaaaattagtatgtattatttgttgccttttatgccattgtgtccttttcttgatgttttcaaagctggctgaatcctacacaatatgttacactcctaatctgcattttttaaatgcataggccgtttaacttagcacagactattggcctctgcttgaagaatagtatacctataaactggaagcattatcatcacttactcattataacccatcctgtctgttctgtacagtatagttggacccagatttttaccctatgaatttggttagcacaaatgggggaaagtatgaaatgccaaggaaaattgaaattcatgtaggagatgagtagaggaatgttcaggagttcaagcagaacaagaggaacccaactataccgtttctgatctaaatggtatggtggggaaaaaccatcagatcaacagaaaggacataatttttaaataaaagtaacttccttatattgagcaaatttaattttatgaaaaatgcattacaaagtctttgtttcactcatttctctgtgcgactattgaagtgtttgttaaactggatcacgtccaagaagttaatgttaggccaggcagggtggctcacgcttatnttcccagcactttggaangccaaggcgggtggatcacgaggtcaggagttcgagaccatcctggccaatatggtaaaaccctgtctctactaaaaaatacaaaaattagctgagtatggtggcacgtgcctgtaatcccagctattcgggaggctgaagcaggaaaatcgcttgaacccgggaggcagaggttgcagtgagccangatcgcgccactgcactcgagcctgggtgacagagtgagactccatctcaaaaaaaaagttaatgtttttggggaaccacacttcatgtcagatcatttatgattaccgttggttagttttgaagatggtttgctcctttaaatggagtattaagtgctttgtgcttttttttttccccctgaaacagtcttactctgtcaccccagctagaatgcagtggtgcaatcttggctcactgcagtctccacctcctgggttcaagtgattcccctgctcctcctcctaagtaactgggattgcaggtgcctgccaccacgctcagctaattttttatatttttaatagaggcggaggtttcaccatgttggccaagctggtctcgagctcctgacctcaagtgatctccccgccttggcctcccaaagtgctgggattacaggtgtgagccaccgtgcctggcagtgtttttatgaaaacactgtataaaacattctgtataaaacactgtattaaacactgtataaaacatttatctctgtataaaacattcagagatattttaaggaccttgttttaactttgtttcaactgttttaaggaaattccttaatttttgtgccaaatttgatattcaatttgatttctgaagttgctttttaaagatgttcatttaagatgtaaagattatttaaattgcctttaaaattaatgaattaacttttaaagtgcagttcatttttttgagtgttctagagagcactcaaataatgatggttaaaaggagtatgttatttttggattatgctgaattatttattttccagtgttcctaaacccaaaggaaagaaaaccaaagatatgaaaaaacctgtcagagtacctgctgaaccacaaacaatggtaggtcaaaatcatattcatatctctttagcatatcttgctgtttaagcagtataatgatctaaagatggaaatgtgtatttggtgagccattccgcaaagagcctgcaaagatgtggatccatcaacagttttgtttgatataatgtatctttttttttcattaaaataaaaagaagcacattggaaatgctagactgtaccagaacagttactgttgttttctattacttttcaatctaaagccttggtgataagaattacatgtgtcaagttctggagattaattgtgaagcataaactcttcctcttttttagtccatgaggtacatgctattgaaagtctcaggacccttaaagttaatcgtgttgattagtgggatttaacctccaagaacatctgcctttgttgaacgtgtttattacctgtccactctgttaaaacatctttattttacaattgtttgatgcttaatcttgatattaaaacctaaaacactactttcaagtgataacgcttacttttatttatgattttttgcccttctcagagtgttcttatcagctgtacaacctgccatagtgaatttccatctcggaataaactttttgaccatctaaaggccacaggtcatgcaagagcaccttcatcatcgtctttaaacagcgcaacaagtagtcaaagcaagaaagagaaacgtaaaaacagatagagattctgcctgtgcttttgtttgactgtctctagattttgaaaccaaaaaactgaactgaaatcatctaaagagttaaaatttcagtgatctgcaattaattacattgtggaagattattttttatcttgtaaaaacacttttttggtttaatatatatttttaaaacatttcactagtgattgaattctacttttgccatctgaattgacttgaatgtcttaaaacaggtaaatactgtaaagtgtgtattcttgatgtttattggctcatgtggacagaaatgtacagggagaattacattattttaacacacagaagtgcaactttctgctttattttctgaatttcacattacttttacttaatgcttttgtgttttgttaatacttcataatatgtgaaaaactcggatcttttaaaaagcatcatagatcatttttccatatgacactggttccgattttaaaaattatttttaaataaccgattattgattactgtattttttttctcaagaacagtgataggtagaaactaattgaacatttggtagtctttcaagaatagtgtctcttcaaggttttacttgatttaatttgatattttactggtttaccagtaaggtgtattgttcagttttttgctccgatttgaattgtggaggtggaagcaaattagtttacatggcatgtcctccctaggcacagtgacagctgtaaagtatgacggaacaaggtagcagatggtacagaatttatactatttaaga

SEQ ID NO: 451975 - DNA, 2174 bp, Homo sapiens
cggccgcccgcccggtcgggcgatgaagtgtcactatgaggcgctgggggtgcggcgcgacgccagcgaggaggagctcaagaaggcctatcggaagctggccctgaaatggcacccggataaaaatctggataatgccgcagaagcagctgaacaatttaaattaatccaagcagcatatgatgtgttgagtgaccctcaggaaagagcatggtatgataatcatagagaggccctacttaaaggtgggtttgatggcgaatatcaagatgacagcttagatttgctacgctatttcaccgttacctgttattctggttatggagatgatgaaaagggattttacacggtgtatcgtaatgtttttgaaatgattgccaaggaagaactagaatctgtgttagaggaagaggttgatgatttcccaacttttggagactcccagagtgactatgatacggtagtccatcctttctacgcttattggcagagtttctgcactcaaaagaattttgcatggaaggaagaatatgatacacgacaggcttcaaaccgctgggaaaaacgagccatggaaaaagaaaacaaaaagattcgggacaaagcaaggaaagagaagaatgagcttgtccgtcagctggtagctttcattcgtaaaagagataaaagagtgcaggcgcatcgaaaacttgtggaagaacagaatgcagagaaggcgaggaaagccgaagagatgaggcggcagcagaagctaaagcaggccaaactggtggagcagtacagagaacagagctggatgactatggccaatttggagaaagagctccaggagatggaggcacggtacgagaaggagtttggagatggatcggatgaaaatgaaatggaagaacatgaactcaaagatgaggaggatggtaaagacagtgatgaggccgaggacgctgagctctatgatgacctttactgcccagcatgtgacaaatcgttcaagacagaaaaggccatgaagaatcacgagaagtcaaagaagcatcgggaaatggtggccttgctaaaacaacagctggaggaggaagaagaaaatttttcaagacctcaaattgatgaaaatccattagatgacaattctgaggaagaaatggaagatgcaccaaaacaaaagctttctaaaaaacagaagaaaaagaaacagaaaccagcacagaattatgatgacaatttcaatgtaaatggacctggagaaggagtaaaggttgatccagaagatactaacttaaatcaagacagtgccaaagaattggaagatagtccccaggaaaatgtcagtgtcacagagatcattaaaccatgtgatgatccaaaaagtgaagctaaaaggtaatttagatgtatctgtacatatttatgtatagatacacacacacatatgtatacagatgaagagcgttgagaagaggatgctagaggaatgtgcccacacacatctcagcagcatggccaaaatcagaaagatgtcactttgatccagttcttgtttaccttatcctgctgtggcgctgattttgtcgtggatcattaacacttgacactcacatgagaacaagactcctgctgcgtccctggagtgtcactaagcaaatctccatgctcacgacagcagcctgtgttgggccccaccatgttgtgaggacacatggcagcagctggggcccttcctgctcagaggagccctggactcttggtgctgcacaaggccatggtgtggactaggaggaggtctcacccaagggaggtagccagtcctgttctctccttcctcctcttgtctgactttcttttccccatcctcctcggttcctctagaacagagaatcatttcatatttcttgaggaaagatctgatagtgaggagcttcaagtttctgtcattacagaaccctgaaaagaattaaagtgagagagcaaagtgggagcatgaagtgaaaatgctaacactggagcaacagtgatggggtggggagtgtgtgtacttcggagtttaaggcacttagtagtaggaaggaggaaacagatgtgggtgagacctacagtatgactctggctatagaaaaaggtatataaagaactacacaaactggtaatgttgaagctttgaagaactttggagagtt

SEQ ID NO: 451976 - DNA, 453 bp, Homo sapiens
ttatttactaatcaccatggtcccatctagtgattagtaaggctatttttattttctcattaagtttattttgaagagtgattttttctggaaagccttaaaagtactgtcttctccagagattattagaagtgttatatacatgaaaaaagaaaggtaaaagatgtttcgcatcagtaatatttactgcttttctaaaaaaaaatcttaaagcgcagaagttaatctgttttctttgtcactaggtagtccatcctttctacgcttattggcagagtttctgcactcaaaagaattttgcatggaaggaagaatatgatacacgacaggcttcaaaccgctgggaaaaacgagccatggaaaaagaaaacaaaaagattcgggacaaagcaaggaaagagaagaatgagcttgtccgtcagctggtagctttcattcgtaaaagagataaaa

SEQ ID NO: 451977 - DNA, 626 bp, Homo sapiens
cggcacatatgttttattacctagaattatgatgacaatttcaatgtaaatggacctggagaaggagtaaaggttgatccagaagatactaacttaaatcaagacagtgccaaagaattggaagatagtccccaggaaaatgtcagtgtcacagagatcattaaaccatgtgatgatccaaaaagtgaagctaaaaggtaagtcaaagttgcatattatttgtaaattactgaatattgatagtaaggatgtagcttttcatatatcaaataaaatcttctttcccatgactgaccaggtaatttagatgtatctgtacatatttatgtatagatacacacacacatatgtatacagatgaagagcgttgagaagaggatgctagaggaatgtgcccacacacatctcagcagcatggccaaaatcagaaagatgtcactttgatccagttcttgtttaccttatcctgctgtggcgctgattttgtcgtggatcattaacacttgacactcacatgagaacaagactcctgctgcgtccctggagtgtcactaagcaaatctccatgctcacgacagcagcctgtgttgggccccaccatgttgtgaggacacatggcagcagct

SEQ ID NO: 451978 - DNA, 2390 bp, Homo sapiens
cggccgcccgcccggtcgggcgatgaagtgtcactatgaggcgctgggggtgcggcgcgacgccagcgaggaggagctcaagaaggcctatcggaagctggccctgaaatggcacccggataaaaatctggataatgccgcagaagcagctgaacaatttaaattaatccaagcagcatatgatgtgttgagtgaccctcaggaaagagcatggtatgataatcatagagaggccctacttaaaggtgggtttgatggcgaatatcaagatgacagcttagatttgctacgctatttcaccgttacctgttattctggttatggagatgatgaaaagggattttacacggtgtatcgtaatgtttttgaaatgattgccaaggaagaactagaatctgtgttagaggaagaggttgatgatttcccaacttttggagactcccagagtgactatgatacggtagtccatcctttctacgcttattggcagagtttctgcactcaaaagaattttgcatggaaggaagaatatgatacacgacaggcttcaaaccgctgggaaaaacgagccatggaaaaagaaaacaaaaagattcgggacaaagcaaggaaagagaagaatgagcttgtccgtcagctggtagctttcattcgtaaaagagataaaagagtgcaggcgcatcgaaaacttgtggaagaacagaatgcagagaaggcgaggaaagccgaagagatgaggcggcagcagaagctaaagcaggccaaactggtggagcagtacagagaacagagctggatgactatggccaatttggagaaagagctccaggagatggaggcacggtacgagaaggagtttggagatggatcggatgaaaatgaaatggaagaacatgaactcaaagatgaggaggatggtaaagacagtgatgaggccgaggacgctgagctctatgatgacctttactgcccagcatgtgacaaatcgttcaagacagaaaaggccatgaagaatcacgagaagtcaaagaagcatcgggaaatggtggccttgctaaaacaacagctggaggaggaagaagaaaatttttcaagacctcaaattgatgaaaatccattagatgacaattctgaggaagaaatggaagatgcaccaaaacaaaagctttctaaaaaacagaagaaaaagaaacagaaaccagcacagaattatgatgacaatttcaatgtaaatggacctggagaaggagtaaaggttgatccagaagatactaacttaaatcaagacagtgccaaagaattggaagatagtccccaggaaaatgtcagtgtcacagagatcattaaaccatgtgatgatccaaaaagtgaagctaaaagtgttcctaaacccaaaggaaagaaaaccaaagatatgaaaaaacctgtcagagtacctgctgaaccacaaacaatgagtgttcttatcagctgtacaacctgccatagtgaatttccatctcggaataaactttttgaccatctaaaggccacaggtcatgcaagagcaccttcatcatcgtctttaaacagcgcaacaagtagtcaaagcaagaaagagaaacgtaaaaacagatagagattctgcctgtgcttttgtttgactgtctctagattttgaaaccaaaaaactgaactgaaatcatctaaagagttaaaatttcagtgatctgcaattaattacattgtggaagattattttttatcttgtaaaaacacttttttggtttaatatatatttttaaaacatttcactagtgattgaattctacttttgccatctgaattgacttgaatgtcttaaaacaggtaaatactgtaaagtgtgtattcttgatgtttattggctcatgtggacagaaatgtacagggagaattacattattttaacacacagaagtgcaactttctgctttattttctgaatttcacattacttttacttaatgcttttgtgttttgttaatacttcataatatgtgaaaaactcggatcttttaaaaagcatcatagatcatttttccatatgacactggttccgattttaaaaattatttttaaataaccgattattgattactgtattttttttctcaagaacagtgataggtagaaactaattgaacatttggtagtctttcaagaatagtgtctcttcaaggttttacttgatttaatttgatattttactggtttaccagtaaggtgtattgttcagttttttgctccgatttgaattgtggaggtggaagcaaattagtttacatggcatgtcctccctaggcacagtgacagctgtaaagtatgacggaacaaggtagcagatggtacagaatttatactatttaaga

SEQ ID NO: 451979 - DNA, 1910 bp, Homo sapiens
cggccgcccgcccggtcgggcgatgaagtgtcactatgaggcgctgggggtgcggcgcgacgccagcgaggaggagctcaagaaggcctatcggaagctggccctgaaatggcacccggataaaaatctggataatgccgcagaagcagctgaacaatttaaattaatccaagcagcatatgatgtgttgagtgaccctcaggaaagagcatggtatgataatcatagagaggccctacttaaaggtgggtttgatggcgaatatcaagatgacagcttagatttgctacgctatttcaccgttacctgttattctggttatggagatgatgaaaagggattttacacggtgtatcgtaatgtttttgaaatgattgccaaggaagaactagaatctgtgttagaggaagaggttgatgatttcccaacttttggagactcccagagtgactatgatacggtagtccatcctttctacgcttattggcagagtttctgcactcaaaagaattttgcatggaaggaagaatatgatacacgacaggcttcaaaccgctgggaaaaacgagccatggaaaaagaaaacaaaaagattcgggacaaagcaaggaaagagaagaatgagcttgtccgtcagctggtagctttcattcgtaaaagagataaaagagtgcaggcgcatcgaaaacttgtggaagaacagaatgcagagaaggcgaggaaagccgaagagatgaggcggcagcagaagctaaagcaggccaaactggtggagcagtacagagaacagagctggatgactatggccaatttggagaaagagctccaggagatggaggcacggtacgagaaggagtttggagatggatcggatgaaaatgaaatggaagaacatgaactcaaagatgaggaggatggtaaagacagtgatgaggccgaggacgctgagctctatgatgacctttactgcccagcatgtgacaaatcgttcaagacagaaaaggccatgaagaatcacgagaagtcaaagaagcatcgggaaatggtggccttgctaaaacaacagctggaggaggaagaagaaaatttttcaagacctcaaattgatgaaaatccattagatgacaattctgaggaagaaatggaagatgcaccaaaacaaaagctttctaaaaaacagaagaaaaagaaacagaaaccagcacagaattatgatgacaatttcaatgtaaatggacctggagaaggagtaaaggttgatccagaagatactaacttaaatcaagacagtgccaaagaattggaagatagtccccaggaaaatgtcagtgtcacagagatcattaaaccatgtgatgatccaaaaagtgaagctaaaagtgttcctaaacccaaaggaaagaaaaccaaagatatgaaaaaacctgtcagagtacctgctgaaccacaaacaatgagtgttcttatcagctgtacaacctgccatagtgaatttccatctcggaataaactttttgaccatctaaaggccacaggtcatgcaagagcaccttcatcatcgtctttaaacagcgcaacaagtagtcaaagcaagaaagagaaacgtaaaaacagatagagattctgcctgtgcttttgtttgactgtctctagattttgaaaccaaaaaactgaactgaaatcatctaaagagttaaaatttcagtgatctgcaattaattacattgtggaagattattttttatcttgtaaaaacacttttttggtttaatatatatttttaaaacatttcactagtgattgaattctacttttgccatctgaattgacttgaatgtcttaaaacaggtaaatacttgtccccaaaaactttccttttttctacttacccctattaaaaacttaaaaag

SEQ ID NO: 451980 - DNA, 478 bp, Homo sapiens
cgcggatcattatatctgcagcccgagttcgaagagacagacgggagaggctctagttatgctccaaataaagggctttggatcaggaagccctgggaattcatctaaagatttatccaaaaccacactggtaaagacagtggttgaagagctagatcaacgtggtaaagttctttcatcaaggattcactccattgaagaaaagacatctaaaatgaccaacggcaagacagaacaaagggttcctttctagctgtcattttagagaaaagaataatttgggaaaggatcctgtacaattgcattattctaaatatcagagagaatatacacactttttacttttaaagatacattacttagcaaaaatacctgttttcttagttttacaggatattgagtgtttgtttccaataaataaaaaagttgatgtgcattcatttccattcactgatgactaataaataactatttgtga

SEQ ID NO: 451981 - DNA, 663 bp, Homo sapiens
gtatgaaaatgagctcacccttcaccaaaacgtagaggccgacatcaacggattacggcgagtcctggacgagctgacgctctgcaggaccgaccaggagctgcaatatgagtctctgagtgaggagatgacatatctcaaaaagaaccacgaagaggagatgaaggctctgcagtgcgcggctgggggcaacgtgaacgtggagatgaacgcggccccgggggtagacctcgcggttttgttgaacaacatgcgagcggagtacgaagcccttgcagagcagaaccgcaaggacgcggaggcctggttcaatgagaagagcgcctcgctgcagcaacagatctcccacgactcaggcgcagccactttcgcccggagccagctcaccgagatgaggcgcaccctgcagaccctggagatccagctgcagtccctgatggccacgaaacactccctggagtgctccttgacggagaccgagagcaactactgtacgcagctggcgcagatccaggctcagatcggggccctggaggagcagctgcaccaggtcagaaccgagaccgagggccagaagctggagtatgagcatctcctcgatgtcaaggtccacttggaaaaagaaattgagacctactgccgcctgatagatggagatggaaa

SEQ ID NO: 451982 - DNA, 875 bp, Homo sapiens
cgcggatcattatatctgcagcccgagttcgaagagacagacgggagaggctctagttatgctccaaataaagggctttggatcaggaagccctgggaattcatctaaagatttatccaaaaccacactggtaaagacagtggttgaagagctagatcaacgtggtaaagttctttcatcaaggattcactccattgaagaaaagacatctaaaatgaccaacggcaagacagaacaaagggttcctttctagctgtcattttagagaaaagaataatttgggaaaggatcctgtacaattgcattattctaaatatcagagagaatatacacactttttacttttaaagatacattacttagcaaaaatacctgttttcttagttttacaggatattgagtgtttgtttccaataaataaaaaagttgatgtgcattcatttccattcactgatgactaataaataactatttgtgatttttttctatgtctcattcatagagaaacacttgtggaatatattttaattgcctttcactgttgttttaaataatagtcaataccgccacatggcatttgaatatgaaacattcactatgcataatctttaaatcacatcgtgtctatgtgggcaaataatcaaaaacttcagaaattctcctgtgactgaaaagtctcaccactagatgacgcattcctggtattttaccaagagcctctctcaaactcttctttcacaatacccaggataccattcctcgtctaaacaggataatctccggaaaaatccacagcaatatggcttgtgttagtgacacttttcctagaacaggggtcagaagctttttttggaaaacccagatagtaaatattt

SEQ ID NO: 451983 - DNA, 874 bp, Homo sapiens
gtaacatatgtaatatgctgctcacttcatagacaggagaaagagagagggctagttatgctccaaataaagggctttggatcaggaagccctgggaattcatctaaagatttatccaaaaccacactggtaaagacagtggttgaagagctagatcaacgtggtaaagttctttcatcaaggattcactccattgaagaaaagacatctaaaatgaccaacggcaagacagaacaaagggttcctttctagctgtcattttagagaaaagaataatttgggaaaggatcctgtacaattgcattattctaaatatcagagagaatatacacactttttacttttaaagatacattacttagcaaaaatacctgttttcttagttttacaggatattgagtgtttgtttccaataaataaaaaagttgatgtgcattcatttccattcactgatgactaataaataactatttgtgatttttttctatgtctcattcatagagaaacacttgtggaatatattttaattgcctttcactgttgttttaaataatagtcaataccgccacatggcatttgaatatgaaacattcactatgcataatctttaaatcacatcgtgtctatgtgggcaaataatcaaaaacttcagaaattctcctgtgactgaaaagtctcaccactagatgacgcattcctggtattttaccaagagcctctctcaaactcttctttcacaatacccaggataccattcctcgtctaaacaggataatctccggaaaaatccacagcaatatggcttgtgttagtgacacttttcctagaacaggggtcagaagctttttttggaaaacccagatagtaaatattt

SEQ ID NO: 451984 - DNA, 861 bp, Homo sapiens
taagcagaaatataaaagaataaactatatttcttttacaagttatgctccaaataaagggctttggatcaggaagccctgggaattcatctaaagatttatccaaaaccacactggtaaagacagtggttgaagagctagatcaacgtggtaaagttctttcatcaaggattcactccattgaagaaaagacatctaaaatgaccaacggcaagacagaacaaagggttcctttctagctgtcattttagagaaaagaataatttgggaaaggatcctgtacaattgcattattctaaatatcagagagaatatacacactttttacttttaaagatacattacttagcaaaaatacctgttttcttagttttacaggatattgagtgtttgtttccaataaataaaaaagttgatgtgcattcatttccattcactgatgactaataaataactatttgtgatttttttctatgtctcattcatagagaaacacttgtggaatatattttaattgcctttcactgttgttttaaataatagtcaataccgccacatggcatttgaatatgaaacattcactatgcataatctttaaatcacatcgtgtctatgtgggcaaataatcaaaaacttcagaaattctcctgtgactgaaaagtctcaccactagatgacgcattcctggtattttaccaagagcctctctcaaactcttctttcacaatacccaggataccattcctcgtctaaacaggataatctccggaaaaatccacagcaatatggcttgtgttagtgacacttttcctagaacaggggtcagaagctttttttggaaaacccagatagtaaatattt

SEQ ID NO: 451985 - DNA, 520 bp, Homo sapiens
cgcggatcattatatctgcagcccgagttcgaagagacagacgggagaggctctagttatgctccaaataaagggctttggatcaggaagccctgggaattcatctaaagatttatccaaaaccacactggtaaagacagtggttgaagagctagatcaacgtggtaaagttctttcatcaaggattcactccattgaagaaaagacatctaaaatgaccaacggcaagacagaacaaagggttcctttctagctgtcattttagagaaaagaataatttgggaaaggatcctgtacaattgcattattctaaatatcagagagaatatacacactttttacttttaaagatacattacttagcaaaaatacctgttttcttagttttacaggatattgagtgtttgtttccaataaataaaaaagttgatgtgcattcatttccattcactgatgactaataaataactatttgtgaaaaaaaaaaaaattgggacctctttggactcaagggggggag

SEQ ID NO: 451986 - DNA, 866 bp, Homo sapiens
  misc_feature (17)..(17): n is a, c, g, or t
  misc_feature (26)..(26): n is a, c, g, or t
  misc_feature (28)..(28): n is a, c, g, or t
  misc_feature (30)..(31): n is a, c, g, or t
  misc_feature (35)..(35): n is a, c, g, or t
  misc_feature (55)..(56): n is a, c, g, or t
gcacctctctcgccccnccccccccncncnnccancacaaaagccctagttctgnnccaaacaaagtctttggatcagcagccctgggaattcatctaaagatttatccaaaaccacactggtaaagacagtggttgaagagctagatcaacgtggtaaagttctttcatcaaggattcactccattgaagaaaagacatctaaaatgaccaacggcaagacagaacaaagggttcctttctagctgtcattttagagaaaagaataatttgggaaaggatcctgtacaattgcattattctaaatatcagagagaatatacacactttttacttttaaagatacattacttagcaaaaatacctgttttcttagttttacaggatattgagtgtttgtttccaataaataaaaaagttgatgtgcattcatttccattcactgatgactaataaataactatttgtgatttttttctatgtctcattcatagagaaacacttgtggaatatattttaattgcctttcactgttgttttaaataatagtcaataccgccacatggcatttgaatatgaaacattcactatgcataatctttaaatcacatcgtgtctatgtgggcaaataatcaaaaacttcagaaattctcctgtgactgaaaagtctcaccactagatgacgcattcctggtattttaccaagagcctctctcaaactcttctttcacaatacccaggataccattcctcgtctaaacaggataatctccggaaaaatccacagcaatatggcttgtgttagtgacacttttcctagaacaggggtcagaagctttttttggaaaacccagatagtaaatattt

SEQ ID NO: 451987 - DNA, 1837 bp, Homo sapiens
cagttttaggttcacagagatttcccatatcctccccactatcaacatcctcaccagagtggtacatttgttgaaactgatgaatctacattgacacatcatcacccaaagtccgtagtttacattagggttcattttaccactttttctttctctatctgttcatctggaaacatactttgttttctctctatttagacaggtatggataaggtatatgtagacatactttttccccaaatcctttgacggtaaattgcagatatcctgacaattcaccactaactactataactgcatctcctaaaaacggataccatccttcatgattacagtattgttaccatgtttagagaattaataatcatcctgtaatatcatctgatatccagctcatacgcaaattgcatggaaaaatttgtgtgtgtgtggttgactaatagccatcttttggcatgctctttgttttagaacttaaaaggaagtttcaattacaaaactaatacatgctcattgaaaaaggtctaaaagagaaagtaaaatcgcctgtcaccctcccccctacttgtgccctgtgcctgttcagtgggactcctctgtctgctctgggcctctccgagaggccctgccagtgctgcacagcctgtgacctcctctgtccaggaaagtggctgcatctaacgcacaccctcttccctccagcaccagcagcaggtggcgcaggcagtggagcgcgccaagcaggtcaccatgacggagctgaacgccatcatcggggtacgtggactccccaatctgcctcttaccgtgtgtatagcccttttattcctctcatttatcataaccagagattgaccctgaccttagctggcctcaaagaatggcggccccagggctccggcttctacaagcaccccaagggcttggacccatgtagggctgtttcccccttggctcccagttgcctcctagtcctcaaactaaaggggagccagacacgcctcaaatccacctcttcagccatctgcctcatcttccactggcttttggtgtccttgccattgaggagggtgggggcctagggtcaccttcaaggccaggccagctggccagtacctggccacctcctcacacttaccccggggcctgtctgcctcctccctggcagaagtctgcccttctttggccacctgggatcagaacagtctctgctgtactgttgatgtgcatcgtgctgtggaatttgggtttacgtcttgctgtcccatgcgcgaagctgcctggctgagcattcatcatgtacgcttgtgaactccagctggggagctgagactggttttcctgactttctagaagtcccgtctcccctttacacaggaagacatacccaagagtgctctgtgaggcccacttccggactggccccttagtggaaaagggaagctgggtctacctggcttgtatctttaatgcatttcttaggttcaagtggcatctttctcctgcttgctgctttggtgtgaggctagtgacatttaagataagcacctgaggaagaagagtctttttagtgtgactttgggcaaggctcttacccttggggtgtacctgtccacctttcatctctgaaatgaagagggtggacaggatcactgcttcccagtccacggaggagcttctggacggtacagatacaggggcacttgccccagaggtcttttccataggtctggggatgggactggaaatctgtgttcctaacgatttctagatcattctgaagtgtagttaggcttgggaagcagtagactgattcaactctaacattctgggaacc

SEQ ID NO: 451988 - DNA, 6007 bp, Homo sapiens
actataatatatatctatttattatatgtctttcggttaattcctgatctgaggagcgctgtttttcactcccatgcgaaagtcaccagcgggtagggcctgattgctacttttcatgcatagttttagacacaagagggcattgtgacgtcgcgcccagcggcacccagtcgtaggccgagtcccgcagccccacgtgggggccccgcgctcccattggccagcgccggacgaagctgccacattattttgttacttttcagtccctatttggaactgctctcgcggcagttcagacctcgtgctcgtccccttcgcctgtctgtgtgtggtatccgtaggtccggggcactttttttttggtgtgtgtgtgtgtgcgtgcgcgcgtgtgtgtgtgttgggtgtgtgtgttttgggggtttgccggggcgcggagaggagagccgggccgaggggaaggaaggaagccgtagagctccccggtctcgggctgcgtctcccctccagcgctctcctgcctgtgcgctccgacgcggcagcggcggtggcgctgagcgctcctcggtggggacgcggtgctcaagctgggagcagcgagaaccctttgcggaggcttcccgtgcccgctggacttaggatgccagggcgtttgatttgcacctactgagcccggagttcctccccggccctgggaagggcttgcagcggcggcggcggcggcggcagcggcagtagcagacggaacagcaggctctcctctccgagggggggcgtcgaagcgcccgcgccgggctcccgccctcaccctccggcgctcctgcggccccaagccaccacctcgtagcccgcctccttcctcttctcgccgcgagccccaggcccggacgcctctaggatcggacccgcgcgccccggatgcttggggctgccccggcgcgcccccctacaggcgcgacccgctgagtgacccggagggggcccgagctcgccccaggaggggcccccggcctcgggaccccgcgccggacctgctggggagccgacgatgtccgcgcagtcccaggcattgacgcgctcgacgcagcccagggaaggcggccggccgctgcccgccgagccctaggcgcacaaagcccgcgcccgccgcccggccccggcgcccgccgacgactttgccgcctgctccgcggctctttgtctccacttggggcgggcgcccgactctgggatttcgctgcgagaacgagctgggggggccgggggcgagctctcggtttcccggccgccccccgctcgggctcggctcccccctcccccgcacctccccggcccgggctctcggcgcttccacgctctcggaatcacgacccctccctgccatgtatccgcagggcagacatccggctccccatcaacccgggcagccgggatttaaattcacggtggctgagtcttgtgacaggatcaaagacgaattccagttcctgcaagctcagtatcacagcctcaaagtggagtacgacaagctggcaaacgagaagacggagatgcagcgccattatgtgatgtactatgagatgtcctatggcttgaacattgaaatgcacaagcagacagagattgcgaagagactgaacacaattttagcacagatcatgcctttcctgtcacaagagcaccagcagcaggtggcgcaggcagtggagcgcgccaagcaggtcaccatgacggagctgaacgccatcatcgggcagcagcagctccaggcgcagcacctctcccatgccacacacggccccccggtccagttgccaccccacccgtcaggtctccagcctccaggaatccccccagtgacagggagcagctccgggctgctggcactgggcgccctgggcagccaggcccatctgacggtgaaggatgagaagaaccaccatgaactcgatcacagagagagagaatccagtgcgaataactctgtgtcaccctcggaaagcctccgggccagtgagaagcaccggggctctgcggactacagcatggaagccaagaagcggaaggcggaggagaaggacagcttgagccgatacgacagtgatggagacaagagtgatgatctggtggtggatgtttccaatgaggaccccgcaacgccccgggtcagcccggcacactcccctcctgaaaatgggctggacaaggcccgtagcctgaaaaaagatgcccccaccagccctgcctcggtggcctcttccagtagcacaccttcctccaagaccaaagaccttggtcataacgacaaatcctccacccctgggctcaagtccaacacaccaaccccaaggaacgacgccccaactccaggcaccagcacgaccccagggctcaggtcgatgccgggtaaacctccgggcatggacccgatagcctcggctctgcgcacgcccatctccatcaccagctcctatgcggcgcccttcgccatgatgagccaccatgagatgaacggctccctcaccagtcctggcgcctacgccggcctccacaacatcccaccccagatgagcgccgccgccgctgctgcagccgctgcctatggccgatcgccaatgtgagcttggagctgttggttttgaccctcaccccccgatgcgggccacaggcctcccctcaagcctggcctccattcctggaggaaaaccagcgtactcattccatgtgagtgctgatgggcagatgcagcccgtgcccttcccccacgacgccctggcaggccccggcatcccgaggcacgcccggcagatcaacacactcagccacggggaggtggtgtgtgccgtgaccatcagcaaccccacgaggcacgtctacacaggtggcaagggctgcgtgaagatctgggacatcagccagccaggcagcaagagccccatctcccagctggactgcctgaacagggacaattacatccgctcctgcaagctgctccctgatgggcgcacgctcatcgtgggcggcgaggccagcacgctcaccatctgggacctggcctcgcccacgccccgcatcaaggccgagctgacgtcctcggctcccgcctgttatgccctggccattagccctgacgccaaagtctgcttctcctgctgcagcgatgggaacattgctgtctgggacctgcacaaccagaccctggtcaggcagttccagggccacacagatggggccagctgcatagacatctcccatgatggcaccaaactgtggacagggggcctggacaacacggtgcgctcctgggacctgcgggagggccgacagctacagcagcatgacttcacttcccagatcttctcgctgggctactgccccactggggagtggctggctgtgggcatggagagcagcaacgtggaggtgctgcaccacaccaagcctgacaagtaccagctgcacctgcacgagagctgcgtgctctccctcaagttcgcctactgcggcaagtggttcgtgagcactgggaaagataaccttctcaacgcctggaggacgccttatggagccagcatattccagtctaaagaatcctcgtctgtcttgagttgtgacatttcagcggatgacaaatacattgtaacaggctctggtgacaagaaggccacagtttatgaggtcatctactaaacaagaactccagcagggctgtcaaactctgggagaaaccgactcggctctgacagggagacccccaggcgaggggccccgaggatggcggaggatgggccgcaggcagccgagcgttcagggctgcgctccggccggctgagagggcacgtgccccgtcacagtctggactcctgggcctggattgatgtgtctcacagactcggaagggttctgctcctcctcctccccctgaacaatgctggcagttgctacaaatagatttattggaggcttatggctccggttcccccacagacccgctcatgagtctctgtttgttcttcccttttcttttgccctgtccctcaccttgggtcgggggtgctggagtggaccacaatgttgtgctgggggatgggggggtctctctttgccgattgtgcagtgcacaagatttgtgaaaaatgtaaataacagactcctattgcggactgatcagtgggagaggaggccccttcccaccggaaactctgagtgtgtatttcgcctgctgtatttgtaatccactcgtggtggtggctttttttttttttttttttaaataaacagatgctctcacctgggaagaggagacagggaggggaaccaattgaagaaagaggagaaaagtcttagagtgtggaaaaggcaaccaggttggccgtaaggtgcctgctggaatgcgtgtgcctccacacgggtctgggcatccggactgataaccagccggccagactgagggatggaaggcactgagatgggggcccgtccaggcggacacccgcagaaatggagctttctgtggtctcttgcactctggctgcctcttgccctctctgtgtctctctttcttggtctctccctctctcctcctcagcctggtctttctctttggtgcacacttagttattgttgtgagcaatggaagttcaaaggaactccctctccagctcttctgaatcttgggacacagcctaaaaaggacaaaaagttagaagacagcatagcaactcagctcagggagctaccagagaaaaatagcaactgatgtgggtgcttttttttttttttaatttgaataaaaagaattagaagtgatgtccttttataaaatgccttctcccccttcccgcctacagtctcttcctctccccttagaggggggaaagtgtataaacctacagggttgtgagtctgaaaagaggatccccctcacccccaccctgggcagagcagtgggggttggggggtgggagagggggacacagatcctggcacactgtggatatttcttgcagattgcagtctcttgtggcccaaacaggttaggtagactatcgcctctggcaggtgccaccttttggtaccaacatgttctgaggtgttaggatttgggttgggttttttttgtttgttttttttttccttttggtctttttttttttctccttttaaagaaaagctaaaggccgctgtgagtcctggtggcaggctctccatggatgtagcatatcgaagataatttttatactgcatttttatggattattttgtaatgtgtgattccgtctgctgaggaggtgggaggggctccagggaaagccacccaccttcagtgaggttgctccccagctgagcgcaccgggcatgggatgtggaggctggcgacacaccctgtgcctctccaaggctgggcgcgtggggcgtccagagtctctctgggtctcagatgtccatctgccacctcttgttaaggctctagccagaagggagggtgagggtagaagaaagttattcccgaagaaaaaaagaatgaaaagtcattgtactgaactgtttttatatttttaaaagttactatttaaaggttggtttgattgttgcgtcttaattgcctctcctcccagtttgccagtcccgccccccgccccccgggaaaacagccaggccactgttgctgtcacattctggagcctgggccagggccatttcccatcgatgtgagctcttctcatctcacagcattccctgcgctgcttccacccccttctccccttccagatacccagcatcgcagcagggatttcacaatcccatactgtgtcgcctcccatccaagcgccagggagggtggggggtaggagctaagacttcctctggacagatgggcagggcagagttcactgaggtgaaggaagaccacaggttaacaccaaagtattgtacagctgtcaatgcaaaacttttttggaaaaaaattaaacgtaatgaacttgaagcgaaactgcaaagtgtctgt

SEQ ID NO: 451989 - DNA, 5968 bp, Homo sapiens
actataatatatatctatttattatatgtctttcggttaattcctgatctgaggagcgctgtttttcactcccatgcgaaagtcaccagcgggtagggcctgattgctacttttcatgcatagttttagacacaagagggcattgtgacgtcgcgcccagcggcacccagtcgtaggccgagtcccgcagccccacgtgggggccccgcgctcccattggccagcgccggacgaagctgccacattattttgttacttttcagtccctatttggaactgctctcgcggcagttcagacctcgtgctcgtccccttcgcctgtctgtgtgtggtatccgtaggtccggggcactttttttttggtgtgtgtgtgtgtgcgtgcgcgcgtgtgtgtgtgttgggtgtgtgtgttttgggggtttgccggggcgcggagaggagagccgggccgaggggaaggaaggaagccgtagagctccccggtctcgggctgcgtctcccctccagcgctctcctgcctgtgcgctccgacgcggcagcggcggtggcgctgagcgctcctcggtggggacgcggtgctcaagctgggagcagcgagaaccctttgcggaggcttcccgtgcccgctggacttaggatgccagggcgtttgatttgcacctactgagcccggagttcctccccggccctgggaagggcttgcagcggcggcggcggcggcggcagcggcagtagcagacggaacagcaggctctcctctccgagggggggcgtcgaagcgcccgcgccgggctcccgccctcaccctccggcgctcctgcggccccaagccaccacctcgtagcccgcctccttcctcttctcgccgcgagccccaggcccggacgcctctaggatcggacccgcgcgccccggatgcttggggctgccccggcgcgcccccctacaggcgcgacccgctgagtgacccggagggggcccgagctcgccccaggaggggcccccggcctcgggaccccgcgccggacctgctggggagccgacgatgtccgcgcagtcccaggcattgacgcgctcgacgcagcccagggaaggcggccggccgctgcccgccgagccctaggcgcacaaagcccgcgcccgccgcccggccccggcgcccgccgacgactttgccgcctgctccgcggctctttgtctccacttggggcgggcgcccgactctgggatttcgctgcgagaacgagctgggggggccgggggcgagctctcggtttcccggccgccccccgctcgggctcggctcccccctcccccgcacctccccggcccgggctctcggcgcttccacgctctcggaatcacgacccctccctgccatgtatccgcagggcagacatccggctccccatcaacccgggcagccgggatttaaattcacggtggctgagtcttgtgacaggatcaaagacgaattccagttcctgcaagctcagtatcacagcctcaaagtggagtacgacaagctggcaaacgagaagacggagatgcagcgccattatgtgatgtactatgagatgtcctatggcttgaacattgaaatgcacaagcagacagagattgcgaagagactgaacacaattttagcacagatcatgcctttcctgtcacaagagcaccagcagcaggtggcgcaggcagtggagcgcgccaagcaggtcaccatgacggagctgaacgccatcatcgggcagcagcagctccaggcgcagcacctctcccatgccacacacggccccccggtccagttgccaccccacccgtcaggtctccagcctccaggaatccccccagtgacagggagcagctccgggctgctggcactgggcgccctgggcagccaggcccatctgacggtgaaggatgagaagaaccaccatgaactcgatcacagagagagagaatccagtgcgaataactctgtgtcaccctcggaaagcctccgggccagtgagaagcaccggggctctgcggactacagcatggaagccaagaagcggaaggcggaggagaaggacagcttgagccgatacgacagtgatggagacaagagtgatgatctggtggtggatgtttccaatgaggaccccgcaacgccccgggtcagcccggcacactcccctcctgaaaatgggctggacaaggcccgtagcctgaaaaaagatgcccccaccagccctgcctcggtggcctcttccagtagcacaccttcctccaagaccaaagaccttggtcataacgacaaatcctccacccctgggctcaagtccaacacaccaaccccaaggaacgacgccccaactccaggcaccagcacgaccccagggctcaggtcgatgccgggtaaacctccgggcatggacccgatagcctcggctctgcgcacgcccatctccatcaccagctcctatgcggcgcccttcgccatgatgagccaccatgagatgaacggctccctcaccagtcctggcgcctacgccggcctccacaacatcccaccccagatgagcgccgccgccgctgctgcagccgctgcctatggccgatcgccaatgtgagcttggagctgttggttttgaccctcaccccccgatgcgggccacaggcctcccctcaagcctggcctccattcctggaggaaaaccagcgtactcattccatgtgagtgctgatgggcagatgcagcccgtgcccttcccccacgacgccctggcaggccccggcatcccgaggcacgcccggcagatcaacacactcagccacggggaggtggtgtgtgccgtgaccatcagcaaccccacgaggcacgtctacacaggtggcaagggctgcgtgaagatctgggacatcagccagccaggcagcaagagccccatctcccagctggactgcctgaacagggacaattacatccgctcctgcaagctgctccctgatgggcgcacgctcatcgtgggcggcgaggccagcacgctcaccatctgggacctggcctcgcccacgccccgcatcaaggccgagctgacgtcctcggctcccgcctgttatgccctggccattagccctgacgccaaagtctgcttctcctgctgcagcgatgggaacattgctgtctgggacctgcacaaccagaccctggtcaggcagttccagggccacacagatggggccagctgcatagacatctcccatgatggcaccaaactgtggacagggggcctggacaacacggtgcgctcctgggacctgcgggagggccgacagctacagcagcatgacttcacttcccagatcttctcgctgggctactgccccactggggagtggctggctgtgggcatggagagcagcaacgtggaggtgctgcaccacaccaagcctgacaagtaccagctgcacctgcacgagagctgcgtgctctccctcaagttcgcctactgcggcaagtggttcgtgagcactgggaaagataaccttctcaacgcctggaggacgccttatggagccagcatattccagtctaaagaatcctcgtctgtcttgagttgtgacatttcagcggatgacaaatacattgtaacaggctctggtgacaagaaggccacagtttatgaggtcatctactaaacaagaactccagcagggctgtcaaactctgggagaaaccgactcggctctgacagggagacccccaggcgaggggccccgaggatggcggaggatgggccgcaggcagccgagcgttcagggctgcgctccggccggctgagagggcacgtgccccgtcacagtctggactcctgggcctggattgatgtgtctcacagactcggaagggttctgctcctcctcctccccctgaacaatgctggcagttgctacaaatagatttattggaggcttatggctccggttcccccacagacccgctcatgagtctctgtttgttcttcccttttcttttgccctgtccctcaccttgggtcgggggtgctggagtggaccacaatgttgtgctgggggatgggggggtctctctttgccgattgtgcagtgcacaagatttgtgaaaaatgtaaataacagactcctattgcggactgatcagtgggagaggaggccccttcccaccggaaactctgagtgtgtatttcgcctgctgtatttgtaatccactcgtggtggtggctttttttttttttttttttaaataaacagatgctctcacctgggaagaggagacagggaggggaaccaattgaagaaagaggagaaaagtcttagagtgtggaaaaggcaaccaggttggccgtaaggtgcctgctggaatgcgtgtgcctccacacgggtctgggcatccggactgataaccagccggccagactgagggatggaaggcactgagatgggggcccgtccaggcggacacccgcagaaatggagctttctgtggtctcttgcactctggctgcctcttgccctctctgtgtctctctttcttggtctctccctctctcctcctcagcctggtctttctctttggtgcacacttagttattgttgtgagcaatggaagttcaaaggaactccctctccagctcttctgaatcttgggacacagcctaaaaaggacaaaaagttagaagacagcatagcaactcagctcagggagctaccagagaaaaatagcaactgatgtgggtgcttttttttttttttaatttgaataaaaagaattagaagtgatgtccttttataaaatgccttctcccccttcccgcctacagtctcttcctctccccttagaggggggaaagtgtataaacctacagggttgtgagtctgaaaagaggatccccctcacccccaccctgggcagagcagtgggggttggggggtgggagagggggacacagatcctggcacactgtggatatttcttgcagattgcagtctcttgtggcccaaacaggttaggtagactatcgcctctggcaggtgccaccttttggtaccaacatgttctgaggtgttaggatttgggttgggttttttttgtttgttttttttttccttttggtctttttttttttctccttttaaagaaaagctaaaggccgctgtgagtcctggtggcaggctctccatggatgtagcatatcgaagataatttttatactgcatttttatggattattttgtaatgtgtgattccgtctgctgaggaggtgggaggggctccagggaaagccacccaccttcagtgaggttgctccccagctgagcgcaccgggcatgggatgtggaggctggcgacacaccctgtgcctctccaaggctgggcgcgtggggcgtccagagtctctctgggtctcagatgtccatctgccacctcttgttaaggctctagccagaagggagggtgagggtagaagaaagttattcccgaagaaaaaaagaatgaaaagtcattgtactgaactgtttttatatttttaaaagttactatttaaaggttggtttgattgttgcgtcttaattgcctctcctcccagtttgccagtcccgccccccgccccccgggaaaacagccaggccactgttgctgtcacattctggagcctgggccagggccatttcccatcgatgtgagctcttctcatctcacagcattccctgcgctgcttccacccccttctccccttccagatacccagcatcgcagcaggggtctctactaaaaaaaataaaaaataaaatagccgggtgtggtggtgggtgcctgtagtcccagctacttgggaggctgaggcagaagaatggcgtgaacccgggaggcggagcttgcagtgagccaaaaccgcgccactgcaccccagcctaggcgacagagcaagactccgtctca

SEQ ID NO: 451990 - DNA, 5033 bp, Homo sapiens
cagttttaggttcacagagatttcccatatcctccccactatcaacatcctcaccagagtggtacatttgttgaaactgatgaatctacattgacacatcatcacccaaagtccgtagtttacattagggttcattttaccactttttctttctctatctgttcatctggaaacatactttgttttctctctatttagacaggtatggataaggtatatgtagacatactttttccccaaatcctttgacggtaaattgcagatatcctgacaattcaccactaactactataactgcatctcctaaaaacggataccatccttcatgattacagtattgttaccatgtttagagaattaataatcatcctgtaatatcatctgatatccagctcatacgcaaattgcatggaaaaatttgtgtgtgtgtggttgactaatagccatcttttggcatgctctttgttttagaacttaaaaggaagtttcaattacaaaactaatacatgctcattgaaaaaggtctaaaagagaaagtaaaatcgcctgtcaccctcccccctacttgtgccctgtgcctgttcagtgggactcctctgtctgctctgggcctctccgagaggccctgccagtgctgcacagcctgtgacctcctctgtccaggaaagtggctgcatctaacgcacaccctcttccctccagcaccagcagcaggtggcgcaggcagtggagcgcgccaagcaggtcaccatgacggagctgaacgccatcatcgggcagcagcagctccaggcgcagcacctctcccatgccacacacggccccccggtccagttgccaccccacccgtcaggtctccagcctccaggaatccccccagtgacagggagcagctccgggctgctggcactgggcgccctgggcagccaggcccatctgacggtgaaggatgagaagaaccaccatgaactcgatcacagagagagagaatccagtgcgaataactctgtgtcaccctcggaaagcctccgggccagtgagaagcaccggggctctgcggactacagcatggaagccaagaagcggaaggcggaggagaaggacagcttgagccgatacgacagtgatggagacaagagtgatgatctggtggtggatgtttccaatgaggaccccgcaacgccccgggtcagcccggcacactcccctcctgaaaatgggctggacaaggcccgtagcctgaaaaaagatgcccccaccagccctgcctcggtggcctcttccagtagcacaccttcctccaagaccaaagaccttggtcataacgacaaatcctccacccctgggctcaagtccaacacaccaaccccaaggaacgacgccccaactccaggcaccagcacgaccccagggctcaggtcgatgccgggtaaacctccgggcatggacccgatagcctcggctctgcgcacgcccatctccatcaccagctcctatgcggcgcccttcgccatgatgagccaccatgagatgaacggctccctcaccagtcctggcgcctacgccggcctccacaacatcccaccccagatgagcgccgccgccgctgctgcagccgctgcctatggccgatcgccaatgtgagcttggagctgttggttttgaccctcaccccccgatgcgggccacaggcctcccctcaagcctggcctccattcctggaggaaaaccagcgtactcattccatgtgagtgctgatgggcagatgcagcccgtgcccttcccccacgacgccctggcaggccccggcatcccgaggcacgcccggcagatcaacacactcagccacggggaggtggtgtgtgccgtgaccatcagcaaccccacgaggcacgtctacacaggtggcaagggctgcgtgaagatctgggacatcagccagccaggcagcaagagccccatctcccagctggactgcctgaacagggacaattacatccgctcctgcaagctgctccctgatgggcgcacgctcatcgtgggcggcgaggccagcacgctcaccatctgggacctggcctcgcccacgccccgcatcaaggccgagctgacgtcctcggctcccgcctgttatgccctggccattagccctgacgccaaagtctgcttctcctgctgcagcgatgggaacattgctgtctgggacctgcacaaccagaccctggtcaggcagttccagggccacacagatggggccagctgcatagacatctcccatgatggcaccaaactgtggacagggggcctggacaacacggtgcgctcctgggacctgcgggagggccgacagctacagcagcatgacttcacttcccagatcttctcgctgggctactgccccactggggagtggctggctgtgggcatggagagcagcaacgtggaggtgctgcaccacaccaagcctgacaagtaccagctgcacctgcacgagagctgcgtgctctccctcaagttcgcctactgcggcaagtggttcgtgagcactgggaaagataaccttctcaacgcctggaggacgccttatggagccagcatattccagtctaaagaatcctcgtctgtcttgagttgtgacatttcagcggatgacaaatacattgtaacaggctctggtgacaagaaggccacagtttatgaggtcatctactaaacaagaactccagcagggctgtcaaactctgggagaaaccgactcggctctgacagggagacccccaggcgaggggccccgaggatggcggaggatgggccgcaggcagccgagcgttcagggctgcgctccggccggctgagagggcacgtgccccgtcacagtctggactcctgggcctggattgatgtgtctcacagactcggaagggttctgctcctcctcctccccctgaacaatgctggcagttgctacaaatagatttattggaggcttatggctccggttcccccacagacccgctcatgagtctctgtttgttcttcccttttcttttgccctgtccctcaccttgggtcgggggtgctggagtggaccacaatgttgtgctgggggatgggggggtctctctttgccgattgtgcagtgcacaagatttgtgaaaaatgtaaataacagactcctattgcggactgatcagtgggagaggaggccccttcccaccggaaactctgagtgtgtatttcgcctgctgtatttgtaatccactcgtggtggtggctttttttttttttttttttaaataaacagatgctctcacctgggaagaggagacagggaggggaaccaattgaagaaagaggagaaaagtcttagagtgtggaaaaggcaaccaggttggccgtaaggtgcctgctggaatgcgtgtgcctccacacgggtctgggcatccggactgataaccagccggccagactgagggatggaaggcactgagatgggggcccgtccaggcggacacccgcagaaatggagctttctgtggtctcttgcactctggctgcctcttgccctctctgtgtctctctttcttggtctctccctctctcctcctcagcctggtctttctctttggtgcacacttagttattgttgtgagcaatggaagttcaaaggaactccctctccagctcttctgaatcttgggacacagcctaaaaaggacaaaaagttagaagacagcatagcaactcagctcagggagctaccagagaaaaatagcaactgatgtgggtgcttttttttttttttaatttgaataaaaagaattagaagtgatgtccttttataaaatgccttctcccccttcccgcctacagtctcttcctctccccttagaggggggaaagtgtataaacctacagggttgtgagtctgaaaagaggatccccctcacccccaccctgggcagagcagtgggggttggggggtgggagagggggacacagatcctggcacactgtggatatttcttgcagattgcagtctcttgtggcccaaacaggttaggtagactatcgcctctggcaggtgccaccttttggtaccaacatgttctgaggtgttaggatttgggttgggttttttttgtttgttttttttttccttttggtctttttttttttctccttttaaagaaaagctaaaggccgctgtgagtcctggtggcaggctctccatggatgtagcatatcgaagataatttttatactgcatttttatggattattttgtaatgtgtgattccgtctgctgaggaggtgggaggggctccagggaaagccacccaccttcagtgaggttgctccccagctgagcgcaccgggcatgggatgtggaggctggcgacacaccctgtgcctctccaaggctgggcgcgtggggcgtccagagtctctctgggtctcagatgtccatctgccacctcttgttaaggctctagccagaagggagggtgagggtagaagaaagttattcccgaagaaaaaaagaatgaaaagtcattgtactgaactgtttttatatttttaaaagttactatttaaaggttggtttgattgttgcgtcttaattgcctctcctcccagtttgccagtcccgccccccgccccccgggaaaacagccaggccactgttgctgtcacattctggagcctgggccagggccatttcccatcgatgtgagctcttctcatctcacagcattccctgcgctgcttccacccccttctccccttccagatacccagcatcgcagcagggatttcacaatcccatactgtgtcgcctcccatccaagcgccagggagggtggggggtaggagctaagacttcctctggacagatgggcagggcagagttcactgaggtgaaggaagaccacaggttaacaccaaagtattgtacagctgtcaatgcaaaacttttttggaaaaaaattaaacgtaatgaacttgaagcgaaactgcaaagtgtctgt

SEQ ID NO: 451991 - DNA, 3921 bp, Homo sapiens
  misc_feature (44)..(44): n is a, c, g, or t
tgctgccagaggttacgttcggcagtatgtgactctggtggtgnatgtttccaatgaggaccccgcaacgccccgggtcagcccggcacactcccctcctgaaaatgggctggacaaggcccgtagcctgaaaaaagatgcccccaccagccctgcctcggtggcctcttccagtagcacaccttcctccaagaccaaagaccttggtcataacgacaaatcctccacccctgggctcaagtccaacacaccaaccccaaggaacgacgccccaactccaggcaccagcacgaccccagggctcaggtcgatgccgggtaaacctccgggcatggacccgatagcctcggctctgcgcacgcccatctccatcaccagctcctatgcggcgcccttcgccatgatgagccaccatgagatgaacggctccctcaccagtcctggcgcctacgccggcctccacaacatcccaccccagatgagcgccgccgccgctgctgcagccgctgcctatggccgatcgccaatgtgagcttggagctgttggttttgaccctcaccccccgatgcgggccacaggcctcccctcaagcctggcctccattcctggaggaaaaccagcgtactcattccatgtgagtgctgatgggcagatgcagcccgtgcccttcccccacgacgccctggcaggccccggcatcccgaggcacgcccggcagatcaacacactcagccacggggaggtggtgtgtgccgtgaccatcagcaaccccacgaggcacgtctacacaggtggcaagggctgcgtgaagatctgggacatcagccagccaggcagcaagagccccatctcccagctggactgcctgaacagggacaattacatccgctcctgcaagctgctccctgatgggcgcacgctcatcgtgggcggcgaggccagcacgctcaccatctgggacctggcctcgcccacgccccgcatcaaggccgagctgacgtcctcggctcccgcctgttatgccctggccattagccctgacgccaaagtctgcttctcctgctgcagcgatgggaacattgctgtctgggacctgcacaaccagaccctggtcaggcagttccagggccacacagatggggccagctgcatagacatctcccatgatggcaccaaactgtggacagggggcctggacaacacggtgcgctcctgggacctgcgggagggccgacagctacagcagcatgacttcacttcccagatcttctcgctgggctactgccccactggggagtggctggctgtgggcatggagagcagcaacgtggaggtgctgcaccacaccaagcctgacaagtaccagctgcacctgcacgagagctgcgtgctctccctcaagttcgcctactgcggcaagtggttcgtgagcactgggaaagataaccttctcaacgcctggaggacgccttatggagccagcatattccagtctaaagaatcctcgtctgtcttgagttgtgacatttcagcggatgacaaatacattgtaacaggctctggtgacaagaaggccacagtttatgaggtcatctactaaacaagaactccagcagggctgtcaaactctgggagaaaccgactcggctctgacagggagacccccaggcgaggggccccgaggatggcggaggatgggccgcaggcagccgagcgttcagggctgcgctccggccggctgagagggcacgtgccccgtcacagtctggactcctgggcctggattgatgtgtctcacagactcggaagggttctgctcctcctcctccccctgaacaatgctggcagttgctacaaatagatttattggaggcttatggctccggttcccccacagacccgctcatgagtctctgtttgttcttcccttttcttttgccctgtccctcaccttgggtcgggggtgctggagtggaccacaatgttgtgctgggggatgggggggtctctctttgccgattgtgcagtgcacaagatttgtgaaaaatgtaaataacagactcctattgcggactgatcagtgggagaggaggccccttcccaccggaaactctgagtgtgtatttcgcctgctgtatttgtaatccactcgtggtggtggctttttttttttttttttttaaataaacagatgctctcacctgggaagaggagacagggaggggaaccaattgaagaaagaggagaaaagtcttagagtgtggaaaaggcaaccaggttggccgtaaggtgcctgctggaatgcgtgtgcctccacacgggtctgggcatccggactgataaccagccggccagactgagggatggaaggcactgagatgggggcccgtccaggcggacacccgcagaaatggagctttctgtggtctcttgcactctggctgcctcttgccctctctgtgtctctctttcttggtctctccctctctcctcctcagcctggtctttctctttggtgcacacttagttattgttgtgagcaatggaagttcaaaggaactccctctccagctcttctgaatcttgggacacagcctaaaaaggacaaaaagttagaagacagcatagcaactcagctcagggagctaccagagaaaaatagcaactgatgtgggtgcttttttttttttttaatttgaataaaaagaattagaagtgatgtccttttataaaatgccttctcccccttcccgcctacagtctcttcctctccccttagaggggggaaagtgtataaacctacagggttgtgagtctgaaaagaggatccccctcacccccaccctgggcagagcagtgggggttggggggtgggagagggggacacagatcctggcacactgtggatatttcttgcagattgcagtctcttgtggcccaaacaggttaggtagactatcgcctctggcaggtgccaccttttggtaccaacatgttctgaggtgttaggatttgggttgggttttttttgtttgttttttttttccttttggtctttttttttttctccttttaaagaaaagctaaaggccgctgtgagtcctggtggcaggctctccatggatgtagcatatcgaagataatttttatactgcatttttatggattattttgtaatgtgtgattccgtctgctgaggaggtgggaggggctccagggaaagccacccaccttcagtgaggttgctccccagctgagcgcaccgggcatgggatgtggaggctggcgacacaccctgtgcctctccaaggctgggcgcgtggggcgtccagagtctctctgggtctcagatgtccatctgccacctcttgttaaggctctagccagaagggagggtgagggtagaagaaagttattcccgaagaaaaaaagaatgaaaagtcattgtactgaactgtttttatatttttaaaagttactatttaaaggttggtttgattgttgcgtcttaattgcctctcctcccagtttgccagtcccgccccccgccccccgggaaaacagccaggccactgttgctgtcacattctggagcctgggccagggccatttcccatcgatgtgagctcttctcatctcacagcattccctgcgctgcttccacccccttctccccttccagatacccagcatcgcagcagggatttcacaatcccatactgtgtcgcctcccatccaagcgccagggagggtggggggtaggagctaagacttcctctggacagatgggcagggcagagttcactgaggtgaaggaagaccacaggttaacaccaaagtattgtacagctgtcaatgcaaaacttttttggaaaaaaattaaacgtaatgaacttgaagcgaaactgcaaagtgtctgt

SEQ ID NO: 451992 - DNA, 4427 bp, Homo sapiens
actataatatatatctatttattatatgtctttcggttaattcctgatctgaggagcgctgtttttcactcccatgcgaaagtcaccagcgggtagggcctgattgctacttttcatgcatagttttagacacaagagggcattgtgacgtcgcgcccagcggcacccagtcgtaggccgagtcccgcagccccacgtgggggccccgcgctcccattggccagcgccggacgaagctgccacattattttgttacttttcagtccctatttggaactgctctcgcggcagttcagacctcgtgctcgtccccttcgcctgtctgtgtgtggtatccgtaggtccggggcactttttttttggtgtgtgtgtgtgtgcgtgcgcgcgtgtgtgtgtgttgggtgtgtgtgttttgggggtttgccggggcgcggagaggagagccgggccgaggggaaggaaggaagccgtagagctccccggtctcgggctgcgtctcccctccagcgctctcctgcctgtgcgctccgacgcggcagcggcggtggcgctgagcgctcctcggtggggacgcggtgctcaagctgggagcagcgagaaccctttgcggaggcttcccgtgcccgctggacttaggatgccagggcgtttgatttgcacctactgagcccggagttcctccccggccctgggaagggcttgcagcggcggcggcggcggcggcagcggcagtagcagacggaacagcaggctctcctctccgagggggggcgtcgaagcgcccgcgccgggctcccgccctcaccctccggcgctcctgcggccccaagccaccacctcgtagcccgcctccttcctcttctcgccgcgagccccaggcccggacgcctctaggatcggacccgcgcgccccggatgcttggggctgccccggcgcgcccccctacaggcgcgacccgctgagtgacccggagggggcccgagctcgccccaggaggggcccccggcctcgggaccccgcgccggacctgctggggactttggagctgttggttttgaccctcaccccccgatgcgggccacaggcctcccctcaagcctggcctccattcctggaggaaaaccagcgtactcattccatgtgagtgctgatgggcagatgcagcccgtgcccttcccccacgacgccctggcaggccccggcatcccgaggcacgcccggcagatcaacacactcagccacggggaggtggtgtgtgccgtgaccatcagcaaccccacgaggcacgtctacacaggtggcaagggctgcgtgaagatctgggacatcagccagccaggcagcaagagccccatctcccagctggactgcctgaacagggacaattacatccgctcctgcaagctgctccctgatgggcgcacgctcatcgtgggcggcgaggccagcacgctcaccatctgggacctggcctcgcccacgccccgcatcaaggccgagctgacgtcctcggctcccgcctgttatgccctggccattagccctgacgccaaagtctgcttctcctgctgcagcgatgggaacattgctgtctgggacctgcacaaccagaccctggtcaggcagttccagggccacacagatggggccagctgcatagacatctcccatgatggcaccaaactgtggacagggggcctggacaacacggtgcgctcctgggacctgcgggagggccgacagctacagcagcatgacttcacttcccagatcttctcgctgggctactgccccactggggagtggctggctgtgggcatggagagcagcaacgtggaggtgctgcaccacaccaagcctgacaagtaccagctgcacctgcacgagagctgcgtgctctccctcaagttcgcctactgcggcaagtggttcgtgagcactgggaaagataaccttctcaacgcctggaggacgccttatggagccagcatattccagtctaaagaatcctcgtctgtcttgagttgtgacatttcagcggatgacaaatacattgtaacaggctctggtgacaagaaggccacagtttatgaggtcatctactaaacaagaactccagcagggctgtcaaactctgggagaaaccgactcggctctgacagggagacccccaggcgaggggccccgaggatggcggaggatgggccgcaggcagccgagcgttcagggctgcgctccggccggctgagagggcacgtgccccgtcacagtctggactcctgggcctggattgatgtgtctcacagactcggaagggttctgctcctcctcctccccctgaacaatgctggcagttgctacaaatagatttattggaggcttatggctccggttcccccacagacccgctcatgagtctctgtttgttcttcccttttcttttgccctgtccctcaccttgggtcgggggtgctggagtggaccacaatgttgtgctgggggatgggggggtctctctttgccgattgtgcagtgcacaagatttgtgaaaaatgtaaataacagactcctattgcggactgatcagtgggagaggaggccccttcccaccggaaactctgagtgtgtatttcgcctgctgtatttgtaatccactcgtggtggtggctttttttttttttttttttaaataaacagatgctctcacctgggaagaggagacagggaggggaaccaattgaagaaagaggagaaaagtcttagagtgtggaaaaggcaaccaggttggccgtaaggtgcctgctggaatgcgtgtgcctccacacgggtctgggcatccggactgataaccagccggccagactgagggatggaaggcactgagatgggggcccgtccaggcggacacccgcagaaatggagctttctgtggtctcttgcactctggctgcctcttgccctctctgtgtctctctttcttggtctctccctctctcctcctcagcctggtctttctctttggtgcacacttagttattgttgtgagcaatggaagttcaaaggaactccctctccagctcttctgaatcttgggacacagcctaaaaaggacaaaaagttagaagacagcatagcaactcagctcagggagctaccagagaaaaatagcaactgatgtgggtgcttttttttttttttaatttgaataaaaagaattagaagtgatgtccttttataaaatgccttctcccccttcccgcctacagtctcttcctctccccttagaggggggaaagtgtataaacctacagggttgtgagtctgaaaagaggatccccctcacccccaccctgggcagagcagtgggggttggggggtgggagagggggacacagatcctggcacactgtggatatttcttgcagattgcagtctcttgtggcccaaacaggttaggtagactatcgcctctggcaggtgccaccttttggtaccaacatgttctgaggtgttaggatttgggttgggttttttttgtttgttttttttttccttttggtctttttttttttctccttttaaagaaaagctaaaggccgctgtgagtcctggtggcaggctctccatggatgtagcatatcgaagataatttttatactgcatttttatggattattttgtaatgtgtgattccgtctgctgaggaggtgggaggggctccagggaaagccacccaccttcagtgaggttgctccccagctgagcgcaccgggcatgggatgtggaggctggcgacacaccctgtgcctctccaaggctgggcgcgtggggcgtccagagtctctctgggtctcagatgtccatctgccacctcttgttaaggctctagccagaagggagggtgagggtagaagaaagttattcccgaagaaaaaaagaatgaaaagtcattgtactgaactgtttttatatttttaaaagttactatttaaaggttggtttgattgttgcgtcttaattgcctctcctcccagtttgccagtcccgccccccgccccccgggaaaacagccaggccactgttgctgtcacattctggagcctgggccagggccatttcccatcgatgtgagctcttctcatctcacagcattccctgcgctgcttccacccccttctccccttccagatacccagcatcgcagcagggatttcacaatcccatactgtgtcgcctcccatccaagcgccagggagggtggggggtaggagctaagacttcctctggacagatgggcagggcagagttcactgaggtgaaggaagaccacaggttaacaccaaagtattgtacagctgtcaatgcaaaacttttttggaaaaaaattaaacgtaatgaacttgaagcgaaactgcaaagtgtctgt

SEQ ID NO: 451993 - DNA, 4644 bp, Homo sapiens
actataatatatatctatttattatatgtctttcggttaattcctgatctgaggagcgctgtttttcactcccatgcgaaagtcaccagcgggtagggcctgattgctacttttcatgcatagttttagacacaagagggcattgtgacgtcgcgcccagcggcacccagtcgtaggccgagtcccgcagccccacgtgggggccccgcgctcccattggccagcgccggacgaagctgccacattattttgttacttttcagtccctatttggaactgctctcgcggcagttcagacctcgtgctcgtccccttcgcctgtctgtgtgtggtatccgtaggtccggggcactttttttttggtgtgtgtgtgtgtgcgtgcgcgcgtgtgtgtgtgttgggtgtgtgtgttttgggggtttgccggggcgcggagaggagagccgggccgaggggaaggaaggaagccgtagagctccccggtctcgggctgcgtctcccctccagcgctctcctgcctgtgcgctccgacgcggcagcggcggtggcgctgagcgctcctcggtggggacgcggtgctcaagctgggagcagcgagaaccctttgcggaggcttcccgtgcccgctggacttaggatgccagggcgtttgatttgcacctactgagcccggagttcctccccggccctgggaagggcttgcagcggcggcggcggcggcggcagcggcagtagcagacggaacagcaggctctcctctccgagggggggcgtcgaagcgcccgcgccgggctcccgccctcaccctccggcgctcctgcggccccaagccaccacctcgtagcccgcctccttcctcttctcgccgcgagccccaggcccggacgcctctaggatcggacccgcgcgccccggatgcttggggctgccccggcgcgcccccctacaggcgcgacccgctgagtgacccggagggggcccgagctcgccccaggaggggcccccggcctcgggaccccgcgccggacctgctggggagccgacgatgtccgcgcagtcccaggcattgacgcgctcgacgcagcccagggaaggcggccggccgctgcccgccgagccctaggcgcacaaagcccgcgcccgccgcccggccccggcgcccgccgacgactttgccgcctgctccgcggctctttgtctccacttggggcgggcgcccgactctgggatttcgctgcgagaacgagctgggggggccgggggcgagctctcggtttcccggccgccccccgctcgggctcggctcccccctcccccgcacctccccggcccgggctctcggcgcttccacgctctcggaatcacgacccctccctgccatgtatccgcagggcagacatccggctccccatcaacccgggcagccgggatttaaattcacggtggctgagtcttgtgacaggatcaaagacgaattccagttcctgcaagctcagtatcacagcctcaaagtggagtacgacaagctggcaaacgagaagacggagatgcagcgccattatgtgatgtactatgagatgtcctatggcttgaacattgaaatgcacaagcagacagagattgcgaagagactgaacacaattttagcacagatcatgcctttcctgtcacaagagcaccagcagcaggtggcgcaggcagtggagcgcgccaagcaggtcaccatgacggagctgaacgccatcatcgggcagcagcagctccaggcgcagcacctctcccatgccacacacggccccccggtccagttgccaccccacccgtcaggtctccagcctccaggaatccccccagtgacagggagcagctccgggctgctggcactgggcgccctgggcagccaggcccatctgacggtgaaggatgagaagaaccaccatgaactcgatcacagagagagagaatccagtgcgaataactctgtgtcaccctcggaaagcctccgggccagtgagaagcaccggggctctgcggactacagcatggaagccaagaagcggaaggcggaggagaaggacagcttgagccgatacgacagtgatggagacaagagtgatgatctggtggtggatgtttccaatgaggaccccgcaacgccccgggtcagcccggcacactcccctcctgaaaatgggctggacaaggcccgtagcctgaaaaaagatgcccccaccagccctgcctcggtggcctcttccagtagcacaccttcctccaagaccaaagaccttggtcataacgacaaatcctccacccctgggctcaagtccaacacaccaaccccaaggaacgacgccccaactccaggcaccagcacgaccccagggctcaggtcgatgccgggtaaacctccgggcatggacccgatagcctcggctctgcgcacgcccatctccatcaccagctcctatgcggcgcccttcgccatgatgagccaccatgagatgaacggctccctcaccagtcctggcgcctacgccggcctccacaacatcccaccccagatgagcgccgccgccgctgctgcagccgctgcctatggccgatcgccaatgtgagcttggagctgttggttttgaccctcaccccccgatgcgggccacaggcctcccctcaagcctggcctccattcctggaggaaaaccagcgtactcattccatgtgagtgctgatgggcagatgcagcccgtgcccttcccccacgacgccctggcaggccccggcatcccgaggcacgcccggcagatcaacacactcagccacggggaggtggtgtgtgccgtgaccatcagcaaccccacgaggcacgtctacacaggtggcaagggctgcgtgaagatctgggacatcagccagccaggcagcaagagccccatctcccagctggactgcctgaacagggacaattacatccgctcctgcaagctgctccctgatgggcgcacgctcatcgtgggcggcgaggccagcacgctcaccatctgggacctggcctcgcccacgccccgcatcaaggccgagctgacgtcctcggctcccgcctgttatgccctggccattagccctgacgccaaagtctgcttctcctgctgcagcgatgggaacattgctgtctgggacctgcacaaccagaccctggtcaggcagttccagggccacacagatggggccagctgcatagacatctcccatgatggcaccaaactgtggacagggggcctggacaacacggtgcgctcctgggacctgcgggagggccgacagctacagcagcatgacttcacttcccagatcttctcgctgggctactgccccactggggagtggctggctgtgggcatggagagcagcaacgtggaggtgctgcaccacaccaagcctgacaagtaccagctgcacctgcacgagagctgcgtgctctccctcaagttcgcctactgcggcaagtggttcgtgagcactgggaaagataaccttctcaacgcctggaggacgccttatggagccagcatattccagtctaaagaatcctcgtctgtcttgagttgtgacatttcagcggatgacaaatacattgtaacaggctctggtgacaagaaggccacagtttatgaggtcatctactaaacaagaactccagcagggctgtcaaactctgggagaaaccgactcggctctgacagggagacccccaggcgaggggccccgaggatggcggaggatgggccgcaggcagccgagcgttcagggctgcgctccggccggctgagagggcacgtgccccgtcacagtctggactcctgggcctggattgatgtgtctcacagactcggaagggttctgctcctcctcctccccctgaacaatgctggcagttgctacaaatagatttattggaggcttatggctccggttcccccacagacccgctcatgagtctctgtttgttcttcccttttcttttgccctgtccctcaccttgggtcgggggtgctggagtggaccacaatgttgtgctgggggatgggggggtctctctttgccgattgtgcagtgcacaagatttgtgaaaaatgtaaataacagactcctattgcggactgatcagtgggagaggaggccccttcccaccggaaactctgagtgtgtatttcgcctgctgtatttgtaatccactcgtggtggtggctttttttttttttttttttaaataaacagatgctctcacctgggaagaggagacagggaggggaaccaattgaagaaagaggagaaaagtcttagagtgtggaaaaggcaaccaggttggccgtaaggtgcctgctggaatgcgtgtgcctccacacgggtctgggcatccggactgataaccagccggccagactgagggatggaaggcactgagatgggggcccgtccaggcggacacccgcagaaatggagctttctgtggtctcttgcaagttcactgaggtgaaggaagaccacaggttaacaccaaagtattgtacagctgtcaatgcaaaacttttttggaaaaaaattaaacgtaatgaacttgaagcgaaactgcaaagtgtctgt

SEQ ID NO: 451994 - DNA, 2766 bp, Homo sapiens
agcatctggaaagctcgcctgtcttcgtctgcatcctgctgatcttcctgtgcccaggacgctccttggcttatgggtgaaacaggcatgcgttgctcaacctgaagtaacagcgagagctccttccagacatcactcagcttcctgttcacgtccttgaagagtattttgtcctggcttgctgttagaaacctgcagatattggatctattgctgaacttttctatctccccattagcctcctcaagttcgcctactgcggcaagtggttcgtgagcactgggaaagataaccttctcaacgcctggaggacgccttatggagccagcatattccagtctaaagaatcctcgtctgtcttgagttgtgacatttcagcggatgacaaatacattgtaacaggctctggtgacaagaaggccacagtttatgaggtcatctactaaacaagaactccagcagggctgtcaaactctgggagaaaccgactcggctctgacagggagacccccaggcgaggggccccgaggatggcggaggatgggccgcaggcagccgagcgttcagggctgcgctccggccggctgagagggcacgtgccccgtcacagtctggactcctgggcctggattgatgtgtctcacagactcggaagggttctgctcctcctcctccccctgaacaatgctggcagttgctacaaatagatttattggaggcttatggctccggttcccccacagacccgctcatgagtctctgtttgttcttcccttttcttttgccctgtccctcaccttgggtcgggggtgctggagtggaccacaatgttgtgctgggggatgggggggtctctctttgccgattgtgcagtgcacaagatttgtgaaaaatgtaaataacagactcctattgcggactgatcagtgggagaggaggccccttcccaccggaaactctgagtgtgtatttcgcctgctgtatttgtaatccactcgtggtggtggctttttttttttttttttttaaataaacagatgctctcacctgggaagaggagacagggaggggaaccaattgaagaaagaggagaaaagtcttagagtgtggaaaaggcaaccaggttggccgtaaggtgcctgctggaatgcgtgtgcctccacacgggtctgggcatccggactgataaccagccggccagactgagggatggaaggcactgagatgggggcccgtccaggcggacacccgcagaaatggagctttctgtggtctcttgcactctggctgcctcttgccctctctgtgtctctctttcttggtctctccctctctcctcctcagcctggtctttctctttggtgcacacttagttattgttgtgagcaatggaagttcaaaggaactccctctccagctcttctgaatcttgggacacagcctaaaaaggacaaaaagttagaagacagcatagcaactcagctcagggagctaccagagaaaaatagcaactgatgtgggtgcttttttttttttttaatttgaataaaaagaattagaagtgatgtccttttataaaatgccttctcccccttcccgcctacagtctcttcctctccccttagaggggggaaagtgtataaacctacagggttgtgagtctgaaaagaggatccccctcacccccaccctgggcagagcagtgggggttggggggtgggagagggggacacagatcctggcacactgtggatatttcttgcagattgcagtctcttgtggcccaaacaggttaggtagactatcgcctctggcaggtgccaccttttggtaccaacatgttctgaggtgttaggatttgggttgggttttttttgtttgttttttttttccttttggtctttttttttttctccttttaaagaaaagctaaaggccgctgtgagtcctggtggcaggctctccatggatgtagcatatcgaagataatttttatactgcatttttatggattattttgtaatgtgtgattccgtctgctgaggaggtgggaggggctccagggaaagccacccaccttcagtgaggttgctccccagctgagcgcaccgggcatgggatgtggaggctggcgacacaccctgtgcctctccaaggctgggcgcgtggggcgtccagagtctctctgggtctcagatgtccatctgccacctcttgttaaggctctagccagaagggagggtgagggtagaagaaagttattcccgaagaaaaaaagaatgaaaagtcattgtactgaactgtttttatatttttaaaagttactatttaaaggttggtttgattgttgcgtcttaattgcctctcctcccagtttgccagtcccgccccccgccccccgggaaaacagccaggccactgttgctgtcacattctggagcctgggccagggccatttcccatcgatgtgagctcttctcatctcacagcattccctgcgctgcttccacccccttctccccttccagatacccagcatcgcagcagggatttcacaatcccatactgtgtcgcctcccatccaagcgccagggagggtggggggtaggagctaagacttcctctggacagatgggcagggcagagttcactgaggtgaaggaagaccacaggttaacaccaaagtattgtacagctgtcaatgcaaaacttttttggaaaaaaattaaacgtaatgaacttgaagcgaaactgcaaagtgtctgt

SEQ ID NO: 451995 - DNA, 2703 bp, Homo sapiens
taaagatcacgtgggagactgttactgagcttttccttatggaaaagcaggtgggaggggagctctacctgaaaatgcttcatgggtgctttaaagcctcccccacctcctcttcaccgcactgtgctccaggtcggagcatcagagaggggcagaggagggcaattgttgccgagagaaccgagatggtgttgagcactggaaaatgaattcctgtcttttttctccctgcaccccacgccttcctgctgcttctcctcgtcttcctcctccagtctaaagaatcctcgtctgtcttgagttgtgacatttcagcggatgacaaatacattgtaacaggctctggtgacaagaaggccacagtttatgaggtcatctactaaacaagaactccagcagggctgtcaaactctgggagaaaccgactcggctctgacagggagacccccaggcgaggggccccgaggatggcggaggatgggccgcaggcagccgagcgttcagggctgcgctccggccggctgagagggcacgtgccccgtcacagtctggactcctgggcctggattgatgtgtctcacagactcggaagggttctgctcctcctcctccccctgaacaatgctggcagttgctacaaatagatttattggaggcttatggctccggttcccccacagacccgctcatgagtctctgtttgttcttcccttttcttttgccctgtccctcaccttgggtcgggggtgctggagtggaccacaatgttgtgctgggggatgggggggtctctctttgccgattgtgcagtgcacaagatttgtgaaaaatgtaaataacagactcctattgcggactgatcagtgggagaggaggccccttcccaccggaaactctgagtgtgtatttcgcctgctgtatttgtaatccactcgtggtggtggctttttttttttttttttttaaataaacagatgctctcacctgggaagaggagacagggaggggaaccaattgaagaaagaggagaaaagtcttagagtgtggaaaaggcaaccaggttggccgtaaggtgcctgctggaatgcgtgtgcctccacacgggtctgggcatccggactgataaccagccggccagactgagggatggaaggcactgagatgggggcccgtccaggcggacacccgcagaaatggagctttctgtggtctcttgcactctggctgcctcttgccctctctgtgtctctctttcttggtctctccctctctcctcctcagcctggtctttctctttggtgcacacttagttattgttgtgagcaatggaagttcaaaggaactccctctccagctcttctgaatcttgggacacagcctaaaaaggacaaaaagttagaagacagcatagcaactcagctcagggagctaccagagaaaaatagcaactgatgtgggtgcttttttttttttttaatttgaataaaaagaattagaagtgatgtccttttataaaatgccttctcccccttcccgcctacagtctcttcctctccccttagaggggggaaagtgtataaacctacagggttgtgagtctgaaaagaggatccccctcacccccaccctgggcagagcagtgggggttggggggtgggagagggggacacagatcctggcacactgtggatatttcttgcagattgcagtctcttgtggcccaaacaggttaggtagactatcgcctctggcaggtgccaccttttggtaccaacatgttctgaggtgttaggatttgggttgggttttttttgtttgttttttttttccttttggtctttttttttttctccttttaaagaaaagctaaaggccgctgtgagtcctggtggcaggctctccatggatgtagcatatcgaagataatttttatactgcatttttatggattattttgtaatgtgtgattccgtctgctgaggaggtgggaggggctccagggaaagccacccaccttcagtgaggttgctccccagctgagcgcaccgggcatgggatgtggaggctggcgacacaccctgtgcctctccaaggctgggcgcgtggggcgtccagagtctctctgggtctcagatgtccatctgccacctcttgttaaggctctagccagaagggagggtgagggtagaagaaagttattcccgaagaaaaaaagaatgaaaagtcattgtactgaactgtttttatatttttaaaagttactatttaaaggttggtttgattgttgcgtcttaattgcctctcctcccagtttgccagtcccgccccccgccccccgggaaaacagccaggccactgttgctgtcacattctggagcctgggccagggccatttcccatcgatgtgagctcttctcatctcacagcattccctgcgctgcttccacccccttctccccttccagatacccagcatcgcagcagggatttcacaatcccatactgtgtcgcctcccatccaagcgccagggagggtggggggtaggagctaagacttcctctggacagatgggcagggcagagttcactgaggtgaaggaagaccacaggttaacaccaaagtattgtacagctgtcaatgcaaaacttttttggaaaaaaattaaacgtaatgaacttgaagcgaaactgcaaagtgtctgt
